United States Patent Application Publication US 2011/0183924 A1 - sequence listing, part 181

SEQ ID NO: 444111 - DNA, 3747 bp, Homo sapiens
gcggccgctgcggggcggccagctgcccttcacaaacatggcggccgaggggtgcggggagtggcggggtaaggatgggaagccgagcagacggccccagaacaagcggtcatgtgactgggaagatggccgtctttccttggcactccaggaataggaactacaaagctgaatttgcatcatgccgactggaggctgtaccattggagtttggggactatcaccctctgaaacccataactgtcacagagtcaaagacaaagaaagtgaaccggaaaggaagcacttcttccacgtcctcctcctcctccagctccgtggtggacccgctgagcagcgtcctcgatgggactgaccccctctccatgtttgcagccactgctgaccccgcagccttggcagctgccatggacagctccagaaggaaacgtgatagagatgataactccgttgtaggatcggattttgagccttggaccaacaaacggggagaaatccttgcccggtacaccactaccgaaaagctgtctattaatctgtttatgggatctgaaaaaggcaaagctgggactgccacattggcaatgtcagagaaggtgcggacccggctggaggagctggatgactttgaggagggttcccaaaaggagctgttgaacttgactcagcaggattacgtgaaccgcatagaggagctcaaccaatcgctgaaggatgcctgggcctcagaccagaaagtgaaggctctaaaaatagtcatccagtgttcaaagcttctttcagacaccagtgttattcagttctacccaagcaaatttgtccttatcaccgacatacttgatacatttggaaagctcgtgtacgagcgcatcttttccatgtgtgtggatagccgcagcgtcttaccagatcacttttctccagagaatgcaaatgacacggccaaggaaacatgcctaaattggtttttcaagattgcctccatcagggaactcattccaagattttacgtggaggcatccatcctgaaatgtaacaaattcctctccaaaacgggaatttcagagtgcctgccccggttgacatgcatgatcagagggatcggagacccactagtgtcggtgtatgcccgtgcctacctgtgccgggtgggaatggaagtggccccacatctcaaagaaaccctaaataagaacttttttgacttcctccttacgttcaaacagattcatggggatacggtccagaaccagctggtggtccaaggagtggagctcccatcttacctccccttgtacccgcctgccatggactggatcttccagtgcatctcctaccatgcccccgaggctctgctgaccgagatgatggaaaggtgtaagaaactaggaaacaatgccttgctgttgaattctgtgatgtctgccttccgggctgagttcatcgccacaaggtctatggatttcattggcatgattaaagagtgtgatgaatctggtttccccaagcatcttctttttcgatcactgggattaaacttggccttggctgatcctcctgagagtgaccgacttcagattctcaacgaagcttggaaagtcatcactaagctgaagaacccacaggactacattaattgtgccgaagtgtgggtggaatacacctgcaagcatttcacgaaacgagaggtgaataccgttttggcagatgtcatcaagcacatgactccagatcgtgcatttgaagattcctacccccagcttcagttaataattaagaaagttattgcccacttccatgacttctcagttcttttctcagtggaaaaatttctgccgtttctggacatgttccaaaaagagagtgtgcgggtggaggtttgcaaatgcatcatggacgcctttatcaagcatcaacaagagcccaccaaggacccggtcatcttgaatgcccttttgcatgtttgcaagaccatgcatgactctgtgaatgcactcactcttgaggatgagaaaagaatgctgtcatatttgattaatggatttataaaaatggtttcctttggccgtgattttgaacaacagctgagtttttatgttgagtccaggtcgatgttttgcaatctggagcctgttcttgtgcagttgattcatagtgtgaaccggttggcaatggagacaagaaaagtaatgaaaggaaatcattccagaaagacagctgcatttgtccgggcctgtgttgcctactgcttcatcaccatcccctccctggcgggcatcttcacacgtctcaatctctacctgcattctggtcaggtggccttggccaaccagtgcctctcccaagctgatgcttttttcaaagccgctataagccttgttccggaagttccaaagatgattaatattgatgggaagatgcggccatcggaatcgttccttctggaattcctctgcaatttcttttctactttattaatagttccggatcatcctgaacatggggtcctgtttcttgttcgagagcttctcaacgtgatccaggactacacctgggaggacaacagcgatgagaaaatccgcatctacacctgcgtcctgcatctcctctccgccatgagccaggagacgtacctttaccacatagacaaagtggactccaacgacagcctctacgggggagactccaagttcctggcagaaaacaacaagctgtgtgagacggtgatggctcagatcctagagcatctgaaaaccctggccaaggacgaggccctgaagcgccagagctcgttgggcctttccttctttaacagcatcttggcccatggggacctacgcaacaacaagctcaaccagctctccgtcaacctgtggcacctggcacagaggcacggctgtgcagacaccaggaccatggtgaaaacgctagaatacatcaagaagcaaagcaaacaaccagacatgactcatctgacggagctggccctcagactccctctgcaaacaaggacctgacccccgggcccatccccaggctcagggactctggtgccaaatccagaaagatctgctctgctgccctgaactcttacggcaatttaggtttctcatttttcttttctttttacatatgtacaaattgttttaagctttggcctctatccaggttattctgacaatgaagaaatgggagttgtcagagcattaaaatgcaatcttcactaagaagcagtctctgtgttgtctttgcacaagtggccttcggtctactcagcccgatctgatgggcctttttagcaagagagaaacaagaatgcaagtaacatctttcttctctggaaggtgtttgttttttcatagtttagaaataaggactttaaaagtggactgcttttcaaagtgccactgttccagacccattccattccagactttgtaccttaaagttagagcacacccaaagtctggaactgtgttacctgaacccctatggaggatttataaaaggcagaaatagcactccattaactctttttcctatcaaaagcagctcttgattggacttagaatctgtgttggtggatcaaaggagaaagcgaggtcaaatttgagattctctgtggcttcagtatacagtaactgaataaatgtcctgaaggagcatttatgttcatgactgttcatttaattacttctgactgtcttcctccagaagagaaagaccgtgtctaaatatattatcctg

SEQ ID NO: 444112 - DNA, 3665 bp, Homo sapiens
gcggccgctgcggggcggccagctgcccttcacaaacatggcggccgaggggtgcggggagtggcggggtaaggatgggaagccgagcagacggccccagaacaagcggtcatgtgactgggaagatggccgtctttccttggcactccaggaataggaactacaaagctgaatttgcatcatgccgactggaggctgtaccattggagtttggggactatcaccctctgaaacccataactgtcacagagtcaaagacaaagaaagtgaaccggaaaggaagcacttcttccacgtcctcctcctcctccagctccgtggtggacccgctgagcagcgtcctcgatgggactgaccccctctccatgtttgcagccactgctgaccccgcagccttggcagctgccatggacagctccagaaggaaacgtgatagagatgataactccgttgtaggatcggattttgagccttggaccaacaaacggggagaaatccttgcccggtacaccactaccgaaaagctgtctattaatctgtttatgggatctgaaaaaggcaaagctgggactgccacattggcaatgtcagagaaggtgcggacccggctggaggagctggatgactttgaggagggttcccaaaaggagctgttgaacttgactcagcaggattacgtgaaccgcatagaggagctcaaccaatcgctgaaggatgcctgggcctcagaccagaaagtgaaggctctaaaaatagtcatccagtgttcaaagcttctttcagacaccagtgttattcagttctacccaagcaaatttgtccttatcaccgacatacttgatacatttggaaagctcgtgtacgagcgcatcttttccatgtgtgtggatagccgcagcgtcttaccagatcacttttctccagagaatgcaaatgacacggccaaggaaacatgcctaaattggtttttcaagattgcctccatcagggaactcattccaagattttacgtggaggcatccatcctgaaatgtaacaaattcctctccaaaacgggaatttcagagtgcctgccccggttgacatgcatgatcagagggatcggagacccactagtgtcggtgtatgcccgtgcctacctgtgccgggtgggaatggaagtggccccacatctcaaagaaaccctaaataagaacttttttgacttcctccttacgttcaaacagattcatggggatacggtccagaaccagctggtggtccaaggagtggagctcccatcttacctccccttgtacccgcctgccatggactggatcttccagtgcatctcctaccatgcccccgaggctctgctgaccgagatgatggaaaggtgtaagaaactaggaaacaatgccttgctgttgaattctgtgatgtctgccttccgggctgagttcatcgccacaaggtctatggatttcattggcatgattaaagagtgtgatgaatctggtttccccaagcatcttctttttcgatcactgggattaaacttggccttggctgatcctcctgagagtgaccgacttcagattctcaacgaagcttggaaagtcatcactaagctgaagaacccacaggactacattaattgtgccgaagtgtgggtggaatacacctgcaagcatttcacgaaacgagaggtgaataccgttttggcagatgtcatcaagcacatgactccagatcgtgcatttgaagattcctacccccagcttcagttaataattaagaaagttattgcccacttccatgacttctcagttcttttctcagtggaaaaatttctgccgtttctggacatgttccaaaaagagagtgtgcgggtggaggtttgcaaatgcatcatggacgcctttatcaagcatcaacaagagcccaccaaggacccggtcatcttgaatgcccttttgcatgtttgcaagaccatgcatgactctgtgaatgcactcactcttgaggatgagaaaagaatgctgtcatatttgattaatggatttataaaaatggtttcctttggccgtgattttgaacaacagctgagtttttatgttgagtccaggtcgatgttttgcaatctggagcctgttcttgtgcagttgattcatagtgtgaaccggttggcaatggagacaagaaaagtaatgaaaggaaatcattccagaaagacagctgcatttgtccgggcctgtgttgcctactgcttcatcaccatcccctccctggcgggcatcttcacacgtctcaatctctacctgcattctggtcaggtggccttggccaaccagtgcctctcccaagctgatgcttttttcaaagccgctataagccttgttccggaagttccaaagatgattaatattgatgggaagatgcggccatcggaatcgttccttctggaattcctctgcaatttcttttctactttattaatagttccggatcatcctgaacatggggtcctgtttcttgttcgagagcttctcaacgtgatccaggactacacctgggaggacaacagcgatgagaaaatccgcatctacacctgcgtcctgcatctcctctccgccatgagccaggagacgtacctttaccacatagacaaagtggactccaacgacagcctctacgggggagactccaagttcctggcagaaaacaacaagctgtgtgagacggtgatggctcagatcctagagcatctgaaaaccctggccaaggacgaggccctgaagcgccagagctcgttgggcctttccttctttaacagcatcttggcccatggggacctacgcaacaacaagctcaaccagctctccgtcaacctgtggcacctggcacagaggcacggctgtgcagacaccaggaccatggtgaaaacgctagaatacatcaagaagcaaagcaaacaaccagacatgactcatctgacggagctggccctcagactccctctgcaaacaaggacctgacccccgggcccatccccaggctcagggactctggtgccaaatccagaaagatctgctctgctgccctgaactcttacggcaatttaggtttctcatttttcttttctttttacatatgtacaaattgttttaagctttggcctctatccaggttattctgacaatgaagaaatgggagttgtcagagcattaaaatgcaatcttcactaagaagcagtctctgtgttgtctttgcacaagtggccttcggtctactcagcccgatctgatgggcctttttagcaagagagaaacaagaatgcaagtaacatctttcttctctggaaggtgtttgttttttcatagtttagaaataaggactttaaaagtggactgcttttcaaagtgccactgttccagacccattccattccagactttgtaccttaaagttagagcacacccaaagtctggaactgtgttacctgaacccctatggaggatttataaaaggcagaaatagcactccattaactctttttcctatcaaaagcagctcttgattggacttagaatctgtgttggtggatcaaaggagaaagcgaggtcaaatttgagattctctgtggcttcagtatacagtaactgaataaatgtcctgaaggagca

SEQ ID NO: 444113 - DNA, 3028 bp, Homo sapiens
gcggccgctgcggggcggccagctgcccttcacaaacatggcggccgaggggtgcggggagtggcggggtaaggatgggaagccgagcagacggccccagaacaagcggtcatgtgactgggaagatggccgtctttccttggcactccaggaataggaactacaaagctgaatttgcatcatgccgactggaggctgtaccattggagtttggggactatcaccctctgaaacccataactgtcacagagtcaaagacaaagaaagtgaaccggaaaggaagcacttcttccacgtcctcctcctcctccagctccgtggtggacccgctgagcagcgtcctcgatgggactgaccccctctccatgtttgcagccactgctgaccccgcagccttggcagctgccatggacagctccagaaggaaacgtgatagagatgataactccgttgtaggatcggattttgagccttggaccaacaaacggggagaaatccttgcccggtacaccactaccgaaaagctgtctattaatctgtttatgggatctgaaaaaggcaaagctgggactgccacattggcaatgtcagagaaggtgcggacccggctggaggagctggatgactttgaggagggttcccaaaaggagctgttgaacttgactcagcaggattacgtgaaccgcatagaggagctcaaccaatcgctgaaggatgcctgggcctcagaccagaaagtgaaggctctaaaaatagtcatccagtgttcaaagcttctttcagacaccagtgttattcagttctacccaagcaaatttgtccttatcaccgacatacttgatacatttggaaagctcgtgtacgagcgcatcttttccatgtgtgtggatagccgcagcgtcttaccagatcacttttctccagagaatgcaaatgacacggccaaggaaacatgcctaaattggtttttcaagattgcctccatcagggaactcattccaagattttacgtggaggcatccatcctgaaatgtaacaaattcctctccaaaacgggaatttcagagtgcctgccccggttgacatgcatgatcagagggatcggagacccactagtgtcggtgtatgcccgtgcctacctgtgccgggctctgctgaccgagatgatggaaaggtgtaagaaactaggaaacaatgccttgctgttgaattctgtgatgtctgccttccgggctgagttcatcgccacaaggtctatggatttcattggcatgattaaagagtgtgatgaatctggtttccccaagcatcttctttttcgatcactgggattaaacttggccttggctgatcctcctgagagtgaccgacttcagattctcaacgaagcttggaaagtcatcactaagctgaagaacccacaggactacattaattgtgccgaagtgtgggtggaatacacctgcaagcatttcacgaaacgagaggtgaataccgttttggcagatgtcatcaagcacatgactccagatcgtgcatttgaagattcctacccccagcttcagttaataattaagaaagttattgcccacttccatgacttctcagttcttttctcagtggaaaaatttctgccgtttctggacatgttccaaaaagagagtgtgcgggtggaggtttgcaaatgcatcatggacgcctttatcaagcatcaacaagagcccaccaaggacccggtcatcttgaatgcccttttgcatgtttgcaagaccatgcatgactctgtgaatgcactcactcttgaggatgagaaaagaatgctgtcatatttgattaatggatttataaaaatggtttcctttggccgtgattttgaacaacagctgagtttttatgttgagtccaggtcgatgttttgcaatctggagcctgttcttgtgcagttgattcatagtgtgaaccggttggcaatggagacaagaaaagtaatgaaaggaaatcattccagaaagacagctgcatttgtccgggcctgtgttgcctactgcttcatcaccatcccctccctggcgggcatcttcacacgtctcaatctctacctgcattctggtcaggtggccttggccaaccagtgcctctcccaagctgatgcttttttcaaagccgctataagccttgttccggaagttccaaagatgattaatattgatgggaagatgcggccatcggaatcgttccttctggaattcctctgcaatttcttttctactttattaatagttccggatcatcctgaacatggggtcctgtttcttgttcgagagcttctcaacgtgatccaggactacacctgggaggacaacagcgatgagaaaatccgcatctacacctgcgtcctgcatctcctctccgccatgagccaggagacgtacctttaccacatagacaaagtggactccaacgacagcctctacgggggagactccaagttcctggcagaaaacaacaagctgtgtgagacggtgatggctcagatcctagagcatctgaaaaccctggccaaggacgaggccctgaagcgccagagctcgttgggcctttccttctttaacagcatcttggcccatggggacctacgcaacaacaagctcaaccagctctccgtcaacctgtggcacctggcacagaggcacggctgtgcagacaccaggaccatggtgaaaacgctagaatacatcaagaagcaaagcaaacaaccagacatgactcatctgacggagctggccctcagactccctctgcaaacaaggacctgacccccgggcccatccccaggctcagggactctggtgccaaatccagaaagatctgctctgctgccctgaactcttacggcaatttaggtttctcatttttcttttctttttacatatgtacaaattgttttaagctttggcctctatccaggttattctgacaatgaagaaatgggagttgtcagagcattaaaatgcaatcttcactaaga

SEQ ID NO: 444114 - DNA, 3074 bp, Homo sapiens
gcggccgctgcggggcggccagctgcccttcacaaacatggcggccgaggggtgcggggagtggcggggtaaggatgggaagccgagcagacggccccagaacaagcggtcatgtgactgggaagatggccgtctttccttggcactccaggaataggaactacaaagctgaatttgcatcatgccgactggaggctgtaccattggagtttggggactatcaccctctgaaacccataactgtcacagagtcaaagacaaagaaagtgaaccggaaaggaagcacttcttccacgtcctcctcctcctccagctccgtggtggacccgctgagcagcgtcctcgatgggactgaccccctctccatgtttgcagccactgctgaccccgcagccttggcagctgccatggacagctccagaaggaaacgtgatagagatgataactccgttgtaggatcggattttgagccttggaccaacaaacggggagaaatccttgcccggtacaccactaccgaaaagctgtctattaatctgtttatgggatctgaaaaaggcaaagctgggactgccacattggcaatgtcagagaaggtgcggacccggctggaggagctggatgactttgaggagggttcccaaaaggagctgttgaacttgactcagcaggattacgtgaaccgcatagaggagctcaaccaatcgctgaaggatgcctgggcctcagaccagaaagtgaaggctctaaaaatagtcatccagtgttcaaagcttctttcagacaccagtgttattcagttctacccaagcaaatttgtccttatcaccgacatacttgatacatttggaaagctcgtgtacgagcgcatcttttccatgtgtgtggatagccgcagcgtcttaccagatcacttttctccagagaatgcaaatgacacggccaaggaaacatgcctaaattggtttttcaagattgcctccatcagggaactcattccaagattttacgtggaggcatccatcctgaaatgtaacaaattcctctccaaaacgggaatttcagagtgcctgccccggttgacatgcatgatcagagggatcggagacccactagtgtcggtgtatgcccgtgcctacctgtgccgggtgggaatggaagtggccccacatctcaaagaaaccctaaataagaacttttttgacttcctccttacgttcaaacagattcatggggatacggtccagaaccagctggtggtccaaggagtggagctcccatcttacctccccttgtacccgcctgccatggactggatcttccagtgcatctcctaccatgcccccgaggctctgctgaccgagatgatggaaaggtgtaagaaactaggaaacaatgccttgctgttgaattctgtgatgtctgccttccgggctgagttcatcgccacaaggtctatggatttcattggcatgattaaagagtgtgatgaatctggtttccccaagcatcttctttttcgatcactgggattaaacttggccttggctgatcctcctgagagtgaccgacttcagattctcaacgaagcttggaaagtcatcactaagctgaagaacccacaggactacattaattgtgccgaagtgtgggtggaatacacctgcaagcatttcacgaaacgagaggtgaataccgttttggcagatgtcatcaagcacatgactccagatcgtgcatttgaagattcctacccccagcttcagttaataattaagaaagttattgcccacttccatgacttctcagttcttttctcagtggaaaaatttctgccgtttctggacatgttccaaaaagagagtgtgcgggtggaggtttgcaaatgcatcatggacgcctttatcaagcatcaacaagagcccaccaaggacccggtcatcttgaatgcccttttgcatgtttgcaagaccatgcatgactctgtgaatgcactcactcttgaggatgagaaaagaatgctgtcatatttgattaatggatttataaaaatggtttcctttggccgtgattttgaacaacagctgagtttttatgttgagtccaggtcgatgttttgcaatctggagcctgttcttgtgcagttgattcatagtgtgaaccggttggcaatggagacaagaaaagtaatgaaaggaaatcattccagaaagacagctgcatttgtccgggcctgtgttgcctactgcttcatcaccatcccctccctggcgggcatcttcacacgtctcaatctctacctgcattctggtcaggtggccttggccaaccagtgcctctcccaagctgatgcttttttcaaagccgctataagccttgttccggaagttccaaagatgattaatattgatgggaagatgcggccatcggaatcgttccttctggaattcctctgcaatttcttttctactttattaatagttccggatcatcctgaacatggggtcctgtttcttgttcgagagcttctcaacgtgatccaggactacacctgggaggacaacagcgatgagaaaatccgcatctacacctgcgtcctgcatctcctctccgccatgagccaggagacgtacctttaccacatagacaaagtggactccaacgacagcctctacgggggagactccaagttcctggcagaaaacaacaagctgtgtgagacggtgatggctcagatcctagagcatctgaaaaccctggccaaggacgaggtgggtgccctctgctgtcctccacccgccccttgctctgaaagcacaagtttccagggtggttcaaccttggttcattctagaaaggaaactatgtcatgtgagtaatgtgtttatgtgcaaaccacttctccattgctttggggccttcgctcctgctgttttctctgcctggactgcgcctcccccagggcttcccctggctgttccttctcgtcattgaaatctcagctcaaaggacctcctcaggccttcccggaccctgtctgaaggagccaccaccacctgcatgcctctgcccga

SEQ ID NO: 444115 - DNA, 2487 bp, Homo sapiens
ggattatattagaggcagtggctaagaatgtcggccgcagggccagagtgcctgggttgaattctaactcttacatttgcttgctgtgtgccttggatcacttttctccagagaatgcaaatgacacggccaaggaaacatgcctaaattggtttttcaagattgcctccatcagggaactcattccaagattttacgtggaggcatccatcctgaaatgtaacaaattcctctccaaaacgggaatttcagagtgcctgccccggttgacatgcatgatcagagggatcggagacccactagtgtcggtgtatgcccgtgcctacctgtgccggcagaggccaaagtgtgtatgcatcgcccactgcttgaaacctgggggggattttccatccagagatatcaggtgggaatggaagtggccccacatctcaaagaaaccctaaataagaacttttttgacttcctccttacgttcaaacagattcatggggatacggtccagaaccagctggtggtccaaggagtggagctcccatcttacctccccttgtacccgcctgccatggactggatcttccagtgcatctcctaccatgcccccgaggctctgctgaccgagatgatggaaaggtgtaagaaactaggaaacaatgccttgctgttgaattctgtgatgtctgccttccgggctgagttcatcgccacaaggtctatggatttcattggcatgattaaagagtgtgatgaatctggtttccccaagcatcttctttttcgatcactgggattaaacttggccttggctgatcctcctgagagtgaccgacttcagattctcaacgaagcttggaaagtcatcactaagctgaagaacccacaggactacattaattgtgccgaagtgtgggtggaatacacctgcaagcatttcacgaaacgagaggtgaataccgttttggcagatgtcatcaagcacatgactccagatcgtgcatttgaagattcctacccccagcttcagttaataattaagaaagttattgcccacttccatgacttctcagttcttttctcagtggaaaaatttctgccgtttctggacatgttccaaaaagagagtgtgcgggtggaggtttgcaaatgcatcatggacgcctttatcaagcatcaacaagagcccaccaaggacccggtcatcttgaatgcccttttgcatgtttgcaagaccatgcatgactctgtgaatgcactcactcttgaggatgagaaaagaatgctgtcatatttgattaatggatttataaaaatggtttcctttggccgtgattttgaacaacagctgagtttttatgttgagtccaggtcgatgttttgcaatctggagcctgttcttgtgcagttgattcatagtgtgaaccggttggcaatggagacaagaaaagtaatgaaaggaaatcattccagaaagacagctgcatttgtccgggcctgtgttgcctactgcttcatcaccatcccctccctggcgggcatcttcacacgtctcaatctctacctgcattctggtcaggtggccttggccaaccagtgcctctcccaagctgatgcttttttcaaagccgctataagccttgttccggaagttccaaagatgattaatattgatgggaagatgcggccatcggaatcgttccttctggaattcctctgcaatttcttttctactttattaatagttccggatcatcctgaacatggggtcctgtttcttgttcgagagcttctcaacgtgatccaggactacacctgggaggacaacagcgatgagaaaatccgcatctacacctgcgtcctgcatctcctctccgccatgagccaggagacgtacctttaccacatagacaaagtggactccaacgacagcctctacgggggagactccaagttcctggcagaaaacaacaagctgtgtgagacggtgatggctcagatcctagagcatctgaaaaccctggccaaggacgaggccctgaagcgccagagctcgttgggcctttccttctttaacagcatcttggcccatggggacctacgcaacaacaagctcaaccagctctccgtcaacctgtggcacctggcacagaggcacggctgtgcagacaccaggaccatggtgaaaacgctagaatacatcaagaagcaaagcaaacaaccagacatgactcatctgacggagctggccctcagactccctctgcaaacaaggacctgacccccgggcccatccccaggctcagggactctggtgccaaatccagaaagatctgctctgctgccctgaactcttacggcaatttaggtttctcatttttcttttctttttacatatgtacaaattgttttaagctttggcctctatccaggttattctgacaatgaagaaatgggagttgtcagagcattaaaatgcaatcttcactaaga

SEQ ID NO: 444116 - DNA, 1991 bp, Homo sapiens
gcggccgctgcggggcggccagctgcccttcacaaacatggcggccgaggggtgcggggagtggcggggtaaggatgggaagccgagcagacggccccagaacaagcggtcatgtgactgggaagatggccgtctttccttggcactccaggaataggaactacaaagctgaatttgcatcatgccgactggaggctgtaccattggagtttggggactatcaccctctgaaacccataactgtcacagagtcaaagacaaagaaagtgaaccggaaaggaagcacttcttccacgtcctcctcctcctccagctccgtggtggacccgctgagcagcgtcctcgatgggactgaccccctctccatgtttgcagccactgctgaccccgcagccttggcagctgccatggacagctccagaaggaaacgtgatagagatgataactccgttgtaggatcggattttgagccttggaccaacaaacggggagaaatccttgcccggtacaccactaccgaaaagctgtctattaatctgtttatgggatctgaaaaaggcaaagctgggactgccacattggcaatgtcagagaaggtgcggacccggctggaggagctggatgactttgaggagggttcccaaaaggagctgttgaacttgactcagcaggattacgtgaaccgcatagaggagctcaaccaatcgctgaaggatgcctgggcctcagaccagaaagtgaaggctctaaaaatagtcatccagtgttcaaagcttctttcagacaccagtgttattcagttctacccaagcaaatttgtccttatcaccgacatacttgatacatttggaaagctcgtgtacgagcgcatcttttccatgtgtgtggatagccgcagcgtcttaccagatcacttttctccagagaatgcaaatgacacggccaaggaaacatgcctaaattggtttttcaagattgcctccatcagggaactcattccaagattttacgtggaggcatccatcctgaaatgtaacaaattcctctccaaaacgggaatttcagagtgcctgccccggttgacatgcatgatcagagggatcggagacccactagtgtcggtgtatgcccgtgcctacctgtgccgggtgggaatggaagtggccccacatctcaaagaaaccctaaataagaacttttttgacttcctccttacgttcaaacagattcatggggatacggtccagaaccagctggtggtccaaggagtggagctcccatcttacctccccttgtacccgcctgccatggactggatcttccagtgcatctcctaccatgcccccgaggctctgctgaccgagatgatggaaaggtatgagccaggagacgtacctttaccacatagacaaagtggactccaacgacagcctctacgggggagactccaagttcctggcagaaaacaacaagctgtgtgagacggtgatggctcagatcctagagcatctgaaaaccctggccaaggacgaggccctgaagcgccagagctcgttgggcctttccttctttaacagcatcttggcccatggggacctacgcaacaacaagctcaaccagctctccgtcaacctgtggcacctggcacagaggcacggctgtgcagacaccaggaccatggtgaaaacgctagaatacatcaagaagcaaagcaaacaaccagacatgactcatctgacggagctggccctcagactccctctgcaaacaaggacctgacccccgggcccatccccaggctcagggactctggtgccaaatccagaaagatctgctctgctgccctgaactcttacggcaatttaggtttctcatttttcttttctttttacatatgtacaaattgttttaagctttggcctctatccaggttattctgacaatgaagaaatgggagttgtcagagcattaaaatgcaatcttcactaaga

SEQ ID NO: 444117 - DNA, 1635 bp, Homo sapiens
  misc_feature (1590)..(1590): n is a, c, g, or t
  misc_feature (1613)..(1613): n is a, c, g, or t
gcggccgctgcggggcggccagctgcccttcacaaacatggcggccgaggggtgcggggagtggcggggtaaggatgggaagccgagcagacggccccagaacaagcggtcatgtgactgggaagatggccgtctttccttggcactccaggaataggaactacaaagctgaatttgcatcatgccgactggaggctgtaccattggagtttggggactatcaccctctgaaacccataactgtcacagagtcaaagacaaagaaagtgaaccggaaaggaagcacttcttccacgtcctcctcctcctccagctccgtggtggacccgctgagcagcgtcctcgatgggactgaccccctctccatgtttgcagccactgctgaccccgcagccttggcagctgccatggacagctccagaaggaaacgtgatagagatgataactccgttgtaggatcggattttgagccttggaccaacaaacggggagaaatccttgcccggtacaccactaccgaaaagctgtctattaatctgtttatgggatctgaaaaaggcaaagctgggactgccacattggcaatgtcagagaaggtgcggacccggctggaggagctggatgactttgaggagggttcccaaaaggagctgttgaacttgactcagcaggattacgtgaaccgcatagaggagctcaaccaatcgctgaaggatgcctgggcctcagaccagaaagtgaaggctctaaaaatagtcatccagtgttcaaagcttctttcagacaccagtgttattcagttctacccaagcaaatttgtccttatcaccgacatacttgatacatttggaaagctcgtgtacgagcgcatcttttccatgtgtgtggatagccgcagcgtcttaccagatcacttttctccagagaatgcaaatgacacggccaaggaaacatgcctaaattggtttttcaagattgcctccatcagggaactcattccaagattttacgtggaggcatccatcctgaaatgtaacaaattcctctccaaaacgggaatttcagagtgcctgccccggttgacatgcatgatcagagggatcggagacccactagtgtcggtgtatgcccgtgcctacctgtgccgggtgggaatggaagtggccccacatctcaaagaaaccctaaataagaacttttttgacttcctccttacgttcaaacagattcatggggatacggtccagaaccagctggtggtccaaggagtggagctcccatcttacctccccttgtacccgcctgccatggactggatcttccagtgcatctcctaccatgcccccgaggctctgctgaccgagatgatggaaaggtgtaagaaactaggaaacaatgccttgctgttgaattctgtgatgtctgccttccgggctgagttcatcgccacaaggtctatggatttcattggcatgattaaagagtgtgatgaatctggtttccccaagcatcttctttttcgatcactgggattaaacttggccttgccatatgcaagcaggccaaggtcagaagatgaaccacgtgcgnaatagaaaaagctacctatggantgtgcccgagatcctctagagt

SEQ ID NO: 444118 - DNA, 1458 bp, Homo sapiens
gcggccgctgcggggcggccagctgcccttcacaaacatggcggccgaggggtgcggggagtggcggggtaaggatgggaagccgagcagacggccccagaacaagcggtcatgtgactgggaagatggccgtctttccttggcactccaggaataggaactacaaagctgaatttgcatcatgccgactggaggctgtaccattggagtttggggactatcaccctctgaaacccataactgtcacagagtcaaagacaaagaaagtgaaccggaaaggaagcacttcttccacgtcctcctcctcctccagctccgtggtggacccgctgagcagcgtcctcgatgggactgaccccctctccatgtttgcagccactgctgaccccgcagccttggcagctgccatggacagctccagaaggaaacgtgatagagatgataactccgttgtaggatcggattttgagccttggaccaacaaacggggagaaatccttgcccggtacaccactaccgaaaagctgtctattaatctgtttatgggatctgaaaaaggcaaagctgggactgccacattggcaatgtcagagaaggtgcggacccggctggaggagctggatgactttgaggagggttcccaaaaggagctgttgaacttgactcagcaggattacgtgaaccgcatagaggagctcaaccaatcgctgaaggatgcctgggcctcagaccagaaagtgaaggctctaaaaatagtcatccagtgttcaaagcttctttcagacaccagtgttattcagttctacccaagcaaatttgtccttatcaccgacatacttgatacatttggaaagctcgtgtacgagcgcatcttttccatgtgtgtggatagccgcagcgtcttaccagatcacttttctccagagaatgcaaatgacacggccaaggaaacatgcctaaattggtttttcaagattgcctccatcagggaactcattccaagattttacgtggaggcatccatcctgaaatgtaacaaattcctctccaaaacgggaatttcagagtgcctgccccggttgacatgcatgatcagagggatcggagacccactagtgtcggtgtatgcccgtgcctacctgtgccgggtgggaatggaagtggccccacatctcaaagaaaccctaaataagaacttttttgacttcctccttacgttcaaacagattcatggggatacggtccagaaccagctggtggtccaaggagtggagctcccatcttacctccccttgtacccgcctgccatggactggatcttccagtgcatctcctaccatgcccccgaggctctgctgaccgagatgatggaaaggtgtaagaaactaggaaacaacgcgttgctgctgaattctacgatgtagtccattccgggacagagtataatcaccaacagga

SEQ ID NO: 444119 - DNA, 584 bp, Homo sapiens
atacatggcagagctggcactggaactcaggcatgacctaccccagagtcagcactgtccacagcatctctgcggggcacggcctgagccccagtgcaaggcagtaacctcccttttctgtttcaggccctgaagcgccagagctcgttgggcctttccttctttaacagcatcttggcccatggggacctacgcaacaacaagctcaaccagctctccgtcaacctgtggcacctggcacagaggcacggctgtgcagacaccaggaccatggtgaaaacgctagaatacatcaagaagcaaagcaaacaaccagacatgactcatctgacggagctggccctcagactccctctgcaaacaaggacctgacccccgggcccatccccaggctcagggactctggtgccaaatccagaaagatctgctctgctgccctgaactcttacggcaatttaggtttctcatttttcttttctttttacatatgtacaaattgttttaagctttggcctctatccaggttattctgacaatgaagaaatgggagttgtcagagcattaaaatgcaatcttcactaaga

SEQ ID NO: 444120 - DNA, 1166 bp, Homo sapiens
  misc_feature (11)..(11): n is a, c, g, or t
gtttggctggnttccgtggaggggtggggtggcaggtggaggatattgagacagggtctcactctgtggcccaggctgcagtgagctatgatcacaccgctgcactccagcctgggtgatagagcaggaccttgtctccaaaacaaagaacaaaagcatagccttaaaagtctattccctctgaataggaaccatacatacaaaacatcagtcatttctggtcacgtccaaatctgatttttagggcaagctgcaatccaagaagttgaagactttgatttcttccctcctctcatccctcaaaaaactcactcttctctgctaagaaatctaagctcacataatggctgattcattagagccttgggctccaaggataatgaaccagaaaggagatggatctttctttttcctcataggtgaaaacgctagaatacatcaagaagcaaagcaaacaaccagacatgactcatctgacggagctggccctcagactccctctgcaaacaaggacctgacccccgggcccatccccaggctcagggactctggtgccaaatccagaaagatctgctctgctgccctgaactcttacggcaatttaggtttctcatttttcttttctttttacatatgtacaaattgttttaagctttggcctctatccaggttattctgacaatgaagaaatgggagttgtcagagcattaaaatgcaatcttcactaagaagcagtctctgtgttgtctttgcacaagtggccttcggtctactcagcccgatctgatgggcctttttagcaagagagaaacaagaatgcaagtaacatctttcttctctggaaggtgtttgttttttcatagtttagaaataaggactttaaaagtggactgcttttcaaagtgccactgttccagacccattccattccagactttgtaccttaaagttagagcacacccaaagtctggaactgtgttacctgaacccctatggaggatttataaaaggcagaaatagcactccattaactctttttcctatcaaaagcagctcttgattggacttagaatctgtgttggtggatcaaaggagaaagcgaggtcaaatttgagattctctgtggcttcagtatacagtaactgaataaatgtcctgaaggagca

SEQ ID NO: 444121 - DNA, 877 bp, Homo sapiens
gcggccgctgcggggcggccagctgcccttcacaaacatggcggccgaggggtgcggggagtggcggggtaaggatgggaagccgagcagacggccccagaacaagcggtcatgtgactgggaagatggccgtctttccttggcactccaggaataggaactacaaagctgaatttgcatcatgccgactggaggctgtaccattggagtttggggactatcaccctctgaaacccataactgtcacagagtcaaagacaaagaaagtgaaccggaaaggaagcacttcttccacgtcctcctcctcctccagctccgtggtggacccgctgagcagcgtcctcgatgggactgaccccctctccatgtttgcagccactgctgaccccgcagccttggcagctgccatggacagctccagaaggaaacgtgatagagatgataactccgttgtaggatcggattttgagccttggaccaacaaacggggagaaatccttgcccggtacaccactaccgaaaagctgtctatttgctgggattacaggtgtgagccactgcagcccagcctacgaagttgtttttgcggttaagcagcaatttggaaacgaagcatttctgaggagctcagtttaagaaacactgtgatgttgtgttttaaacctatgaactcccctccgtagctcatccctctacttttccatctaaccccagtactggcaccttctctatgattagtaaatttcttcagctagaaatgttacagtctgttttttaacaatgaagtcaggacccagtggattatagcattgttacacttcatgctcatgttatataaaattgcataaaatgtattaaaatttatgtctgctcttat

SEQ ID NO: 444122 - DNA, 540 bp, Homo sapiens
gcggccgcctactactactactactgctcgaattcaagcttctaacgatgtacggggcatgagaataccttaatactgagttggagattttgtatctgtttctcctcctttacgcccattttcctacccacagcagcaaatgacaacgtgtctgtccaggtctgtccccctgctcatcccaggatgccactcacatttttttcttcttgttaccttgaccacgctgtacagtaacatccaagagcccattctacagtgggtggttttggtctttttataactttttctcaaagtcactgatgtttgttcctgttaaatgtatagcattgtaatgagagcccatcaaatcctgagtgtcagtttgttgtccctattgtagatgaaatagtgatgtagcaaaaacctagtaaattctgaatgcttttccacgtagacttatctggaatgtgaacacaactctttggttaatagtaaatgcttaactgtagtcctgagtaggtgcatttctgtctgtctcaataaattttactttgtctgcaa

SEQ ID NO: 444123 - DNA, 5113 bp, Homo sapiens
  misc_feature (2483)..(2483): n is a, c, g, or t
cactctctgttgtccaatggacacacctgtcgtgttttgagccagcgagagatgcagtggaagtgaaaagcatggttacagactccccatgcgacagtacactcttctgaagtagcggacgcctggttagcttgacattctatgcaaagatccataatgtggttcctgcagatggcacagttatcaaccacaatatcccaggcccagagggctactgcattccactttttcacttcaaagcgcttcttgcccgcgccgctgttggtgccgctcggggtatccacatccatcgctgcgggctcacaaagcggccagacgctcggcggcggcgtgtggcaggagcgcaggggcgcgagccggcgatcagccttcccggcgaccgtgccgcgggagctcgagcaactcggactaggggacccgggccggcccccaagatgccggcgatcgcggtgttggcggcggccgccgcggcgtggtgcttcctccaagtcgagagccggcacctggacgcgctcgccggaggcgcgggccccaaccacggcaatttcctagacaatgaccagtggctgagcaccgtctcccagtacgaccgggacaagtactggaaccgctttcgagacgatgattatttcagaaactggaatcccaacaagccctttgaccaagccctggacccatccaaggacccctgcctgaaggtaaaatgcagccctcacaaagtgtgtgtgacccaggactaccagaccgccctgtgtgtcagccgcaagcacctgctccccaggcaaaagaaggggaacgtggcccagaaacactgggttggaccttcgaatttggtcaagtgcaagccctgtcccgtggcacagtcagccatggtctgcggctcagatggccactcctacacatccaagtgcaaattggagttccatgcttgttctactggcaaaagcctcgccaccctctgtgatgggccctgtccctgtctcccagagcctgagccaccaaagcacaaggcagaaaggagtgcctgcacagacaaggagttgcggaaccttgcctcccggctgaaggattggtttggagctctccacgaggatgcgaacagagtcatcaagcccaccagctccaacacagcccaaggcaggtttgacactagcatcctgcccatctgcaaggactccctgggctggatgttcaacaagttggacatgaactatgacctcctgcttgacccttcagagatcaatgccatctacctggataagtacgagccctgtatcaagcctcttttcaactcgtgtgactccttcaaggatggcaagctttctaacaatgagtggtgctactgcttccagaagcctggaggtctcccttgccagaatgaaatgaacagaattcagaagctgagtaaggggaaaagcctgttgggggccttcatacctcggtgtaatgaggagggctattacaaagccacacagtgccacggcagcacggggcagtgctggtgtgtggacaaatatgggaatgagttggctggctccaggaaacagggtgctgtgagctgtgaagaggagcaggaaacctcaggggattttggcagtggtgggtccgtggtcctgctggatgacctagaatatgaacgggagctgggaccaaaggacaaagaggggaagctgagggtgcacacccgagccgtgacagaggatgatgaggatgaggatgatgacaaagaggatgaggtcgggtacatatggtagtgcccacaagaaagaggacacaagttttgcacaaaattgcaagtcacttcctattcctgcatttgtatctaagactccaaggcaccaaggtctcttctccattgttgctctctatacccgacctaaggtttggaagacaactgcttgttcccagaggattctgattttgcatatgtttgtatgggagaaagggtgttgtgttttttttttttgttgttgtttattttttggatagggaagtcattggcttaattagagcctccttcctttctgtgagatttttccaacaagcatgtgatttacgtggaattctgacagtgcagggagcccccaccctcttaaatgtcaaagaccctttttgattacccacactggtggttattacagcatggttcccagccttacagtgtctaagtgcttctcttgtgtcctgtagatgttgtgaaaaagaaaaaaacaaaaaatacaccacactgtactttttccccctgcccccgttactgccggtgattattattaaaaattagtttttttcacatcattatatctggcttcctataaacaacagccttaattcagtcaagactccctttggggaattcattttattaaaaattggtgtctggatacttccctgtacatgcataaatatgcatgcatgtacagaaagactgtatgtgtgtgccttgcacacacacccatacctctcagaaaaagtgtttgggtatnttaaaaactcgaaaaacaatgataaatttctcagcttgtccagacctggaacaaaatttctggaataagaaatttgtattaaagtccttttttgcactaacagttggctcttgtagcctgcaggctgaggaagtctcttctctgtgcatcagcagagttactgaaagcctctgattgagaaaaaacctccgtctgcctaaatcacttttctcgcagaagccatgcgactcccacacgacacgggcagcttcacaagccatctctttcatttctgcttgaagcccccttggctgcagcaatcctgtctgccataggtttcttccttccttacctactcaagggctttttctaaggcatgcacacatatctcctgttctctgagagtaccatggtgttccttaaaagaagaaaatttctaattctgaactcaatgttttgcttttactccctttctactgacaaatcatgataagggcacaaaagctgtacagatttttttttttaaccactcaatcccaaatggaggcctacaaagaacatcgtaataacacatggaagcaaaccctgggtttttaagagcaaattctgtccccccctcactcccccaagtgacaagatactaatgaagaaagttcttcaccatagtgtttgttttaactaaactcattggagtctagttccaaatttggtagggtcatcatctctacattccttaggatttctctccctatcaagctggcccagatacaagtaccaaacagtagtctctgaagttcccccatttccttcagtaccagtctataagctactgtccgccactgattttcatctatcagggtgtcctaatcagaatcagccacccaagcaagcctctctggcccacatatctatctcttgccttcccccatgaacttcagcctgtccacacaaaagccacataaactcaagcaagaaatatgttcagccaaaacatgattatagtggcagctgaccaatcccccatcccaaattgaccatttagatgtaccaactcaccttaaattagcatgttccaatccagtcggcattgcctgaatacagtagcatcatacctatagttggtcttagataagaaatgaactacttgatatagcaaagtcctttggcttcgtaaataaccctgaggttttgtacttactttccccataggaagacagaccataggcaaactctgttttgggatctcaactccatcacctttgtttcaatattttttttctctcttgaacaaaactgagataatttagaaaacaggtgcttaattgcaataaaattactatgaagtatattaaaaatcacgacattgtaaaatctcactttagatcatcaaagaaaaccattgttactatctcctttgagcttaggaaaatgtacaagagaacaaattaaaattgaaaaattgatttcacttagaaaaacttctaggaacagggtgaaccactgattttaatttgcctaattatcttatgacaagtatcaaattaagatgacacttaaagatccttagcattaacttaatgatggagaagagtgctcaacagacagttcccagtaaggtaatgagatgccattttcagagacattctaagaagatattttgattcattaaaacattaaataaaaagccctcctcagattggaacccccaaatcgatggagccacattaataatacttttcatgcctcactttgacatgacagcattcgatttttttaaagatctttaatactttccatgagtactaaagattgtaatgagttaccttatccttagaagtagaatgtttgctttcttcttcttggaaatagtcctccaaaaagtccacttgtaccagtgacaagaagtcacttgtatagtgaccaagtacacataaaatactgattataaaaatattgtaataaaccacttcctcatttgatacaggtattaagctgaatcctcactaattcacttttgaaaagttcttaatgaacagttttattcttattccatgaacagctcttttaatacaatttccttggtatccaacttaaatcccagaattttgttccaccatggttagttatttgccatatgaatgtattcttgtttctaccaatattctaggcatgagaataccttaatactgagttggagattttgtatctgtttctcctcctttacgcccattttcctacccacagcagcaaatgacaacgtgtctgtccaggtctgtccccctgctcatcccaggatgccactcacatttttttcttcttgttaccttgaccacgctgtacagtaacatccaagagcccattctacagtgggtggttttggtctttttataactttttctcaaagtcactgatgtttgttcctgttaaatgtatagcattgtaatgagagcccatcaaatcctgagtgtcagtttgttgtccctattgtagatgaaatagtgatgtagcaaaaacctagtaaattctgaatgcttttccacgtagacttatctggaatgtgaacacaactctttggttaatagtaaatgcttaactgtagtcctgagtaggtgcatttctgtctgtctcaataaattttactttgtctgcaa

SEQ ID NO: 444124 - DNA, 4577 bp, Homo sapiens
  misc_feature (1947)..(1947): n is a, c, g, or t
agcgggctggtacgtcatcaccaaagccaatctgctctagctgcccacagatgccaccaaaacctgctatctcttcatcaccaggatgattatttcagaaactggaatcccaacaagccctttgaccaagccctggacccatccaaggacccctgcctgaaggtaaaatgcagccctcacaaagtgtgtgtgacccaggactaccagaccgccctgtgtgtcagccgcaagcacctgctccccaggcaaaagaaggggaacgtggcccagaaacactgggttggaccttcgaatttggtcaagtgcaagccctgtcccgtggcacagtcagccatggtctgcggctcagatggccactcctacacatccaagtgcaaattggagttccatgcttgttctactggcaaaagcctcgccaccctctgtgatgggccctgtccctgtctcccagagcctgagccaccaaagcacaaggcagaaaggagtgcctgcacagacaaggagttgcggaaccttgcctcccggctgaaggattggtttggagctctccacgaggatgcgaacagagtcatcaagcccaccagctccaacacagcccaaggcaggtttgacactagcatcctgcccatctgcaaggactccctgggctggatgttcaacaagttggacatgaactatgacctcctgcttgacccttcagagatcaatgccatctacctggataagtacgagccctgtatcaagcctcttttcaactcgtgtgactccttcaaggatggcaagctttctaacaatgagtggtgctactgcttccagaagcctggaggtctcccttgccagaatgaaatgaacagaattcagaagctgagtaaggggaaaagcctgttgggggccttcatacctcggtgtaatgaggagggctattacaaagccacacagtgccacggcagcacggggcagtgctggtgtgtggacaaatatgggaatgagttggctggctccaggaaacagggtgctgtgagctgtgaagaggagcaggaaacctcaggggattttggcagtggtgggtccgtggtcctgctggatgacctagaatatgaacgggagctgggaccaaaggacaaagaggggaagctgagggtgcacacccgagccgtgacagaggatgatgaggatgaggatgatgacaaagaggatgaggtcgggtacatatggtagtgcccacaagaaagaggacacaagttttgcacaaaattgcaagtcacttcctattcctgcatttgtatctaagactccaaggcaccaaggtctcttctccattgttgctctctatacccgacctaaggtttggaagacaactgcttgttcccagaggattctgattttgcatatgtttgtatgggagaaagggtgttgtgttttttttttttgttgttgtttattttttggatagggaagtcattggcttaattagagcctccttcctttctgtgagatttttccaacaagcatgtgatttacgtggaattctgacagtgcagggagcccccaccctcttaaatgtcaaagaccctttttgattacccacactggtggttattacagcatggttcccagccttacagtgtctaagtgcttctcttgtgtcctgtagatgttgtgaaaaagaaaaaaacaaaaaatacaccacactgtactttttccccctgcccccgttactgccggtgattattattaaaaattagtttttttcacatcattatatctggcttcctataaacaacagccttaattcagtcaagactccctttggggaattcattttattaaaaattggtgtctggatacttccctgtacatgcataaatatgcatgcatgtacagaaagactgtatgtgtgtgccttgcacacacacccatacctctcagaaaaagtgtttgggtatnttaaaaactcgaaaaacaatgataaatttctcagcttgtccagacctggaacaaaatttctggaataagaaatttgtattaaagtccttttttgcactaacagttggctcttgtagcctgcaggctgaggaagtctcttctctgtgcatcagcagagttactgaaagcctctgattgagaaaaaacctccgtctgcctaaatcacttttctcgcagaagccatgcgactcccacacgacacgggcagcttcacaagccatctctttcatttctgcttgaagcccccttggctgcagcaatcctgtctgccataggtttcttccttccttacctactcaagggctttttctaaggcatgcacacatatctcctgttctctgagagtaccatggtgttccttaaaagaagaaaatttctaattctgaactcaatgttttgcttttactccctttctactgacaaatcatgataagggcacaaaagctgtacagatttttttttttaaccactcaatcccaaatggaggcctacaaagaacatcgtaataacacatggaagcaaaccctgggtttttaagagcaaattctgtccccccctcactcccccaagtgacaagatactaatgaagaaagttcttcaccatagtgtttgttttaactaaactcattggagtctagttccaaatttggtagggtcatcatctctacattccttaggatttctctccctatcaagctggcccagatacaagtaccaaacagtagtctctgaagttcccccatttccttcagtaccagtctataagctactgtccgccactgattttcatctatcagggtgtcctaatcagaatcagccacccaagcaagcctctctggcccacatatctatctcttgccttcccccatgaacttcagcctgtccacacaaaagccacataaactcaagcaagaaatatgttcagccaaaacatgattatagtggcagctgaccaatcccccatcccaaattgaccatttagatgtaccaactcaccttaaattagcatgttccaatccagtcggcattgcctgaatacagtagcatcatacctatagttggtcttagataagaaatgaactacttgatatagcaaagtcctttggcttcgtaaataaccctgaggttttgtacttactttccccataggaagacagaccataggcaaactctgttttgggatctcaactccatcacctttgtttcaatattttttttctctcttgaacaaaactgagataatttagaaaacaggtgcttaattgcaataaaattactatgaagtatattaaaaatcacgacattgtaaaatctcactttagatcatcaaagaaaaccattgttactatctcctttgagcttaggaaaatgtacaagagaacaaattaaaattgaaaaattgatttcacttagaaaaacttctaggaacagggtgaaccactgattttaatttgcctaattatcttatgacaagtatcaaattaagatgacacttaaagatccttagcattaacttaatgatggagaagagtgctcaacagacagttcccagtaaggtaatgagatgccattttcagagacattctaagaagatattttgattcattaaaacattaaataaaaagccctcctcagattggaacccccaaatcgatggagccacattaataatacttttcatgcctcactttgacatgacagcattcgatttttttaaagatctttaatactttccatgagtactaaagattgtaatgagttaccttatccttagaagtagaatgtttgctttcttcttcttggaaatagtcctccaaaaagtccacttgtaccagtgacaagaagtcacttgtatagtgaccaagtacacataaaatactgattataaaaatattgtaataaaccacttcctcatttgatacaggtattaagctgaatcctcactaattcacttttgaaaagttcttaatgaacagttttattcttattccatgaacagctcttttaatacaatttccttggtatccaacttaaatcccagaattttgttccaccatggttagttatttgccatatgaatgtattcttgtttctaccaatattctaggcatgagaataccttaatactgagttggagattttgtatctgtttctcctcctttacgcccattttcctacccacagcagcaaatgacaacgtgtctgtccaggtctgtccccctgctcatcccaggatgccactcacatttttttcttcttgttaccttgaccacgctgtacagtaacatccaagagcccattctacagtgggtggttttggtctttttataactttttctcaaagtcactgatgtttgttcctgttaaatgtatagcattgtaatgagagcccatcaaatcctgagtgtcagtttgttgtccctattgtagatgaaatagtgatgtagcaaaaacctagtaaattctgaatgcttttccacgtagacttatctggaatgtgaacacaactctttggttaatagtaaatgcttaactgtagtcctgagtaggtgcatttctgtctgtctcaataaattttactttgtctgcaa

SEQ ID NO: 444125 - DNA, 1978 bp, Homo sapiens
  misc_feature (55)..(55): n is a, c, g, or t
cagcttgatgctgcaggtcatctagagatcccccagcagcatagatattaccgcnattccttaggatttctctccctatcaagctggcccagatacaagtaccaaacagtagtctctgaagttcccccatttccttcagtaccagtctataagctactgtccgccactgattttcatctatcagggtgtcctaatcagaatcagccacccaagcaagcctctctggcccacatatctatctcttgccttcccccatgaacttcagcctgtccacacaaaagccacataaactcaagcaagaaatatgttcagccaaaacatgattatagtggcagctgaccaatcccccatcccaaattgaccatttagatgtaccaactcaccttaaattagcatgttccaatccagtcggcattgcctgaatacagtagcatcatacctatagttggtcttagataagaaatgaactacttgatatagcaaagtcctttggcttcgtaaataaccctgaggttttgtacttactttccccataggaagacagaccataggcaaactctgttttgggatctcaactccatcacctttgtttcaatattttttttctctcttgaacaaaactgagataatttagaaaacaggtgcttaattgcaataaaattactatgaagtatattaaaaatcacgacattgtaaaatctcactttagatcatcaaagaaaaccattgttactatctcctttgagcttaggaaaatgtacaagagaacaaattaaaattgaaaaattgatttcacttagaaaaacttctaggaacagggtgaaccactgattttaatttgcctaattatcttatgacaagtatcaaattaagatgacacttaaagatccttagcattaacttaatgatggagaagagtgctcaacagacagttcccagtaaggtaatgagatgccattttcagagacattctaagaagatattttgattcattaaaacattaaataaaaagccctcctcagattggaacccccaaatcgatggagccacattaataatacttttcatgcctcactttgacatgacagcattcgatttttttaaagatctttaatactttccatgagtactaaagattgtaatgagttaccttatccttagaagtagaatgtttgctttcttcttcttggaaatagtcctccaaaaagtccacttgtaccagtgacaagaagtcacttgtatagtgaccaagtacacataaaatactgattataaaaatattgtaataaaccacttcctcatttgatacaggtattaagctgaatcctcactaattcacttttgaaaagttcttaatgaacagttttattcttattccatgaacagctcttttaatacaatttccttggtatccaacttaaatcccagaattttgttccaccatggttagttatttgccatatgaatgtattcttgtttctaccaatattctaggcatgagaataccttaatactgagttggagattttgtatctgtttctcctcctttacgcccattttcctacccacagcagcaaatgacaacgtgtctgtccaggtctgtccccctgctcatcccaggatgccactcacatttttttcttcttgttaccttgaccacgctgtacagtaacatccaagagcccattctacagtgggtggttttggtctttttataactttttctcaaagtcactgatgtttgttcctgttaaatgtatagcattgtaatgagagcccatcaaatcctgagtgtcagtttgttgtccctattgtagatgaaatagtgatgtagcaaaaacctagtaaattctgaatgcttttccacgtagacttatctggaatgtgaacacaactctttggttaatagtaaatgcttaactgtagtcctgagtaggtgcatttctgtctgtctcaataaattttactttgtctgcaa

SEQ ID NO: 444126 - DNA, 361 bp, Homo sapiens
cttgttaccttgaccacgctgtacagtaacatccaagagcccattctacagtgggtggttttggtctttttataactttttctcaaagtcactgatgtttgttcctgttaaatgtatagcattgtaatgagagcccatcaaatcctgagtgtcagtttgttgtccctattgtagatgaaatagtgatgtagcaaaaacctagtaaattctgaatgcttttccacgtagacttatctggaatgtgaacacaactctttggttaatagtaaatgcttaactgtagtcctgagtaggtgcatttctgtctgtctcaataaattttactttgtctgcaatatctgagtgtttgtatttcattggg

SEQ ID NO: 444127 - DNA, 5371 bp, Homo sapiens
  misc_feature (2483)..(2483): n is a, c, g, or t
cactctctgttgtccaatggacacacctgtcgtgttttgagccagcgagagatgcagtggaagtgaaaagcatggttacagactccccatgcgacagtacactcttctgaagtagcggacgcctggttagcttgacattctatgcaaagatccataatgtggttcctgcagatggcacagttatcaaccacaatatcccaggcccagagggctactgcattccactttttcacttcaaagcgcttcttgcccgcgccgctgttggtgccgctcggggtatccacatccatcgctgcgggctcacaaagcggccagacgctcggcggcggcgtgtggcaggagcgcaggggcgcgagccggcgatcagccttcccggcgaccgtgccgcgggagctcgagcaactcggactaggggacccgggccggcccccaagatgccggcgatcgcggtgttggcggcggccgccgcggcgtggtgcttcctccaagtcgagagccggcacctggacgcgctcgccggaggcgcgggccccaaccacggcaatttcctagacaatgaccagtggctgagcaccgtctcccagtacgaccgggacaagtactggaaccgctttcgagacgatgattatttcagaaactggaatcccaacaagccctttgaccaagccctggacccatccaaggacccctgcctgaaggtaaaatgcagccctcacaaagtgtgtgtgacccaggactaccagaccgccctgtgtgtcagccgcaagcacctgctccccaggcaaaagaaggggaacgtggcccagaaacactgggttggaccttcgaatttggtcaagtgcaagccctgtcccgtggcacagtcagccatggtctgcggctcagatggccactcctacacatccaagtgcaaattggagttccatgcttgttctactggcaaaagcctcgccaccctctgtgatgggccctgtccctgtctcccagagcctgagccaccaaagcacaaggcagaaaggagtgcctgcacagacaaggagttgcggaaccttgcctcccggctgaaggattggtttggagctctccacgaggatgcgaacagagtcatcaagcccaccagctccaacacagcccaaggcaggtttgacactagcatcctgcccatctgcaaggactccctgggctggatgttcaacaagttggacatgaactatgacctcctgcttgacccttcagagatcaatgccatctacctggataagtacgagccctgtatcaagcctcttttcaactcgtgtgactccttcaaggatggcaagctttctaacaatgagtggtgctactgcttccagaagcctggaggtctcccttgccagaatgaaatgaacagaattcagaagctgagtaaggggaaaagcctgttgggggccttcatacctcggtgtaatgaggagggctattacaaagccacacagtgccacggcagcacggggcagtgctggtgtgtggacaaatatgggaatgagttggctggctccaggaaacagggtgctgtgagctgtgaagaggagcaggaaacctcaggggattttggcagtggtgggtccgtggtcctgctggatgacctagaatatgaacgggagctgggaccaaaggacaaagaggggaagctgagggtgcacacccgagccgtgacagaggatgatgaggatgaggatgatgacaaagaggatgaggtcgggtacatatggtagtgcccacaagaaagaggacacaagttttgcacaaaattgcaagtcacttcctattcctgcatttgtatctaagactccaaggcaccaaggtctcttctccattgttgctctctatacccgacctaaggtttggaagacaactgcttgttcccagaggattctgattttgcatatgtttgtatgggagaaagggtgttgtgttttttttttttgttgttgtttattttttggatagggaagtcattggcttaattagagcctccttcctttctgtgagatttttccaacaagcatgtgatttacgtggaattctgacagtgcagggagcccccaccctcttaaatgtcaaagaccctttttgattacccacactggtggttattacagcatggttcccagccttacagtgtctaagtgcttctcttgtgtcctgtagatgttgtgaaaaagaaaaaaacaaaaaatacaccacactgtactttttccccctgcccccgttactgccggtgattattattaaaaattagtttttttcacatcattatatctggcttcctataaacaacagccttaattcagtcaagactccctttggggaattcattttattaaaaattggtgtctggatacttccctgtacatgcataaatatgcatgcatgtacagaaagactgtatgtgtgtgccttgcacacacacccatacctctcagaaaaagtgtttgggtatnttaaaaactcgaaaaacaatgataaatttctcagcttgtccagacctggaacaaaatttctggaataagaaatttgtattaaagtccttttttgcactaacagttggctcttgtagcctgcaggctgaggaagtctcttctctgtgcatcagcagagttactgaaagcctctgattgagaaaaaacctccgtctgcctaaatcacttttctcgcagaagccatgcgactcccacacgacacgggcagcttcacaagccatctctttcatttctgcttgaagcccccttggctgcagcaatcctgtctgccataggtttcttccttccttacctactcaagggctttttctaaggcatgcacacatatctcctgttctctgagagtaccatggtgttccttaaaagaagaaaatttctaattctgaactcaatgttttgcttttactccctttctactgacaaatcatgataagggcacaaaagctgtacagatttttttttttaaccactcaatcccaaatggaggcctacaaagaacatcgtaataacacatggaagcaaaccctgggtttttaagagcaaattctgtccccccctcactcccccaagtgacaagatactaatgaagaaagttcttcaccatagtgtttgttttaactaaactcattggagtctagttccaaatttggtagggtcatcatctctacattccttaggatttctctccctatcaagctggcccagatacaagtaccaaacagtagtctctgaagttcccccatttccttcagtaccagtctataagctactgtccgccactgattttcatctatcagggtgtcctaatcagaatcagccacccaagcaagcctctctggcccacatatctatctcttgccttcccccatgaacttcagcctgtccacacaaaagccacataaactcaagcaagaaatatgttcagccaaaacatgattatagtggcagctgaccaatcccccatcccaaattgaccatttagatgtaccaactcaccttaaattagcatgttccaatccagtcggcattgcctgaatacagtagcatcatacctatagttggtcttagataagaaatgaactacttgatatagcaaagtcctttggcttcgtaaataaccctgaggttttgtacttactttccccataggaagacagaccataggcaaactctgttttgggatctcaactccatcacctttgtttcaatattttttttctctcttgaacaaaactgagataatttagaaaacaggtgcttaattgcaataaaattactatgaagtatattaaaaatcacgacattgtaaaatctcactttagatcatcaaagaaaaccattgttactatctcctttgagcttaggaaaatgtacaagagaacaaattaaaattgaaaaattgatttcacttagaaaaacttctaggaacagggtgaaccactgattttaatttgcctaattatcttatgacaagtatcaaattaagatgacacttaaagatccttagcattaacttaatgatggagaagagtgctcaacagacagttcccagtaaggtaatgagatgccattttcagagacattctaagaagatattttgattcattaaaacattaaataaaaagccctcctcagattggaacccccaaatcgatggagccacattaataatacttttcatgcctcactttgacatgacagcattcgatttttttaaagatctttaatactttccatgagtactaaagattgtaatgagttaccttatccttagaagtagaatgtttgctttcttcttcttggaaatagtcctccaaaaagtccacttgtaccagtgacaagaagtcacttgtatagtgaccaagtacacataaaatactgattataaaaatattgtaataaaccacttcctcatttgatacaggtattaagctgaatcctcactaattcacttttgaaaagttcttaatgaacagttttattcttattccatgaacagctcttttaatacaatttccttggtatccaacttaaatcccagaattttgttccaccatggttagttatttgccatatgaatgtattcttgtttctaccaatattctaggcatgagaataccttaatactgagttggagattttgtatctgtttctcctcctttacgcccattttcctacccacagcagcaaatgacaacgtgtctgtccaggtctgtccccctgctcatcccaggatgccactcacatttttttcttcttgttaccttgaccacgctgtacagtaacatccaagagcccattctacagtgggtggttttggtctttttataactttttctcaaagtcactgatgtttgttcctgttaaatgtatagcattgtaatgagagcccatcaaatcctgagtgtcagtttgttgtccctattgtagatgaaatagtgatgtagcaaaaacctagtaaattctgaatgcttttccacgtagacttatctggaatgtgaacacaactctttggttaatagtaaatgcttaactgtagtcctgagtaggtgcatttctgtctgtctcaataaattttactttgtctgcaaaaaaaaaaaacgacacaccacaaaaacaaacgtgtgttgcgggcgcgcccttcggccccctggagaaaagagctttctcaaagaacccatttccgttgtgggcgcggcggggcccccagatgatgtatagcggtgacaccggggtccaaaacgagtgtccccaaaagaaaaaccgcgggcaagaaaaggtcgcgggtttcctcacccaattaaaaaaaggcgcgggggacaaaccacgctgtcgtgaacaatcccgag

SEQ ID NO: 444128 - DNA, 4272 bp, Homo sapiens
  misc_feature (1642)..(1642): n is a, c, g, or t
cttcctgcttctgcccctcaccaagaccctccaccagcaaaaaggtcatgactttctgaaggctcagtgcaaattggagttccatgcttgttctactggcaaaagcctcgccaccctctgtgatgggccctgtccctgtctcccagagcctgagccaccaaagcacaaggcagaaaggagtgcctgcacagacaaggagttgcggaaccttgcctcccggctgaaggattggtttggagctctccacgaggatgcgaacagagtcatcaagcccaccagctccaacacagcccaaggcaggtttgacactagcatcctgcccatctgcaaggactccctgggctggatgttcaacaagttggacatgaactatgacctcctgcttgacccttcagagatcaatgccatctacctggataagtacgagccctgtatcaagcctcttttcaactcgtgtgactccttcaaggatggcaagctttctaacaatgagtggtgctactgcttccagaagcctggaggtctcccttgccagaatgaaatgaacagaattcagaagctgagtaaggggaaaagcctgttgggggccttcatacctcggtgtaatgaggagggctattacaaagccacacagtgccacggcagcacggggcagtgctggtgtgtggacaaatatgggaatgagttggctggctccaggaaacagggtgctgtgagctgtgaagaggagcaggaaacctcaggggattttggcagtggtgggtccgtggtcctgctggatgacctagaatatgaacgggagctgggaccaaaggacaaagaggggaagctgagggtgcacacccgagccgtgacagaggatgatgaggatgaggatgatgacaaagaggatgaggtcgggtacatatggtagtgcccacaagaaagaggacacaagttttgcacaaaattgcaagtcacttcctattcctgcatttgtatctaagactccaaggcaccaaggtctcttctccattgttgctctctatacccgacctaaggtttggaagacaactgcttgttcccagaggattctgattttgcatatgtttgtatgggagaaagggtgttgtgttttttttttttgttgttgtttattttttggatagggaagtcattggcttaattagagcctccttcctttctgtgagatttttccaacaagcatgtgatttacgtggaattctgacagtgcagggagcccccaccctcttaaatgtcaaagaccctttttgattacccacactggtggttattacagcatggttcccagccttacagtgtctaagtgcttctcttgtgtcctgtagatgttgtgaaaaagaaaaaaacaaaaaatacaccacactgtactttttccccctgcccccgttactgccggtgattattattaaaaattagtttttttcacatcattatatctggcttcctataaacaacagccttaattcagtcaagactccctttggggaattcattttattaaaaattggtgtctggatacttccctgtacatgcataaatatgcatgcatgtacagaaagactgtatgtgtgtgccttgcacacacacccatacctctcagaaaaagtgtttgggtatnttaaaaactcgaaaaacaatgataaatttctcagcttgtccagacctggaacaaaatttctggaataagaaatttgtattaaagtccttttttgcactaacagttggctcttgtagcctgcaggctgaggaagtctcttctctgtgcatcagcagagttactgaaagcctctgattgagaaaaaacctccgtctgcctaaatcacttttctcgcagaagccatgcgactcccacacgacacgggcagcttcacaagccatctctttcatttctgcttgaagcccccttggctgcagcaatcctgtctgccataggtttcttccttccttacctactcaagggctttttctaaggcatgcacacatatctcctgttctctgagagtaccatggtgttccttaaaagaagaaaatttctaattctgaactcaatgttttgcttttactccctttctactgacaaatcatgataagggcacaaaagctgtacagatttttttttttaaccactcaatcccaaatggaggcctacaaagaacatcgtaataacacatggaagcaaaccctgggtttttaagagcaaattctgtccccccctcactcccccaagtgacaagatactaatgaagaaagttcttcaccatagtgtttgttttaactaaactcattggagtctagttccaaatttggtagggtcatcatctctacattccttaggatttctctccctatcaagctggcccagatacaagtaccaaacagtagtctctgaagttcccccatttccttcagtaccagtctataagctactgtccgccactgattttcatctatcagggtgtcctaatcagaatcagccacccaagcaagcctctctggcccacatatctatctcttgccttcccccatgaacttcagcctgtccacacaaaagccacataaactcaagcaagaaatatgttcagccaaaacatgattatagtggcagctgaccaatcccccatcccaaattgaccatttagatgtaccaactcaccttaaattagcatgttccaatccagtcggcattgcctgaatacagtagcatcatacctatagttggtcttagataagaaatgaactacttgatatagcaaagtcctttggcttcgtaaataaccctgaggttttgtacttactttccccataggaagacagaccataggcaaactctgttttgggatctcaactccatcacctttgtttcaatattttttttctctcttgaacaaaactgagataatttagaaaacaggtgcttaattgcaataaaattactatgaagtatattaaaaatcacgacattgtaaaatctcactttagatcatcaaagaaaaccattgttactatctcctttgagcttaggaaaatgtacaagagaacaaattaaaattgaaaaattgatttcacttagaaaaacttctaggaacagggtgaaccactgattttaatttgcctaattatcttatgacaagtatcaaattaagatgacacttaaagatccttagcattaacttaatgatggagaagagtgctcaacagacagttcccagtaaggtaatgagatgccattttcagagacattctaagaagatattttgattcattaaaacattaaataaaaagccctcctcagattggaacccccaaatcgatggagccacattaataatacttttcatgcctcactttgacatgacagcattcgatttttttaaagatctttaatactttccatgagtactaaagattgtaatgagttaccttatccttagaagtagaatgtttgctttcttcttcttggaaatagtcctccaaaaagtccacttgtaccagtgacaagaagtcacttgtatagtgaccaagtacacataaaatactgattataaaaatattgtaataaaccacttcctcatttgatacaggtattaagctgaatcctcactaattcacttttgaaaagttcttaatgaacagttttattcttattccatgaacagctcttttaatacaatttccttggtatccaacttaaatcccagaattttgttccaccatggttagttatttgccatatgaatgtattcttgtttctaccaatattctaggcatgagaataccttaatactgagttggagattttgtatctgtttctcctcctttacgcccattttcctacccacagcagcaaatgacaacgtgtctgtccaggtctgtccccctgctcatcccaggatgccactcacatttttttcttcttgttaccttgaccacgctgtacagtaacatccaagagcccattctacagtgggtggttttggtctttttataactttttctcaaagtcactgatgtttgttcctgttaaatgtatagcattgtaatgagagcccatcaaatcctgagtgtcagtttgttgtccctattgtagatgaaatagtgatgtagcaaaaacctagtaaattctgaatgcttttccacgtagacttatctggaatgtgaacacaactctttggttaatagtaaatgcttaactgtagtcctgagtaggtgcatttctgtctgtctcaataaattttactttgtctgcaa

SEQ ID NO: 444129 - DNA, 671 bp, Homo sapiens
  misc_feature (24)..(24): n is a, c, g, or t
gcggcccctactactactaaattnccggccgcgtcgacgtggattttatttttcgttattgttggtggtttaaaaaattccccccatgtaattattgtgaacaccttgctttgtggtcactgtaacatttggggggtgggacagggaggaaaagtaacaatagtccacatgtccctggcatctgttcagagcagtgtgcagaatgtaatgctcttttgtaagaaacgttttatgatttttaaaataaatttagtgaacctacaaaaaaaaaaaacaaaaaaaaaaaaaaaaaaaaaaaaaaaaaaaaaaaaaaaaaaaaaaaaaaaaaaaaaaaaaaaaaaaaaaaaaaaaaaaaaaaaaaaaaaaaaaaatttaggggggggggggaaaacgggggggggagcccaacattttcgacgacacgccaccattttgtgtgtataaaaagagggggcccccatagaggagaggagcctttaacaacaaaagaagaggaggaggacggcggcctgaaaacaaacaacgacgcccaagcgaggagaaaaccactgaagtgcgagactgtgtggaaggaaaagagcccccactgccgggggggagaaacaatgtgcgcaaacacacacccaggaaataaagagcgcgagggaaaaaaacaacgggggggaaaagag

SEQ ID NO: 444130 - DNA, 773 bp, Homo sapiens
  misc_feature (6)..(6): n is a, c, g, or t
  misc_feature (15)..(15): n is a, c, g, or t
  misc_feature (39)..(39): n is a, c, g, or t
  misc_feature (41)..(41): n is a, c, g, or t
  misc_feature (87)..(87): n is a, c, g, or t
ccagcntttaaatgngctgattcccaccaccccaactancnctaagttaatttcagctcctctgtggacatataagggctcccctgntggaccataggcaaataacctggcaaacttagttctggtgatttcttgatggttggaagtctattgctgggaagaaattccatcatacatattcatgcttataataagctggggattttttgtttgtttttgcaaatgcttgcccctacttttcaacaattttctatgttagttgtgaagaactaaggtggggagcagtactacaagttgagtaatggtatgagtatataccagaattctgattggcagcaagttttattaatcagaataacacttggttatggaagtgactaatgctgaaaaaattgattatttttattagataatttctcacctatagacttaaactgtcaatttgctctagtgtcttattagttaaactttgtaaaatatatatatacttgtttttccattgtatgcaaattgaaagaaaaagatgtaccatttctctgttgtatgttggattatgtaggaaatggtacatctttttctttcaatttgcatacaatggaaaaaaaaagatgtaccatttctctgttgtatgttggattatgtaggaaatgtttgtgtacaattcaaaaaaaaaaaagatgaaaaaagttcctgtggatgttttgtgtagtatcttggcatttgtattgatagttaaaattcacttccaaataaataaaacacccatgatgcta

SEQ ID NO: 444131 - DNA, 314 bp, Homo sapiens
atttgtcagttgtacgggtgaccctataatccacaacgtgtttaggctttttccctcaggacagggtgctgatatgtatcatgggatcctgccttatgtccacgccaatctagcatcatgggtgttttgatttgatgtgtgcccaatttgaacaagggttgattgacacctgtaaaatttgttgaaacgttcctcttaaaaggaaatatagtaatcttatgtatttttttgtgtgaagtgtttttctagcatttataagtgaaagctggcaggggtggtagttgggctcataatttattaaagtggtaatttag

SEQ ID NO: 444132 - DNA, 589 bp, Homo sapiens
aggatcccccctccgtcctggacagatacagaatgcacagtatttgctgcagaacagtgtgaagcagtatgcagatgttgaaggattctaatgcaagatattttttcttttttatagtgtgaagcagtattctggaaagtttttctaagactagtgaagaactgaaggagtcctgcatctttttttttttatctgcttctgtttaaaaagccaacattcctctgcttcataggtgttctgcatttgaggtgtagtgaaatctttgctgttcaccagatgtaatgttttagttccttacaaacagggttgggggggggaagggcgtgcaaaaactaacattgaaattttgaaacagcagcagagtgagtggattttatttttcgttattgttggtggtttaaaaaattccccccatgtaattattgtgaacaccttgctttgtggtcactgtaacatttggggggtgggacagggaggaaaagtaacaatagtccacatgtccctggcatctgttcagagcagtgtgcagaatgtaatgctcttttgtaagaaacgttttatgatttttaaaataaatttagtgaaccta

SEQ ID NO: 444133 - DNA, 466 bp, Homo sapiens
tcatttctctggtgaaaactgctgccaaaaccacttgttaaaaattgtacagagcctgtagaaaatatagaagattcattggatgttggcctagttctgtgtggaagactagtgattttgttgtttttagataactaaatcgacaacaaatcacagtctgccatatggcacaggccatgcctctacaggacaaatgattggtgctgtaaaatgcagcatttcacaccttactagcattctttgtcttttctaccaaatattaacaactttcaattccgttttcttaattctgttctactaatgtccgatttacttacaactcctaaatatttcttgaactgttctctatttttccattttaatttgggtttcctggatgaagactcttggaacaaatgtttatgaaagttatttgtaagttgaagttaggagggaaactgcctgtgagaggaggaaaagggggata

SEQ ID NO: 444134 - DNA, 2851 bp, Homo sapiens
gcgggggaggggagcctgcgctcgttttctgtctagctccgaccggctgaggcggcgcggcagcggagggacggcagtctcgcgcggtgaggagccgggttgggggagcggctcgtggaggctactgcagcactggggtgtcagttgttggtccgacccagaacgcttcagttctgctctgcaaggatatataataactgattggtgtgcccgtttaataaaagaatatggaaactgaacagccagaagaaaccttccctaacactgaaaccaatggtgaatttggtaaacgccctgcagaagatatggaagaggaacaagcatttaaaagatctagaaacactgatgagatggttgaattacgcattctgcttcagagcaagaatgctggggcagtgattggaaaaggaggcaagaatattaaggctctccgtacagactacaatgccagtgtttcagtcccagacagcagtggccccgagcgcatattgagtatcagtgctgatattgaaacaattggagaaattctgaagaaaatcatccctaccttggaagagggcctgcagttgccatcacccactgcaaccagccagctcccgctcgaatctgatgctgtggaatgcttaaattaccaacactataaaggaagtgactttgactgcgagttgaggctgttgattcatcagagtctagcaggaggaattattggggtcaaaggtgctaaaatcaaagaacttcgagagaacactcaaaccaccatcaagcttttccaggaatgctgtcctcattccactgacagagttgttcttattggaggaaaacccgatagggttgtagagtgcataaagatcatccttgatcttatatctgagtctcccatcaaaggacgtgcacagccttatgatcccaatttttacgatgaaacctatgattatggtggttttacaatgatgtttgatgaccgtcgcggacgcccagtgggatttcccatgcggggaagaggtggttttgacagaatgcctcctggtcggggtgggcgtcccatgcctccatctagaagagattatgatgatatgagccctcgtcgaggaccacctccccctcctcccggacgaggcggccggggtggtagcagagctcggaatcttcctcttcctccaccaccaccacctagagggggagacctcatggcctatgacagaagagggagacctggagaccgttacgacggcatggttggtttcagtgctgatgaaacttgggactctgcaatagatacatggagcccatcagaatggcagatggcttatgaaccacagggtggctccggatatgattattcctatgcagggggtcgtggctcatatggtgatcttggtggacctattattactacacaagtaactattcccaaagatttggctggatctattattggcaaaggtggtcagcggattaaacaaatccgtcatgagtcgggagcttcgatcaaaattgatgagcctttagaaggatccgaagatcggatcattaccattacaggaacacaggaccagatacagaatgcacagtatttgctgcagaacagtgtgaagcagtatgcagatgttgaaggattctaatgcaagatattttttcttttttatagtgtgaagcagtattctggaaagtttttctaagactagtgaagaactgaaggagtcctgcatctttttttttttatctgcttctgtttaaaaagccaacattcctctgcttcataggtgttctgcatttgaggtgtagtgaaatctttgctgttcaccagatgtaatgttttagttccttacaaacagggttgggggggggaagggcgtgcaaaaactaacattgaaattttgaaacagcagcagagtgagtggattttatttttcgttattgttggtggtttaaaaaattccccccatgtaattattgtgaacaccttgctttgtggtcactgtaacatttggggggtgggacagggaggaaaagtaacaatagtccacatgtccctggcatctgttcagagcagtgtgcagaatgtaatgctcttttgtaagaaacgttttatgatttttaaaataaatttagtgaacctatttttggtggtcattttttttttaagacagtcattttaaaatggtggctgaatttcccaacccacccccaaactaaacactaagtttaattttcagctcctctgttggacatataagtgcatctcttgttggacataggcaaaataacttggcaaacttagttctggtgatttcttgatggtttggaagtctattgctgggaagaaattccatcatacatattcatgcttataataagctggggattttttgtttgtttttgcaaatgcttgcccctacttttcaacaattttctatgttagttgtgaagaactaaggtggggagcagtactacaagttgagtaatggtatgagtatataccagaattctgattggcagcaagttttattaatcagaataacacttggttatggaagtgactaatgctgaaaaaattgattatttttattagataatttctcacctatagacttaaactgtcaatttgctctagtgtcttattagttaaactttgtaaaatatatatatacttgtttttccattgtatgcaaattgaaagaaaaagatgtaccatttctctgttgtatgttggattatgtaggaaatgtttgtgtacaattcaaaaaaaaaaaagatgaaaaaagttcctgtggatgttttgtgtagtatcttggcatttgtattgatagttaaaattcacttccaaataaataaaacacccatgatgcta

SEQ ID NO: 444135 - DNA, 3057 bp, Homo sapiens
  misc_feature (3038)..(3038): n is a, c, g, or t
  misc_feature (3040)..(3040): n is a, c, g, or t
  misc_feature (3044)..(3044): n is a, c, g, or t
  misc_feature (3047)..(3047): n is a, c, g, or t
gcgggggaggggagcctgcgctcgttttctgtctagctccgaccggctgaggcggcgcggcagcggagggacggcagtctcgcgcggtgaggagccgggttgggggagcggctcgtggaggctactgcagcactggggtgtcagttgttggtccgacccagaacgcttcagttctgctctgcaaggatatataataactgattggtgtgcccgtttaataaaagaatatggaaactgaacagccagaagaaaccttccctaacactgaaaccaatggtgaatttggtaaacgccctgcagaagatatggaagaggaacaagcatttaaaagatctagaaacactgatgagatggttgaattacgcattctgcttcagagcaagaatgctggggcagtgattggaaaaggaggcaagaatattaaggctctccgtacagactacaatgccagtgtttcagtcccagacagcagtggccccgagcgcatattgagtatcagtgctgatattgaaacaattggagaaattctgaagaaaatcatccctaccttggaagagggcctgcagttgccatcacccactgcaaccagccagctcccgctcgaatctgatgctgtggaatgcttaaattaccaacactataaaggaagtgactttgactgcgagttgaggctgttgattcatcagagtctagcaggaggaattattggggtcaaaggtgctaaaatcaaagaacttcgagagaacactcaaaccaccatcaagcttttccaggaatgctgtcctcattccactgacagagttgttcttattggaggaaaacccgatagggttgtagagtgcataaagatcatccttgatcttatatctgagtctcccatcaaaggacgtgcacagccttatgatcccaatttttacgatgaaacctatgattatggtggttttacaatgatgtttgatgaccgtcgcggacgcccagtgggatttcccatgcggggaagaggtggttttgacagaatgcctcctggtcggggtgggcgtcccatgcctccatctagaagagattatgatgatatgagccctcgtcgaggaccacctccccctcctcccggacgaggcggccggggtggtagcagagctcggaatcttcctcttcctccaccaccaccacctagagggggagacctcatggcctatgacagaagagggagacctggagaccgttacgacggcatggttggtttcagtgctgatgaaacttgggactctgcaatagatacatggagcccatcagaatggcagatggcttatgaaccacagggtggctccggatatgattattcctatgcagggggtcgtggctcatatggtgatcttggtggacctattattactacacaagtaactattcccaaagatttggctggatctattattggcaaaggtggtcagcggattaaacaaatccgtcatgagtcgggagcttcgatcaaaattgatgagcctttagaaggatccgaagatcggatcattaccattacaggaacacaggaccagatacagaatgcacagtatttgctgcagaacagtgtgaagcagtatgcagatgttgaaggattctaatgcaagatattttttcttttttatagtgtgaagcagtattctggaaagtttttctaagactagtgaagaactgaaggagtcctgcatctttttttttttatctgcttctgtttaaaaagccaacattcctctgcttcataggtgttctgcatttgaggtgtagtgaaatctttgctgttcaccagatgtaatgttttagttccttacaaacagggttgggggggggaagggcgtgcaaaaactaacattgaaattttgaaacagcagcagagtgagtggattttatttttcgttattgttggtggtttaaaaaattccccccatgtaattattgtgaacaccttgctttgtggtcactgtaacatttggggggtgggacagggaggaaaagtaacaatagtccacatgtccctggcatctgttcagagcagtgtgcagaatgtaatgctcttttgtaagaaacgttttatgatttttaaaataaatttagtgaacctatttttggtggtcattttttttttaagacagtcattttaaaatggtggctgaatttcccaacccacccccaaactaaacactaagtttaattttcagctcctctgttggacatataagtgcatctcttgttggacataggcaaaataacttggcaaacttagttctggtgatttcttgatggtttggaagtctattgctgggaagaaattccatcatacatattcatgcttataataagctggggattttttgtttgtttttgcaaatgcttgcccctacttttcaacaattttctatgttagttgtgaagaactaaggtggggagcagtactacaagttgagtaatggtatgagtatataccagaattctgattggcagcaagttttattaatcagaataacacttggttatggaagtgactaatgctgaaaaaattgattatttttattagataatttctcacctatagacttaaactgtcaatttgctctagtgtcttattagttaaactttgtaaaatatatatatacttgtttttccattgtatgcaaattgaaagaaaaagatgtaccatttctctgttgtatgttggattatgtaggaaatgtttgtgtacaattcaaaaaaaaaaaagatgaaaaaagttcctgtggatgttttgtgtagtatcttggcatttgtattgatagttaaaattcacttccaaataaataaaacacccatgatgctagatttgatgtgtgcccaatttgaacaagggttgattgacacctgtaaaatttgttgaaacgttcctcttaaaaggaaatatagtaatcttatgtaaaaaaaaaaaaaaaaaaaaaaaaaaaaaaaaaaaaaaaaaaaaaaaaaaaaaaaaaaaaaaaaaaaaaaaaaaaaaggggggggcgcggccnanaatnccncccggggggg

SEQ ID NO: 444136 - DNA, 4140 bp, Homo sapiens
  misc_feature (2959)..(2959): n is a, c, g, or t
  misc_feature (2996)..(2996): n is a, c, g, or t
  misc_feature (3031)..(3031): n is a, c, g, or t
  misc_feature (3126)..(3126): n is a, c, g, or t
  misc_feature (3151)..(3151): n is a, c, g, or t
  misc_feature (3184)..(3184): n is a, c, g, or t
  misc_feature (3224)..(3224): n is a, c, g, or t
  misc_feature (4140)..(4140): n is a, c, g, or t
gcgggggaggggagcctgcgctcgttttctgtctagctccgaccggctgaggcggcgcggcagcggagggacggcagtctcgcgcggtgaggagccgggttgggggagcggctcgtggaggctactgcagcactggggtgtcagttgttggtccgacccagaacgcttcagttctgctctgcaaggatatataataactgattggtgtgcccgtttaataaaagaatatggaaactgaacagccagaagaaaccttccctaacactgaaaccaatggtgaatttggtaaacgccctgcagaagatatggaagaggaacaagcatttaaaagatctagaaacactgatgagatggttgaattacgcattctgcttcagagcaagaatgctggggcagtgattggaaaaggaggcaagaatattaaggctctccgtacagactacaatgccagtgtttcagtcccagacagcagtggccccgagcgcatattgagtatcagtgctgatattgaaacaattggagaaattctgaagaaaatcatccctaccttggaagagggcctgcagttgccatcacccactgcaaccagccagctcccgctcgaatctgatgctgtggaatgcttaaattaccaacactataaaggaagtgactttgactgcgagttgaggctgttgattcatcagagtctagcaggaggaattattggggtcaaaggtgctaaaatcaaagaacttcgagagaacactcaaaccaccatcaagcttttccaggaatgctgtcctcattccactgacagagttgttcttattggaggaaaacccgatagggttgtagagtgcataaagatcatccttgatcttatatctgagtctcccatcaaaggacgtgcacagccttatgatcccaatttttacgatgaaacctatgattatggtggttttacaatgatgtttgatgaccgtcgcggacgcccagtgggatttcccatgcggggaagaggtggttttgacagaatgcctcctggtcggggtgggcgtcccatgcctccatctagaagagattatgatgatatgagccctcgtcgaggaccacctccccctcctcccggacgaggcggccggggtggtagcagagctcggaatcttcctcttcctccaccaccaccacctagagggggagacctcatggcctatgacagaagagggagacctggagaccgttacgacggcatggttggtttcagtgctgatgaaacttgggactctgcaatagatacatggagcccatcagaatggcagatggcttatgaaccacagggtggctccggatatgattattcctatgcagggggtcgtggctcatatggtgatcttggtggacctattattactacacaagtaactattcccaaagatttggctggatctattattggcaaaggtggtcagcggattaaacaaatccgtcatgagtcgggagcttcgatcaaaattgatgagcctttagaaggatccgaagatcggatcattaccattacaggaacacaggaccagatacagaatgcacagtatttgctgcagaacagtgtgaagcagtatgcagatgttgaaggattctaatgcaagatattttttcttttttatagtgtgaagcagtattctggaaagtttttctaagactagtgaagaactgaaggagtcctgcatctttttttttttatctgcttctgtttaaaaagccaacattcctctgcttcataggtgttctgcatttgaggtgtagtgaaatctttgctgttcaccagatgtaatgttttagttccttacaaacagggttgggggggggaagggcgtgcaaaaactaacattgaaattttgaaacagcagcagagtgagtggattttatttttcgttattgttggtggtttaaaaaattccccccatgtaattattgtgaacaccttgctttgtggtcactgtaacatttggggggtgggacagggaggaaaagtaacaatagtccacatgtccctggcatctgttcagagcagtgtgcagaatgtaatgctcttttgtaagaaacgttttatgatttttaaaataaatttagtgaacctatttttggtggtcattttttttttaagacagtcattttaaaatggtggctgaatttcccaacccacccccaaactaaacactaagtttaattttcagctcctctgttggacatataagtgcatctcttgttggacataggcaaaataacttggcaaacttagttctggtgatttcttgatggtttggaagtctattgctgggaagaaattccatcatacatattcatgcttataataagctggggattttttgtttgtttttgcaaatgcttgcccctacttttcaacaattttctatgttagttgtgaagaactaaggtggggagcagtactacaagttgagtaatggtatgagtatataccagaattctgattggcagcaagttttattaatcagaataacacttggttatggaagtgactaatgctgaaaaaattgattatttttattagataatttctcacctatagacttaaactgtcaatttgctctagtgtcttattagttaaactttgtaaaatatatatatacttgtttttccattgtatgcaaattgaaagaaaaagatgtaccatttctctgttgtatgttggattatgtaggaaatgtttgtgtacaattcaaaaaaaaaaaagatgaaaaaagttcctgtggatgttttgtgtagtatcttggcatttgtattgatagttaaaattcacttccaaataaataaaacacccatgatgctacaaaaaaaaaaaacaaaaaaaaacagcggtggaaaccttccctaacactgaaaccaatggtgaatttggtaaacgccctgcagaagatatggaagaggaacaagcatntaaaagatctagaaacactgatgagatggttgaattncgcattctgcttcagagcaagaatgctggggcagngattggaaaaggaggcaagaatattaaggctctccgtacagactacaatgccagtgtttcagtcccagacagcagtggccccgagcgcatattgngtatcagtgctgatattgaaacaantggagaaattctgaagaaaatcatccctacctnggaagagggcctgcagttgccatcacccactgcaaccagncagctcccgctcgaatctgatgctgtggaatgcttaaattaccaaacactataaaggaagtgactttgactgcgagttgaggctgttgattcatcagagtctagcaggaggaattattggggtcaaaggtgctaaaatcaaagaacttcgagagaacactcaaaccaccatcaagcttatccaggaatgctgtcctcattccactgacagagttgtcttatcggaggaaaatccgatagggtggtagagtgcataaagatcatccttgatcttatatctgagtctcccatcaaaggacgtgcacaggcttattgatcccaatttttacgatgagacctatgattatggtggttataccaagaagtagatgacagtcgcggacgcccaggggggataacccatgcggaggaaagacgctggataggacaagaatgcctcatgagcggggtgggggtccaatgactcaatctagaaacagattatagaagaactgagtcgtcgtaaggaccaaacatgcacacttagtcccgggaagaatgaggccagagatgggatgcaagagataggaacacgaccatataccctcagaccgacaacacgacaaacaagagggtatgaacacaccaagggccactacagtacgaacaaggcgcccaaccaggaacaaccgaccaaaacgcacgaaagcaggacacaacgagccacacacaaaccacgggagacatgcaacacacaacgccgccacacaacagacagcagtaaagaacaaacaaggaaacgaaacaaaacaacacagccagcttcgggacaaacgatcgacaccagaagcaaaaacaagacaacagagcgagaaggacgaacagaaaacgagacacgaaccgacacgcagcaccaagactagctagcgaagaagccn

SEQ ID NO: 444137 - DNA, 3153 bp, Homo sapiens
gcgggggaggggagcctgcgctcgttttctgtctagctccgaccggctgaggcggcgcggcagcggagggacggcagtctcgcgcggtgaggagccgggttgggggagcggctcgtggaggctactgcagcactggggtgtcagttgttggtccgacccagaacgcttcagttctgctctgcaaggatatataataactgattggtgtgcccgtttaataaaagaatatggaaactgaacagccagaagaaaccttccctaacactgaaaccaatggtgaatttggtaaacgccctgcagaagatatggaagaggaacaagcatttaaaagatctagaaacactgatgagatggttgaattacgcattctgcttcagagcaagaatgctggggcagtgattggaaaaggaggcaagaatattaaggctctccgtacagactacaatgccagtgtttcagtcccagacagcagtggccccgagcgcatattgagtatcagtgctgatattgaaacaattggagaaattctgaagaaaatcatccctaccttggaagagggcctgcagttgccatcacccactgcaaccagccagctcccgctcgaatctgatgctgtggaatgcttaaattaccaacactataaaggaagtgactttgactgcgagttgaggctgttgattcatcagagtctagcaggaggaattattggggtcaaaggtgctaaaatcaaagaacttcgagagaacactcaaaccaccatcaagcttttccaggaatgctgtcctcattccactgacagagttgttcttattggaggaaaacccgatagggttgtagagtgcataaagatcatccttgatcttatatctgagtctcccatcaaaggacgtgcacagccttatgatcccaatttttacgatgaaacctatgattatggtggttttacaatgatgtttgatgaccgtcgcggacgcccagtgggatttcccatgcggggaagaggtggttttgacagaatgcctcctggtcggggtgggcgtcccatgcctccatctagaagagattatgatgatatgagccctcgtcgaggaccacctccccctcctcccggacgaggcggccggggtggtagcagagctcggaatcttcctcttcctccaccaccaccacctagagggggagacctcatggcctatgacagaagagggagacctggagaccgttacgacggcatggttggtttcagtgctgatgaaacttgggactctgcaatagatacatggagcccatcagaatggcagatggcttatgaaccacagggtggctccggatatgattattcctatgcagggggtcgtggctcatatggtgatcttggtggacctattattactacacaagtaactattcccaaagatttggctggatctattattggcaaaggtggtcagcggattaaacaaatccgtcatgagtcgggagcttcgatcaaaattgatgagcctttagaaggatccgaagatcggatcattaccattacaggaacacaggaccagatacagaatgcacagtatttgctgcagaacagtgtgaagcagtatgcagatgttgaaggattctaatgcaagatattttttcttttttatagtgtgaagcagtattctggaaagtttttctaagactagtgaagaactgaaggagtcctgcatctttttttttttatctgcttctgtttaaaaagccaacattcctctgcttcataggtgttctgcatttgaggtgtagtgaaatctttgctgttcaccagatgtaatgttttagttccttacaaacagggttgggggggggaagggcgtgcaaaaactaacattgaaattttgaaacagcagcagagtgagtggattttatttttcgttattgttggtggtttaaaaaattccccccatgtaattattgtgaacaccttgctttgtggtcactgtaacatttggggggtgggacagggaggaaaagtaacaatagtccacatgtccctggcatctgttcagagcagtgtgcagaatgtaatgctcttttgtaagaaacgttttatgatttttaaaataaatttagtgaacctatttttggtggtcattttttttttaagacagtcattttaaaatggtggctgaatttcccaacccacccccaaactaaacactaagtttaattttcagctcctctgttggacatataagtgcatctcttgttggacataggcaaaataacttggcaaacttagttctggtgatttcttgatggtttggaagtctattgctgggaagaaattccatcatacatattcatgcttataataagctggggattttttgtttgtttttgcaaatgcttgcccctacttttcaacaattttctatgttagttgtgaagaactaaggtggggagcagtactacaagttgagtaatggtatgagtatataccagaattctgattggcagcaagttttattaatcagaataacacttggttatggaagtgactaatgctgaaaaaattgattatttttattagataatttctcacctatagacttaaactgtcaatttgctctagtgtcttattagttaaactttgtaaaatatatatatacttgtttttccattgtatgcaaattgaaagaaaaagatgtaccatttctctgttgtatgttggattatgtaggaaatgtttgtgtacaattcaaaaaaaaaaaagatgaaaaaagttcctgtggatgttttgtgtagtatcttggcatttgtattgatagttaaaattcacttccaaataaataaaacacccatgatgctacaaaaaaaaaaaacaaaaaaacaaaaaaaaatgttggtggggcgcgccctgggacccgaagaaaagtattttctagaaaccattgcgtgggggcgcgccgcggggcgccgatatggggcaatgtgtaaacgcgggccaaacgggtggcccaaagaagaaacccgcgggccacagacatgggggggttttctcccccattaaaaaaaccccggggggacaaccaggggtctcttggacaacacagaaggggttcgaggggcaaccggggttctcacaggggtccgggaggacaaataaatacc

SEQ ID NO: 444138 - DNA, 2120 bp, Homo sapiens
gcgggggaggggagcctgcgctcgttttctgtctagctccgaccggctgaggcggcgcggcagcggagggacggcagtctcgcgcggtgaggagccgggttgggggagcggctcgtggaggctactgcagcactggggtgtcagttgttggtccgacccagaacgcttcagttctgctctgcaaggatatataataactgattggtgtgcccgtttaataaaagaatatggaaactgaacagccagaagaaaccttccctaacactgaaaccaatggtgaatttggtaaacgccctgcagaagatatggaagaggaacaagcatttaaaagatctagaaacactgatgagatggttgaattacgcattctgcttcagagcaagaatgctggggcagtgattggaaaaggaggcaagaatattaaggctctccgtacagactacaatgccagtgtttcagtcccagacagcagtggccccgagcgcatattgagtatcagtgctgatattgaaacaattggagaaattctgaagaaaatcatccctaccttggaagagggcctgcagttgccatcacccactgcaaccagccagctcccgctcgaatctgatgctgtggaatgcttaaattaccaacactataaaggaagtgactttgactgcgagttgaggctgttgattcatcagagtctagcaggaggaattattggggtcaaaggtgctaaaatcaaagaacttcgagagaacactcaaaccaccatcaagcttttccaggaatgctgtcctcattccactgacagagttgttcttattggaggaaaacccgatagggttgtagagtgcataaagatcatccttgatcttatatctgagtctcccatcaaaggacgtgcacagccttatgatcccaatttttacgatgaaacctatgattatggtggttttacaatgatgtttgatgaccgtcgcggacgcccagtgggatttcccatgcggggaagaggtggttttgacagaatgcctcctggtcggggtgggcgtcccatgcctccatctagaagagattatgatgatatgagccctcgtcgaggaccacctccccctcctcccggacgaggcggccggggtggtagcagagctcggaatcttcctcttcctccaccaccaccacctagagggggagacctcatggcctatgacagaagagggagacctggagaccgttacgacggcatggttggtttcagtgctgatgaaacttgggactctgcaatagatacatggagcccatcagaatggcagatggcttatgaaccacagggtggctccggatatgattattcctatgcagggggtcgtggctcatatggtgatcttggtggacctattattactacacaagtaactattcccaaagatttggctggatctattattggcaaaggtggtcagcggattaaacaaatccgtcatgagtcgggagcttcgatcaaaattgatgagcctttagaaggatccgaagatcggatcattaccattacaggaacacaggaccagatacagaatgcacagtatttgctgcagaacagtgtgaagcagtatgcagatgttgaaggattctaatgcaagatattttttcttttttatagtgtgaagcagtattctggaaagtttttctaagactagtgaagaactgaaggagtcctgcatctttttttttttatctgcttctgtttaaaaagccaacattcctctgcttcataggtgttctgcatttgaggtgtagtgaaatctttgctgttcaccagatgtaatgttttagttccttacaaacagggttgggggggggaagggcgtgcaaaaactaacattgaaattttgaaacagcagcagagtgagtggattttatttttcgttattgttggtggtttaaaaaattccccccatgtaattattgtgaacaccttgctttgtggtcactgtaacatttggggggtgggacagggaggaaaagtaacaatagtccacatgtccctggcatctgttcagagcagtgtgcagaatgtaatgctcttttgtaagaaacgttttatgatttttaaaataaatttagtgaaccta

SEQ ID NO: 444139 - DNA, 3258 bp, Homo sapiens
gcgggggaggggagcctgcgctcgttttctgtctagctccgaccggctgaggcggcgcggcagcggagggacggcagtctcgcgcggtgaggagccgggttgggggagcggctcgtggaggctactgcagcactggggtgtcagttgttggtccgacccagaacgcttcagttctgctctgcaaggatatataataactgattggtgtgcccgtttaataaaagaatatggaaactgaacagccagaagaaaccttccctaacactgaaaccaatggtgaatttggtaaacgccctgcagaagatatggaagaggaacaagcatttaaaagatctagaaacactgatgagatggttgaattacgcattctgcttcagagcaagaatgctggggcagtgattggaaaaggaggcaagaatattaaggctctccgtacagactacaatgccagtgtttcagtcccagacagcagtggccccgagcgcatattgagtatcagtgctgatattgaaacaattggagaaattctgaagaaaatcatccctaccttggaagagggcctgcagttgccatcacccactgcaaccagccagctcccgctcgaatctgatgctgtggaatgcttaaattaccaacactataaaggaagtgactttgactgcgagttgaggctgttgattcatcagagtctagcaggaggaattattggggtcaaaggtgctaaaatcaaagaacttcgagagaacactcaaaccaccatcaagcttttccaggaatgctgtcctcattccactgacagagttgttcttattggaggaaaacccgatagggttgtagagtgcataaagatcatccttgatcttatatctgagtctcccatcaaaggacgtgcacagccttatgatcccaatttttacgatgaaacctatgattatggtggttttacaatgatgtttgatgaccgtcgcggacgcccagtgggatttcccatgcggggaagaggtggttttgacagaatgcctcctggtcggggtgggcgtcccatgcctccatctagaagagattatgatgatatgagccctcgtcgaggaccacctccccctcctcccggacgaggcggccggggtggtagcagagctcggaatcttcctcttcctccaccaccaccacctagagggggagacctcatggcctatgacagaagagggagacctggagaccgttacgacggcatggttggtttcagtgctgatgaaacttgggactctgcaatagatacatggagcccatcagaatggcagatggcttatgaaccacagggtggctccggatatgattattcctatgcagggggtcgtggctcatatggtgatcttggtggacctattattactacacaagtaactattcccaaagattgtaagtatctttaatactaccaggaacattttatcacttttatgattattcctcctttctgtatattttttaattcagaaggttttaacaaaaatacacatttaggattgaggttatgttaatgggctttagtgagctgggttttcagctgtttgagtcttgtcaagtgatcagtgctattaataaaagtagttaagtaggttttgagcccttaactaactaagggaaacattagtaagtgtgacataaatacattataactcaaaccttgacaggtttagggagcgttagatcatcagttaagattctgaatgaataaaattaataacttcatgctccttgaaaatacaggtagtaaatgttaaaagtatatcgtaaacacatacttttaaaaaatcttttcagtttggctggatctattattggcaaaggtggtcagcggattaaacaaatccgtcatgagtcgggagcttcgatcaaaattgatgagcctttagaaggatccgaagatcggatcattaccattacaggaacacaggaccagatacagaatgcacagtatttgctgcagaacagtgtgaagcagtatgcagatgttgaaggattctaatgcaagatattttttcttttttatagtgtgaagcagtattctggaaagtttttctaagactagtgaagaactgaaggagtcctgcatctttttttttttatctgcttctgtttaaaaagccaacattcctctgcttcataggtgttctgcatttgaggtgtagtgaaatctttgctgttcaccagatgtaatgttttagttccttacaaacagggttgggggggggaagggcgtgcaaaaactaacattgaaattttgaaacagcagcagagtgagtggattttatttttcgttattgttggtggtttaaaaaattccccccatgtaattattgtgaacaccttgctttgtggtcactgtaacatttggggggtgggacagggaggaaaagtaacaatagtccacatgtccctggcatctgttcagagcagtgtgcagaatgtaatgctcttttgtaagaaacgttttatgatttttaaaataaatttagtgaacctatttttggtggtcattttttttttaagacagtcattttaaaatggtggctgaatttcccaacccacccccaaactaaacactaagtttaattttcagctcctctgttggacatataagtgcatctcttgttggacataggcaaaataacttggcaaacttagttctggtgatttcttgatggtttggaagtctattgctgggaagaaattccatcatacatattcatgcttataataagctggggattttttgtttgtttttgcaaatgcttgcccctacttttcaacaattttctatgttagttgtgaagaactaaggtggggagcagtactacaagttgagtaatggtatgagtatataccagaattctgattggcagcaagttttattaatcagaataacacttggttatggaagtgactaatgctgaaaaaattgattatttttattagataatttctcacctatagacttaaactgtcaatttgctctagtgtcttattagttaaactttgtaaaatatatatatacttgtttttccattgtatgcaaattgaaagaaaaagatgtaccatttctctgttgtatgttggattatgtaggaaatgtttgtgtacaattcaaaaaaaaaaaagatgaaaaaagttcctgtggatgttttgtgtagtatcttggcatttgtattgatagttaaaattcacttccaaataaataaaacacccatgatgcta

SEQ ID NO: 444140 - DNA, 2060 bp, Homo sapiens
gcgggggaggggagcctgcgctcgttttctgtctagctccgaccggctgaggcggcgcggcagcggagggacggcagtctcgcgcggtgaggagccgggttgggggagcggctcgtggaggctactgcagcactggggtgtcagttgttggtccgacccagaacgcttcagttctgctctgcaaggatatataataactgattggtgtgcccgtttaataaaagaatatggaaactgaacagccagaagaaaccttccctaacactgaaaccaatggtgaatttggtaaacgccctgcagaagatatggaagaggaacaagcatttaaaagatctagaaacactgatgagatggttgaattacgcattctgcttcagagcaagaatgctggggcagtgattggaaaaggaggcaagaatattaaggctctccgtacagactacaatgccagtgtttcagtcccagacagcagtggccccgagcgcatattgagtatcagtgctgatattgaaacaattggagaaattctgaagaaaatcatccctaccttggaagagggcctgcagttgccatcacccactgcaaccagccagctcccgctcgaatctgatgctgtggaatgcttaaattaccaacactataaaggaagtgactttgactgcgagttgaggctgttgattcatcagagtctagcaggaggaattattggggtcaaaggtgctaaaatcaaagaacttcgagagaacactcaaaccaccatcaagcttttccaggaatgctgtcctcattccactgacagagttgttcttattggaggaaaacccgatagggttgtagagtgcataaagatcatccttgatcttatatctgagtctcccatcaaaggacgtgcacagccttatgatcccaatttttacgatgaaacctatgattatggtggttttacaatgatgtttgatgaccgtcgcggacgcccagtgggatttcccatgcggggaagaggtggttttgacagaatgcctcctggtcggggtgggcgtcccatgcctccatctagaagagattatgatgatatgagccctcgtcgaggaccacctccccctcctcccggacgaggcggccggggtggtagcagagctcggaatcttcctcttcctccaccaccaccacctagagggggagacctcatggcctatgacagaagagggagacctggagaccgttacgacggcatggttggtttcagtgctgatgaaacttgggactctgcaatagatacatggagcccatcagaatggcagatggcttatgaaccacagggtggctccggatatgattattcctatgcagggggtcgtggctcatatggtgatcttggtggacctattattactacacaagtaactattcccaaagatttggctggatctattattggcaaaggtggtcagcggattaaacaaatccgtcatgagtcgggagcttcgatcaaaattgatgagcctttagaaggatccgaagatcggatcattaccattacaggaacacaggaccagatacagaatgcacagtatttgctgcagaacagtgtgaagcagtattctggaaagtttttctaagactagtgaagaactgaaggagtcctgcatctttttttttttatctgcttctgtttaaaaagccaacattcctctgcttcataggtgttctgcatttgaggtgtagtgaaatctttgctgttcaccagatgtaatgttttagttccttacaaacagggttgggggggggaagggcgtgcaaaaactaacattgaaattttgaaacagcagcagagtgagtggattttatttttcgttattgttggtggtttaaaaaattccccccatgtaattattgtgaacaccttgctttgtggtcactgtaacatttggggggtgggacagggaggaaaagtaacaatagtccacatgtccctggcatctgttcagagcagtgtgcagaatgtaatgctcttttgtaagaaacgttttatgatttttaaaataaatttagtgaaccta

SEQ ID NO: 444141 - DNA, 2770 bp, Homo sapiens
gcgggggaggggagcctgcgctcgttttctgtctagctccgaccggctgaggcggcgcggcagcggagggacggcagtctcgcgcggtgaggagccgggttgggggagcggctcgtggaggctactgcagcactggggtgtcagttgttggtccgacccagaacgcttcagttctgctctgcaaggatatataataactgattggtgtgcccgtttaataaaagaatatggaaactgaacagccagaagaaaccttccctaacactgaaaccaatggtgaatttggtaaacgccctgcagaagatatggaagaggaacaagcatttaaaagatctagaaacactgatgagatggttgaattacgcattctgcttcagagcaagaatgctggggcagtgattggaaaaggaggcaagaatattaaggctctccgtacagactacaatgccagtgtttcagtcccagacagcagtggccccgagcgcatattgagtatcagtgctgatattgaaacaattggagaaattctgaagaaaatcatccctaccttggaagagggcctgcagttgccatcacccactgcaaccagccagctcccgctcgaatctgatgctgtggaatgcttaaattaccaacactataaaggaagtgactttgactgcgagttgaggctgttgattcatcagagtctagcaggaggaattattggggtcaaaggtgctaaaatcaaagaacttcgagagaacactcaaaccaccatcaagcttttccaggaatgctgtcctcattccactgacagagttgttcttattggaggaaaacccgatagggttgtagagtgcataaagatcatccttgatcttatatctgagtctcccatcaaaggacgtgcacagccttatgatcccaatttttacgatgaaacctatgattatggtggttttacaatgatgtttgatgaccgtcgcggacgcccagtgggatttcccatgcggggaagaggtggttttgacagaatgcctcctggtcggggtgggcgtcccatgcctccatctagaagagattatgatgatatgagccctcgtcgaggaccacctccccctcctcccggacgaggcggccggggtggtagcagagctcggaatcttcctcttcctccaccaccaccacctagagggggagacctcatggcctatgacagaagagggagacctggagaccgttacgacggcatggttggtttcagtgctgatgaaacttgggactctgcaatagatacatggagcccatcagaatggcagatggcttatgaaccacagggtggctccggatatgattattcctatgcagggggtcgtggctcatatggtgatcttggtggacctattattactacacaagtaactattcccaaagatttggctggatctattattggcaaaggtggtcatgagtcgggagcttcgatcaaaattgatgagcctttagaaggatccgaagatcggatcattaccattacaggaacacaggaccagatacagaatgcacagtatttgctgcagaacagtgtgaagcagtattctggaaagtttttctaagactagtgaagaactgaaggagtcctgcatctttttttttttatctgcttctgtttaaaaagccaacattcctctgcttcataggtgttctgcatttgaggtgtagtgaaatctttgctgttcaccagatgtaatgttttagttccttacaaacagggttgggggggggaagggcgtgcaaaaactaacattgaaattttgaaacagcagcagagtgagtggattttatttttcgttattgttggtggtttaaaaaattccccccatgtaattattgtgaacaccttgctttgtggtcactgtaacatttggggggtgggacagggaggaaaagtaacaatagtccacatgtccctggcatctgttcagagcagtgtgcagaatgtaatgctcttttgtaagaaacgttttatgatttttaaaataaatttagtgaacctatttttggtggtcattttttttttaagacagtcattttaaaatggtggctgaatttcccaacccacccccaaactaaacactaagtttaattttcagctcctctgttggacatataagtgcatctcttgttggacataggcaaaataacttggcaaacttagttctggtgatttcttgatggtttggaagtctattgctgggaagaaattccatcatacatattcatgcttataataagctggggattttttgtttgtttttgcaaatgcttgcccctacttttcaacaattttctatgttagttgtgaagaactaaggtggggagcagtactacaagttgagtaatggtatgagtatataccagaattctgattggcagcaagttttattaatcagaataacacttggttatggaagtgactaatgctgaaaaaattgattatttttattagataatttctcacctatagacttaaactgtcaatttgctctagtgtcttattagttaaactttgtaaaatatatatatacttgtttttccattgtatgcaaattgaaagaaaaagatgtaccatttctctgttgtatgttggattatgtaggaaatgtttgtgtacaattcaaaaaaaaaaaagatgaaaaaagttcctgtggatgttttgtgtagtatcttggcatttgtattgatagttaaaattcacttccaaataaataaaacacccatgatgcta

SEQ ID NO: 444142 - DNA, 2689 bp, Homo sapiens
gcgggggaggggagcctgcgctcgttttctgtctagctccgaccggctgaggcggcgcggcagcggagggacggcagtctcgcgcggtgaggagccgggttgggggagcggctcgtggaggctactgcagcactggggtgtcagttgttggtccgacccagaacgcttcagttctgctctgcaaggatatataataactgattggtgtgcccgtttaataaaagaatatggaaactgaacagccagaagaaaccttccctaacactgaaaccaatggtgaatttggtaaacgccctgcagaagatatggaagaggaacaagcatttaaaagatctagaaacactgatgagatggttgaattacgcattctgcttcagagcaagaatgctggggcagtgattggaaaaggaggcaagaatattaaggctctccgtacagactacaatgccagtgtttcagtcccagacagcagtggccccgagcgcatattgagtatcagtgctgatattgaaacaattggagaaattctgaagaaaatcatccctaccttggaagagggcctgcagttgccatcacccactgcaaccagccagctcccgctcgaatctgatgctgtggaatgcttaaattaccaacactataaaggaagtgactttgactgcgagttgaggctgttgattcatcagagtctagcaggaggaattattggggtcaaaggtgctaaaatcaaagaacttcgagagaacactcaaaccaccatcaagcttttccaggaatgctgtcctcattccactgacagagttgttcttattggaggaaaacccgatagggttgtagagtgcataaagatcatccttgatcttatatctgagtctcccatcaaaggacgtgcacagccttatgatcccaatttttacgatgaaacctatgattatggtggttttacaatgatgtttgatgaccgtcgcggacgcccagtgggatttcctcttcctccaccaccaccacctagagggggagacctcatggcctatgacagaagagggagacctggagaccgttacgacggcatggttggtttcagtgctgatgaaacttgggactctgcaatagatacatggagcccatcagaatggcagatggcttatgaaccacagggtggctccggatatgattattcctatgcagggggtcgtggctcatatggtgatcttggtggacctattattactacacaagtaactattcccaaagatttggctggatctattattggcaaaggtggtcagcggattaaacaaatccgtcatgagtcgggagcttcgatcaaaattgatgagcctttagaaggatccgaagatcggatcattaccattacaggaacacaggaccagatacagaatgcacagtatttgctgcagaacagtgtgaagcagtatgcagatgttgaaggattctaatgcaagatattttttcttttttatagtgtgaagcagtattctggaaagtttttctaagactagtgaagaactgaaggagtcctgcatctttttttttttatctgcttctgtttaaaaagccaacattcctctgcttcataggtgttctgcatttgaggtgtagtgaaatctttgctgttcaccagatgtaatgttttagttccttacaaacagggttgggggggggaagggcgtgcaaaaactaacattgaaattttgaaacagcagcagagtgagtggattttatttttcgttattgttggtggtttaaaaaattccccccatgtaattattgtgaacaccttgctttgtggtcactgtaacatttggggggtgggacagggaggaaaagtaacaatagtccacatgtccctggcatctgttcagagcagtgtgcagaatgtaatgctcttttgtaagaaacgttttatgatttttaaaataaatttagtgaacctatttttggtggtcattttttttttaagacagtcattttaaaatggtggctgaatttcccaacccacccccaaactaaacactaagtttaattttcagctcctctgttggacatataagtgcatctcttgttggacataggcaaaataacttggcaaacttagttctggtgatttcttgatggtttggaagtctattgctgggaagaaattccatcatacatattcatgcttataataagctggggattttttgtttgtttttgcaaatgcttgcccctacttttcaacaattttctatgttagttgtgaagaactaaggtggggagcagtactacaagttgagtaatggtatgagtatataccagaattctgattggcagcaagttttattaatcagaataacacttggttatggaagtgactaatgctgaaaaaattgattatttttattagataatttctcacctatagacttaaactgtcaatttgctctagtgtcttattagttaaactttgtaaaatatatatatacttgtttttccattgtatgcaaattgaaagaaaaagatgtaccatttctctgttgtatgttggattatgtaggaaatgtttgtgtacaattcaaaaaaaaaaaagatgaaaaaagttcctgtggatgttttgtgtagtatcttggcatttgtattgatagttaaaattcacttccaaataaataaaacacccatgatgcta

SEQ ID NO: 444143 - DNA, 2629 bp, Homo sapiens
gcgggggaggggagcctgcgctcgttttctgtctagctccgaccggctgaggcggcgcggcagcggagggacggcagtctcgcgcggtgaggagccgggttgggggagcggctcgtggaggctactgcagcactggggtgtcagttgttggtccgacccagaacgcttcagttctgctctgcaaggatatataataactgattggtgtgcccgtttaataaaagaatatggaaactgaacagccagaagaaaccttccctaacactgaaaccaatggtgaatttggtaaacgccctgcagaagatatggaagaggaacaagcatttaaaagatctagaaacactgatgagatggttgaattacgcattctgcttcagagcaagaatgctggggcagtgattggaaaaggaggcaagaatattaaggctctccgtacagactacaatgccagtgtttcagtcccagacagcagtggccccgagcgcatattgagtatcagtgctgatattgaaacaattggagaaattctgaagaaaatcatccctaccttggaagagggcctgcagttgccatcacccactgcaaccagccagctcccgctcgaatctgatgctgtggaatgcttaaattaccaacactataaaggaagtgactttgactgcgagttgaggctgttgattcatcagagtctagcaggaggaattattggggtcaaaggtgctaaaatcaaagaacttcgagagaacactcaaaccaccatcaagcttttccaggaatgctgtcctcattccactgacagagttgttcttattggaggaaaacccgatagggttgtagagtgcataaagatcatccttgatcttatatctgagtctcccatcaaaggacgtgcacagccttatgatcccaatttttacgatgaaacctatgattatggtggttttacaatgatgtttgatgaccgtcgcggacgcccagtgggatttcctcttcctccaccaccaccacctagagggggagacctcatggcctatgacagaagagggagacctggagaccgttacgacggcatggttggtttcagtgctgatgaaacttgggactctgcaatagatacatggagcccatcagaatggcagatggcttatgaaccacagggtggctccggatatgattattcctatgcagggggtcgtggctcatatggtgatcttggtggacctattattactacacaagtaactattcccaaagatttggctggatctattattggcaaaggtggtcagcggattaaacaaatccgtcatgagtcgggagcttcgatcaaaattgatgagcctttagaaggatccgaagatcggatcattaccattacaggaacacaggaccagatacagaatgcacagtatttgctgcagaacagtgtgaagcagtattctggaaagtttttctaagactagtgaagaactgaaggagtcctgcatctttttttttttatctgcttctgtttaaaaagccaacattcctctgcttcataggtgttctgcatttgaggtgtagtgaaatctttgctgttcaccagatgtaatgttttagttccttacaaacagggttgggggggggaagggcgtgcaaaaactaacattgaaattttgaaacagcagcagagtgagtggattttatttttcgttattgttggtggtttaaaaaattccccccatgtaattattgtgaacaccttgctttgtggtcactgtaacatttggggggtgggacagggaggaaaagtaacaatagtccacatgtccctggcatctgttcagagcagtgtgcagaatgtaatgctcttttgtaagaaacgttttatgatttttaaaataaatttagtgaacctatttttggtggtcattttttttttaagacagtcattttaaaatggtggctgaatttcccaacccacccccaaactaaacactaagtttaattttcagctcctctgttggacatataagtgcatctcttgttggacataggcaaaataacttggcaaacttagttctggtgatttcttgatggtttggaagtctattgctgggaagaaattccatcatacatattcatgcttataataagctggggattttttgtttgtttttgcaaatgcttgcccctacttttcaacaattttctatgttagttgtgaagaactaaggtggggagcagtactacaagttgagtaatggtatgagtatataccagaattctgattggcagcaagttttattaatcagaataacacttggttatggaagtgactaatgctgaaaaaattgattatttttattagataatttctcacctatagacttaaactgtcaatttgctctagtgtcttattagttaaactttgtaaaatatatatatacttgtttttccattgtatgcaaattgaaagaaaaagatgtaccatttctctgttgtatgttggattatgtaggaaatgtttgtgtacaattcaaaaaaaaaaaagatgaaaaaagttcctgtggatgttttgtgtagtatcttggcatttgtattgatagttaaaattcacttccaaataaataaaacacccatgatgcta

SEQ ID NO: 444144 - DNA, 2490 bp, Homo sapiens
gcgggggaggggagcctgcgctcgttttctgtctagctccgaccggctgaggcggcgcggcagcggagggacggcagtctcgcgcggtgaggagccgggttgggggagcggctcgtggaggctactgcagcactggggtgtcagttgttggtccgacccagaacgcttcagttctgctctgcaaggatatataataactgattggtgtgcccgtttaataaaagaatatggaaactgaacagccagaagaaaccttccctaacactgaaaccaatggtgaatttggtaaacgccctgcagaagatatggaagaggaacaagcatttaaaagatctagaaacactgatgagatggttgaattacgcattctgcttcagagcaagaatgctggggcagtgattggaaaaggaggcaagaatattaaggctctccgtacagactacaatgccagtgtttcagtcccagacagcagtggccccgagcgcatattgagtatcagtgctgatattgaaacaattggagaaattctgaagaaaatcatccctaccttggaagagggcctgcagttgccatcacccactgcaaccagccagctcccgctcgaatctgatgctgtggaatgcttaaattaccaacactataaaggaagtgactttgactgcgagttgaggctgttgattcatcagagtctagcaggaggaattattggggtcaaaggtgctaaaatcaaagaacttcgagagaacactcaaaccaccatcaagcttttccaggaatgctgtcctcattccactgacagagttgttcttattggaggaaaacccgatagggttgtagagtgcataaagatcatccttgatcttatatctgagtctcccatcaaaggacgtgcacagccttatgatcccaatttttacgatgaaacctatgattatggtggttttacaatgatgtttgatgaccgtcgcggacgcccagtgggatttcccatgcggggaagaggtggttttgacagaatgcctcctggtcggggtgggcgtcccatgcctccatctagaagagattatgatgatatgagccctcgtcgaggaccacctccccctcctcccggacgaggcggccggggtggtagcagagctcggaatcttcctcttcctccaccaccaccacctagagggggagacctcatggcctatgacagaagagggagacctggagaccgttacgacggcatggttggtttcagtgctgatgaaacttgggactctgcaatagatacatggagcccatcagaatggcagatggcttatgaaccacagggtggctccggatatgattattcctatgcagggggtcgtggctcatatggtgatcttggtggacctattattactacacaagtaactattcccaaagatttggctggatctattattggcaaaggtggtcagcggattaaacaaatccgtcatgagtcgggagcttcgatcaaaattgatgagcctttagaaggatccgaagatcggatcattaccattacaggaacacaggaccagatacagaatgcacagtatttgctgcagaacagtgtgaagcagtatgcagatgttgaaggattctaatgcaagatattttttcttttttatagtgtgaagcagtattctggaaagtttttctaagactagtgaagaactgaaggagtcctgcatctttttttttttatctgcttctgtttaaaaagccaacattcctctgcttcataggtgttctgcatttgaggtgtagtgaaatctttgctgttcaccagatgtaatgttttagttccttacaaacagggttgggggggggaagggcgtgcaaaaactaaccatataagtgcatctcttgttggacataggcaaaataacttggcaaacttagttctggtgatttcttgatggtttggaagtctattgctgggaagaaattccatcatacatattcatgcttataataagctggggattttttgtttgtttttgcaaatgcttgcccctacttttcaacaattttctatgttagttgtgaagaactaaggtggggagcagtactacaagttgagtaatggtatgagtatataccagaattctgattggcagcaagttttattaatcagaataacacttggttatggaagtgactaatgctgaaaaaattgattatttttattagataatttctcacctatagacttaaactgtcaatttgctctagtgtcttattagttaaactttgtaaaatatatatatacttgtttttccattgtatgcaaattgaaagaaaaagatgtaccatttctctgttgtatgttggattatgtaggaaatgtttgtgtacaattcaaaaaaaaaaaagatgaaaaaagttcctgtggatgttttgtgtagtatcttggcatttgtattgatagttaaaattcacttccaaataaataaaacacccatgatgcta

SEQ ID NO: 444145 - DNA, 2231 bp, Homo sapiens
  misc_feature (2212)..(2212): n is a, c, g, or t
  misc_feature (2214)..(2214): n is a, c, g, or t
  misc_feature (2218)..(2218): n is a, c, g, or t
  misc_feature (2221)..(2221): n is a, c, g, or t
gcgggggaggggagcctgcgctcgttttctgtctagctccgaccggctgaggcggcgcggcagcggagggacggcagtctcgcgcggtgaggagccgggttgggggagcggctcgtggaggctactgcagcactggggtgtcagttgttggtccgacccagaacgcttcagttctgctctgcaaggatatataataactgattggtgtgcccgtttaataaaagaatatggaaactgaacagccagaagaaaccttccctaacactgaaaccaatggtgaatttggtaaacgccctgcagaagatatggaagaggaacaagcatttaaaagatctagaaacactgatgagatggttgaattacgcattctgcttcagagcaagaatgctggggcagtgattggaaaaggaggcaagaatattaaggctctccgtacagactacaatgccagtgtttcagtcccagacagcagtggccccgagcgcatattgagtatcagtgctgatattgaaacaattggagaaattctgaagaaaatcatccctaccttggaagagggcctgcagttgccatcacccactgcaaccagccagctcccgctcgaatctgatgctgtggaatgcttaaattaccaacactataaaggaagtgactttgactgcgagttgaggctgttgattcatcagagtctagcaggaggaattattggggtcaaaggtgctaaaatcaaagaacttcgagagaacactcaaaccaccatcaagcttttccaggaatgctgtcctcattccactgacagagttgttcttattggaggaaaacccgatagggttgtagagtgcataaagatcatccttgatcttatatctgagtctcccatcaaaggacgtgcacagccttatgatcccaatttttacgatgaaacctatgattatggtggttttacaatgatgtttgatgaccgtcgcggacgcccagtgggatttcccatgcggggaagaggtggttttgacagaatgcctcctggtcggggtgggcgtcccatgcctccatctagaagagattatgatgatatgagccctcgtcgaggaccacctccccctcctcccggacgaggcggccggggtggtagcagagctcggaatcttcctcttcctccaccaccaccacctagagggggagacctcatggcctatgacagaagagggagacctggagaccgttacgacggcatggttggtttcagtgctgatgaaacttgggactctgcaatagatacatggagcccatcagaatggcagatggcttatgaaccacagggtggctccggatatgattattcctatgcagggggtcgtggctcatatggtgatcttggtggacctattattactacacaagtaactattcccaaagatttggctggatctattattggcaaaggtggtcagcggattaaacaaatccgtcatgagtcgggagcttcgatcaaaattgatgagcctttagaaggatccgaagatcggatcattaccattacaggaacacaggaccagatacagaatgcacagtatttgctgcagaacagtgtgaagcagtatgcagatgttgaaggattctaatgcaagatattttttcttttttatagtgtgaagcagtattctggaaagtttttctaagactagtgaagaactgaaggagtcctgcatctttttttttttatctgcttctgtttaaaaagccaacattcctctgcttcataggtgttctgcatttgaggtgtagtgaaatctttgctgttcaccagatgtaatgttttagttccttacaaacagggttgggggggggaagggcgtgcaaaaactaacattgaaattttgaaacagcagcagagtgagtggattttatttttcgttattgttggtggtttaaaaaattccccccatgtaattattgtgaacaccttgctttgtggtcactgtaacatttggggggtgggacagggaggaaaagtaacaatagtccacatgtccctggcatctgttcagagcagtgtgcagaatgtaatgctcttttgtaagaaacgttttatgatttttaaaataaatttagtgaacctaaaaaaaaaaaaaaaaaaaaaaaaaaaaaaaaaaaaaaaaaaaaaaaaaaaaaaaaaaaaaaaaaaaaaaaaaaaaaggggggggcgcggccnanaatnccncccggggggg

SEQ ID NO: 444146 - DNA, 2196 bp, Homo sapiens
  misc_feature (2170)..(2171): n is a, c, g, or t
  misc_feature (2175)..(2175): n is a, c, g, or t
  misc_feature (2177)..(2177): n is a, c, g, or t
  misc_feature (2192)..(2192): n is a, c, g, or t
gcgggggaggggagcctgcgctcgttttctgtctagctccgaccggctgaggcggcgcggcagcggagggacggcagtctcgcgcggtgaggagccgggttgggggagcggctcgtggaggctactgcagcactggggtgtcagttgttggtccgacccagaacgcttcagttctgctctgcaaggatatataataactgattggtgtgcccgtttaataaaagaatatggaaactgaacagccagaagaaaccttccctaacactgaaaccaatggtgaatttggtaaacgccctgcagaagatatggaagaggaacaagcatttaaaagatctagaaacactgatgagatggttgaattacgcattctgcttcagagcaagaatgctggggcagtgattggaaaaggaggcaagaatattaaggctctccgtacagactacaatgccagtgtttcagtcccagacagcagtggccccgagcgcatattgagtatcagtgctgatattgaaacaattggagaaattctgaagaaaatcatccctaccttggaagagggcctgcagttgccatcacccactgcaaccagccagctcccgctcgaatctgatgctgtggaatgcttaaattaccaacactataaaggaagtgactttgactgcgagttgaggctgttgattcatcagagtctagcaggaggaattattggggtcaaaggtgctaaaatcaaagaacttcgagagaacactcaaaccaccatcaagcttttccaggaatgctgtcctcattccactgacagagttgttcttattggaggaaaacccgatagggttgtagagtgcataaagatcatccttgatcttatatctgagtctcccatcaaaggacgtgcacagccttatgatcccaatttttacgatgaaacctatgattatggtggttttacaatgatgtttgatgaccgtcgcggacgcccagtgggatttcccatgcggggaagaggtggttttgacagaatgcctcctggtcggggtgggcgtcccatgcctccatctagaagagattatgatgatatgagccctcgtcgaggaccacctccccctcctcccggacgaggcggccggggtggtagcagagctcggaatcttcctcttcctccaccaccaccacctagagggggagacctcatggcctatgacagaagagggagacctggagaccgttacgacggcatggttggtttcagtgctgatgaaacttgggactctgcaatagatacatggagcccatcagaatggcagatggcttatgaaccacagggtggctccggatatgattattcctatgcagggggtcgtggctcatatggtgatcttggtggacctattattactacacaagtaactattcccaaagatttggctggatctattattggcaaaggtggtcagcggattaaacaaatccgtcatgagtcgggagcttcgatcaaaattgatgagcctttagaaggatccgaagatcggatcattaccattacaggaacacaggaccagatacagaatgcacagtatttgctgcagaacagtgtgaagcagtatgcagatgttgaaggattctaatgcaagatattttttcttttttatagtgtgaagcagtattctggaaagtttttctaagactagtgaagaactgaaggagtcctgcatctttttttttttatctgcttctgtttaaaaagccaacattcctctgcttcataggtgttctgcatttgaggtgtagtgaaatctttgctgttcaccagatgtaatgttttagttccttacaaacagggttgggggggggaagggcgtgcaaaaactaacattgaaattttgaaacagcagcagagtgagtggattttatttttcgttattgttggtggtttaaaaaattccccccatgtaattattgtgaacaccttgctttgtggtcactgtaacatttggggggtgggacagggaggaaaagtaacaatagtccacatgtccctggcatctgttcagagcagtgtgcagaatgtaatgctcttttgtaagaaacgttttatgatttttaaaataaatttagtgaacctaaaaaaaaaaaaaaaaaaaaaaaaaaaaaaaaaaaaagagggggggggggnnaaanantttccccgggggggnccca

SEQ ID NO: 444147 - DNA, 2122 bp, Homo sapiens
gcgggggaggggagcctgcgctcgttttctgtctagctccgaccggctgaggcggcgcggcagcggagggacggcagtctcgcgcggtgaggagccgggttgggggagcggctcgtggaggctactgcagcactggggtgtcagttgttggtccgacccagaacgcttcagttctgctctgcaaggatatataataactgattggtgtgcccgtttaataaaagaatatggaaactgaacagccagaagaaaccttccctaacactgaaaccaatggtgaatttggtaaacgccctgcagaagatatggaagaggaacaagcatttaaaagatctagaaacactgatgagatggttgaattacgcattctgcttcagagcaagaatgctggggcagtgattggaaaaggaggcaagaatattaaggctctccgtacagactacaatgccagtgtttcagtcccagacagcagtggccccgagcgcatattgagtatcagtgctgatattgaaacaattggagaaattctgaagaaaatcatccctaccttggaagagggcctgcagttgccatcacccactgcaaccagccagctcccgctcgaatctgatgctgtggaatgcttaaattaccaacactataaaggaagtgactttgactgcgagttgaggctgttgattcatcagagtctagcaggaggaattattggggtcaaaggtgctaaaatcaaagaacttcgagagaacactcaaaccaccatcaagcttttccaggaatgctgtcctcattccactgacagagttgttcttattggaggaaaacccgatagggttgtagagtgcataaagatcatccttgatcttatatctgagtctcccatcaaaggacgtgcacagccttatgatcccaatttttacgatgaaacctatgattatggtggttttacaatgatgtttgatgaccgtcgcggacgcccagtgggatttcccatgcggggaagaggtggttttgacagaatgcctcctggtcggggtgggcgtcccatgcctccatctagaagagattatgatgatatgagccctcgtcgaggaccacctccccctcctcccggacgaggcggccggggtggtagcagagctcggaatcttcctcttcctccaccaccaccacctagagggggagacctcatggcctatgacagaagagggagacctggagaccgttacgacggcatggttggtttcagtgctgatgaaacttgggactctgcaatagatacatggagcccatcagaatggcagatggcttatgaaccacagggtggctccggatatgattattcctatgcagggggtcgtggctcatatggtgatcttggtggacctattattactacacaagtaactattcccaaagatttggctggatctattattggcaaaggtggtcagcggattaaacaaatccgtcatgagtcgggagcttcgatcaaaattgatgagcctttagaaggatccgaagatcggatcattaccattacaggaacacaggaccagatacagaatgcacagtatttgctgcagaacagtgtgaagcagtatgcagatgttgaaggattctaatgcaagatattttttcttttttatagtgtgaagcagtattctggaaagtttttctaagactagtgaagaactgaaggagtcctgcatctttttttttttatctgcttctgtttaaaaagccaacattcctctgcttcataggtgttctgcatttgaggtgtagtgaaatctttgctgttcaccagatgtaatgttttagttccttacaaacagggttgggggggggaagggcgtgcaaaaactaacattgaaattttgaaacagcagcagagtgagtggattttatttttcgttattgttggtggtttaaaaaattccccccatgtaattattgtgaacaccttgctttgtggtcactgtaacatttggggggtgggacagggaggaaaagtaacaatagtccacatgtcattttttccggaccgttttccggattttatttctttttgtaaggaacccttttttaattctaaaaaaaaatgtgtgtcggaaaaaaaaaa

SEQ ID NO: 444148 - DNA, 1713 bp, Homo sapiens
gcgggggaggggagcctgcgctcgttttctgtctagctccgaccggctgaggcggcgcggcagcggagggacggcagtctcgcgcggtgaggagccgggttgggggagcggctcgtggaggctactgcagcactggggtgtcagttgttggtccgacccagaacgcttcagttctgctctgcaaggatatataataactgattggtgtgcccgtttaataaaagaatatggaaactgaacagccagaagaaaccttccctaacactgaaaccaatggtgaatttggtaaacgccctgcagaagatatggaagaggaacaagcatttaaaagatctagaaacactgatgagatggttgaattacgcattctgcttcagagcaagaatgctggggcagtgattggaaaaggaggcaagaatattaaggctctccgtacagactacaatgccagtgtttcagtcccagacagcagtggccccgagcgcatattgagtatcagtgctgatattgaaacaattggagaaattctgaagaaaatcatccctaccttggaagagggcctgcagttgccatcacccactgcaaccagccagctcccgctcgaatctgatgctgtggaatgcttaaattaccaacactataaaggaagtgactttgactgcgagttgaggctgttgattcatcagagtctagcaggaggaattattggggtcaaaggtgctaaaatcaaagaacttcgagagaacactcaaaccaccatcaagcttttccaggaatgctgtcctcattccactgacagagttgttcttattggaggaaaacccgatagggttgtagagtgcataaagatcatccttgatcttatatctgagtctcccatcaaaggacgtgcacagccttatgatcccaatttttacgatgaaacctatgattatggtggttttacaatgatgtttgatgaccgtcgcggacgcccagtgggatttcccatgcggggaagaggtggttttgacagaatgcctcctggtcggggtgggcgtcccatgcctccatctagaagagattatgatgatatgagccctcgtcgaggaccacctccccctcctcccggacgaggcggccggggtggtagcagagctcggaatcttcctcttcctccaccaccaccacctagagggggagacctcatggcctatgacagaagagggagacctggagaccgttacgacggcatggttggtttcagtgctgatgaaacttgggactctgcaatagatacatggagcccatcagaatggcagatggcttatgaaccacagggtggctccggatatgattattcctatgcagggggtcgtggctcatatggtgatcttggtggacctattattactacacaagtaactattcccaaagatttggctggatctattattggcaaaggtggtcagcggattaaacaaatccgtcatgagtcgggagcttcgatcaaaattgatgagcctttagaaggatccgaagatcggatcattaccattacaggaacacaggaccagatacagaatgcacagtatttgctgcagaacagtgtgaagcagtattctggaaagtttttctaagactagtgaagaactgaaggagtcctgcatcttttttttttttttttggaatggtttttttctttggaccacaattcttgctctgtggcccagg

SEQ ID NO: 444149 - DNA, 2205 bp, Homo sapiens
gcgggggaggggagcctgcgctcgttttctgtctagctccgaccggctgaggcggcgcggcagcggagggacggcagtctcgcgcggtgaggagccgggttgggggagcggctcgtggaggctactgcagcactggggtgtcagttgttggtccgacccagaacgcttcagttctgctctgcaaggatatataataactgattggtgtgcccgtttaataaaagaatatggaaactgaacagccagaagaaaccttccctaacactgaaaccaatggtgaatttggtaaacgccctgcagaagatatggaagaggaacaagcatttaaaagatctagaaacactgatgagatggttgaattacgcattctgcttcagagcaagaatgctggggcagtgattggaaaaggaggcaagaatattaaggctctccgtacagactacaatgccagtgtttcagtcccagacagcagtggccccgagcgcatattgagtatcagtgctgatattgaaacaattggagaaattctgaagaaaatcatccctaccttggaagagggcctgcagttgccatcacccactgcaaccagccagctcccgctcgaatctgatgctgtggaatgcttaaattaccaacactataaaggaagtgactttgactgcgagttgaggctgttgattcatcagagtctagcaggaggaattattggggtcaaaggtgctaaaatcaaagaacttcgagagaacactcaaaccaccatcaagcttttccaggaatgctgtcctcattccactgacagagttgttcttattggaggaaaacccgatagggttgtagagtgcataaagatcatccttgatcttatatctgagtctcccatcaaaggacgtgcacagccttatgatcccaatttttacgatgaaacctatgattatggtggttttacaatgatgtttgatgaccgtcgcggacgcccagtgggatttcccatgcggggaagaggtggttttgacagaatgcctcctggtcggggtgggcgtcccatgcctccatctagaagagattatgatgatatgagccctcgtcgaggaccacctccccctcctcccggacgaggcggccggggtggtagcagagctcggaatcttcctcttcctccaccaccaccacctagagggggagacctcatggcctatgacagaagagggagacctggagaccgttacgacggcatggttggtttcagtgctgatgaaacttgggactctgcaatagatacatggagcccatcagaatggcagatggcttatgaaccacagggtggctccggatatgattattcctatgcagggggtcgtggctcatatggtgatcttggtggacctattattactacacaagtaactattcccaaagattgtaagtatctttaatactaccaggaacattttatcacttttatgattattcctcctttctgtatattttttaattcagaaggttttaacaaaaatacacatttaggattgaggttatgttaatgggctttagtgagctgggttttcagctgtttgagtcttgtcaagtgatcagtgctattaataaaagtagttaagtaggttttgagcccttaactaactaagggaaacattagtaagtgtgacataaatacattataactcaaaccttgacaggtttagggagcgttagatcatcagttaagattctgaatgaataaaattaataacttcatgctccttgaaaatacaggtagtaaatgttaaaagtatatcgtaaacacatacttttaaaaaatcttttcagtttggctggatctattattggcaaaggtggtcagcggattaaacaaatccgtcatgagtcgggagcttcgatcaaaattgatgagcctttagaaggatccgaagatcggatcattaccattacaggaacacaggaccagatacagaatgcacagtatttgctgcagaacagtggaggaactggtttcaagaagcaggaactggggtcagcggattaaacaaatccgtcatgattcgggagcttcgatcaaaattgatgagcctttagaaggatccgaagatcggatcattaccattacaggaacacaggaccagatacagaatgcacagtatttgctgcagaactggaggaactggtttcaagaagcaggaactgggggga

SEQ ID NO: 444150 - DNA, 1460 bp, Homo sapiens
gcgggggaggggagcctgcgctcgttttctgtctagctccgaccggctgaggcggcgcggcagcggagggacggcagtctcgcgcggtgaggagccgggttgggggagcggctcgtggaggctactgcagcactggggtgtcagttgttggtccgacccagaacgcttcagttctgctctgcaaggatatataataactgattggtgtgcccgtttaataaaagaatatggaaactgaacagccagaagaaaccttccctaacactgaaaccaatggtgaatttggtaaacgccctgcagaagatatggaagaggaacaagcatttaaaagatctagaaacactgatgagatggttgaattacgcattctgcttcagagcaagaatgctggggcagtgattggaaaaggaggcaagaatattaaggctctccgtacagactacaatgccagtgtttcagtcccagacagcagtggccccgagcgcatattgagtatcagtgctgatattgaaacaattggagaaattctgaagaaaatcatccctaccttggaagagggcctgcagttgccatcacccactgcaaccagccagctcccgctcgaatctgatgctgtggaatgcttaaattaccaacactataaaggaagtgactttgactgcgagttgaggctgttgattcatcagagtctagcaggaggaattattggggtcaaaggtgctaaaatcaaagaacttcgagagaacactcaaaccaccatcaagcttttccaggaatgctgtcctcattccactgacagagttgttcttattggaggaaaacccgatagggttgtagagtgcataaagatcatccttgatcttatatctgagtctcccatcaaaggacgtgcacagccttatgatcccaatttttacgatgaaacctatgattatggtggttttacaatgatgtttgatgaccgtcgcggacgcccagtgggatttcccatgcggggaagaggtggttttgacagaatgcctcctggtcggggtgggcgtcccatgcctccatctagaagagattatgatgatatgagccctcgtcgaggaccacctccccctcctcccggacgaggcggccggggtggtagcagagctcggaatcttcctcttcctccaccaccaccacctagagggggagacctcatggcctatgacagaagagggagacctggagaccgttacgacggcatggttggtttcagtgctgatgaaacttgggactctgcaatagatacatggagcccatcagaatggcagatggcttatgaaccacagggtggctccggatatgattattcctatgcagggggtcgtggctcatatggtgatcttggtggacctattattactacacaagtaactattcccaaagatatatggctgatctaatattgcatagatgaaacaggggcgagt

SEQ ID NO: 444151 - DNA, 1253 bp, Homo sapiens
gcgggggaggggagcctgcgctcgttttctgtctagctccgaccggctgaggcggcgcggcagcggagggacggcagtctcgcgcggtgaggagccgggttgggggagcggctcgtggaggctactgcagcactggggtgtcagttgttggtccgacccagaacgcttcagttctgctctgcaaggatatataataactgattggtgtgcccgtttaataaaagaatatggaaactgaacagccagaagaaaccttccctaacactgaaaccaatggtgaatttggtaaacgccctgcagaagatatggaagaggaacaagcatttaaaagatctagaaacactgatgagatggttgaattacgcattctgcttcagagcaagaatgctggggcagtgattggaaaaggaggcaagaatattaaggctctccgtacagactacaatgccagtgtttcagtcccagacagcagtggccccgagcgcatattgagtatcagtgctgatattgaaacaattggagaaattctgaagaaaatcatccctaccttggaagagggcctgcagttgccatcacccactgcaaccagccagctcccgctcgaatctgatgctgtggaatgcttaaattaccaacactataaaggaagtgactttgactgcgagttgaggctgttgattcatcagagtctagcaggaggaattattggggtcaaaggtgctaaaatcaaagaacttcgagagaacactcaaaccaccatcaagcttttccaggaatgctgtcctcattccactgacagagttgttcttattggaggaaaacccgatagggttgtagagtgcataaagatcatccttgatcttatatctgagtctccatccaaaggatcgtgcacacgactatgatccaataaacgatgaaagctatgcatatgcgtggttgcacacagactgtctgaggaccgtccgggagcccgagggcatcacaacgggagagaagacggagatcagagacgaagaaaccgaacaggagagccaggcgaagacacaaagcgacgcacagaccgaacgcccacgagaggacgccgcccacacagacgaagacaggcgagcacaacgaagaccaggcaaacgacaaaaggacaccagcaccaacacaaaccaacaaaaagaagcgacagcccaacgaccagcaccgcgaacaacgaacacagacatacaacgaaaaaaggcaaaaaacccgagaagaaaaca

SEQ ID NO: 444152 - DNA, 762 bp, Homo sapiens
gcgggggaggggagcctgcgctcgttttctgtctagctccgaccggctgaggcggcgcggcagcggagggacggcagtctcgcgcggtgaggagccgggttgggggagcggctcgtggaggctactgcagcactggggtgtcagttgttggtccgacccagaacgcttcagttctgctctgcaaggatatataataactgattggtgtgcccgtttaataaaagaatatggaaactgaacagccagaagaaaccttccctaacactgaaaccaatggtgaatttggtaaacgccctgcagaagatatggaagaggaacaagcatttaaaagatctagaaacactgatgagatggttgaattacgcattctgcttcagagcaagaatgctggggcagtgattggaaaaggaggcaagaatattaaggctctccgtacagactacaatgccagtgtttcagtcccagacagcagtggccccgagcgcatattgagtatcagtgctgatattgaaacaattggagaaattctgaagaaaatcatccctaccttggaagagggcctgcagttgccatcacccactgcaaccagccagctcccgctcgaatctgatgctgtggaatgcttaaattaccaacactataaaggaagtgactttgactgcgagttgaggctgttgattcatcagagtctagcaggaggaattattggggtcaaaggtcacttcctttatagtgttggtaatttaaccattcctcggccgc

SEQ ID NO: 444153 - DNA, 1539 bp, Homo sapiens
gcgggggaggggagcctgcgctcgttttctgtctagctccgaccggctgaggcggcgcggcagcggagggacggcagtctcgcgcggtgaggagccgggttgggggagcggctcgtggaggctactgcagcactggggtgtcagttgttggtccgacccagaacgcttcagttctgctctgcaaggatatataataactgattggtgtgcccgtttaataaaagaatatggaaactgaacagccagaagaaaccttccctaacactgaaaccaatggtgaatttggtaaacgccctgcagaagatatggaagaggaacaagcatttaaaagatctagaaacactgatgagatggttgaattacgcattctgcttcagagcaagaatgctggggcagtgattggaaaaggaggcaagaatattaaggctctccgtacagacgtaagtattaagagtttaaactactacacgagcagcttcagtttatatgtctatagaaatttaaagatttacatcctagaaatcatttcatagtttagctacaaagacatttgtaataatttattattacagaattgatttcgaagttatccattcctgttttaacaaaagcccagattgagcagggtgggggggtggtttcttttaaacctcttcacattttaataagagtccaccaaattattcacttcatcaagcaagataacatcttaattagaaatagcgacaaagtgtaaaaatccttgattgcaccatttcctgtgtgtgaatcaattacagtattactgaaaaccattgcaggtggctggttaaatccagaaaaatttttttgttttctttgggaagaaaaatgtccatctgttctttaacagcttgcacatggagcacaaagaatttaatgttgaggttgcatgatttaaatatgggtaaagaatagagtaggcacttaatcttataattgggaaactgttcgtcaatgcctatgatttgtttgagtcttcattttacagtgggttgactcttgtgattagacacattaaatgttggcagtgccagaagtgagcacatttataggacttggctacaccaaaatttctaaattttttttctcatagtgtacacatttcttaatgtttttcttgctaaaaatgaggcaaataactttgtgtcgagtacttatttgacagtatttcatttctctcttggtcgcagatctttgtatgttcctcttgattactgtaaactgaacttgaaaatttgtttaaaattttacaaacttgcctgttaggatctaggaatgcatttcaaaacctccagaaaaccaaaccagtcttattagttagggtttttggtggtgtgggaatttttgttttgtcttttataaacctctctcctcttaatccagatgttctgtataattatctgggttattaatttccccatttcctcaagaatttcagtaaactttgagtcaggttttgtgtctaccctcatgagccagcctgctactgaaacatcgtttgtttttcttaaaaaaaaa

SEQ ID NO: 444154 - DNA, 719 bp, Homo sapiens
gcgggggaggggagcctgcgctcgttttctgtctagctccgaccggctgaggcggcgcggcagcggagggacggcagtctcgcgcggtgaggagccgggttgggggagcggctcgtggaggctactgcagcactggggtgtcagttgttggtccgacccagaacgcttcagttctgctctgcaaggatatataataactgattggtgtgcccgtttaataaaagaatatggaaactgaacagccagaagaaaccttccctaacactgaaaccaatggtgaatttggtaaacgccctgcagaagatatggaagaggaacaagcatttaaaagatctagaaacactgatgagatggttgaattacgcattctgcttcagagcaagaatgctggggcagtgattggaaaaggaggcaagaatattaaggctctccgtacagactacaatgccagtgtttcagtcccagacagcagtggccccgagcggtatgtcccaacagtttatgcctcactgcctgattagaaagagagaaatgtattttattacctgccttttatataattaaatagtatcccctttagacggtgtattgtttttcaagtttctgtcttattttccccattaagtctttttgtcactgaacttttaccgtgagttgcccacccaaacgatccactaattttatttcgatggaaggagcacagcttcaagtgttgcata

SEQ ID NO: 444155 - DNA, 443 bp, Homo sapiens
tcggcgctcggctccgcctagtagcacgtagtcgccattacgcgggccgccatttcctgtcggatccgggtgaggagaggtgcggtgcttctgctgtcgactttcgctttttcccgtcctgttacccggctgtttttgatctcggtgccgggaggcggggaggggagggcgcgttggcgctcggccagtggagcacatacttagcggatttttgaggcctggggactagtgactgcaggacccgaagggtgaacggcaagcggcaacgttattcttacagataagccctgctgtttttgcttaaactttcttatccaactcttctcccaccacacctcagaaattgcgtgctgggccggaaggatgtcgtttcagttgtcgttaggagagcaataagtcgaccaacggtatgggagaatgggaggcataaatgtgcctcgctt

SEQ ID NO: 444156 - DNA, 226 bp, Homo sapiens
acaatgcgggttcatgttaatgtttttatctctaacaggttggtttcagtgctgatgaaacttgggactctgcaatagatacatggagcccatcagaatggcagatggcttatgaaccacagggtggctccggatatgtgttcgtgtgtatatcagtgataatttaagatgcttacctgctctccagtaagttttttattcccctgaggatacttactgaaaatag

SEQ ID NO: 444157 - DNA, 2791 bp, Homo sapiens
gcgggggaggggagcctgcgctcgttttctgtctagctccgaccggctgaggcggcgcggcagcggagggacggcagtctcgcgcggtgaggagccgggttgggggagcggctcgtggaggctactgcagcactggggtgtcagttgttggtccgacccagaacgcttcagttctgctctgcaaggatatataataactgattggtgtgcccgtttaataaaagaatatggaaactgaacagccagaagaaaccttccctaacactgaaaccaatggtgaatttggtaaacgccctgcagaagatatggaagaggaacaagcatttaaaagatctagaaacactgatgagatggttgaattacgcattctgcttcagagcaagaatgctggggcagtgattggaaaaggaggcaagaatattaaggctctccgtacagactacaatgccagtgtttcagtcccagacagcagtggccccgagcgcatattgagtatcagtgctgatattgaaacaattggagaaattctgaagaaaatcatccctaccttggaagagggcctgcagttgccatcacccactgcaaccagccagctcccgctcgaatctgatgctgtggaatgcttaaattaccaacactataaaggaagtgactttgactgcgagttgaggctgttgattcatcagagtctagcaggaggaattattggggtcaaaggtgctaaaatcaaagaacttcgagagaacactcaaaccaccatcaagcttttccaggaatgctgtcctcattccactgacagagttgttcttattggaggaaaacccgatagggttgtagagtgcataaagatcatccttgatcttatatctgagtctcccatcaaaggacgtgcacagccttatgatcccaatttttacgatgaaacctatgattatggtggttttacaatgatgtttgatgaccgtcgcggacgcccagtgggatttcccatgcggggaagaggtggttttgacagaatgcctcctggtcggggtgggcgtcccatgcctccatctagaagagattatgatgatatgagccctcgtcgaggaccacctccccctcctcccggacgaggcggccggggtggtagcagagctcggaatcttcctcttcctccaccaccaccacctagagggggagacctcatggcctatgacagaagagggagacctggagaccgttacgacggcatggttggtttcagtgctgatgaaacttgggactctgcaatagatacatggagcccatcagaatggcagatggcttatgaaccacagggtggctccggatatgattattcctatgcagggggtcgtggctcatatggtgatcttggtggacctattattactacacaagtaactattcccaaagatttggctggatctattattggcaaaggtggtcagcggattaaacaaatccgtcatgagtcgggagcttcgatcaaaattgatgagcctttagaaggatccgaagatcggatcattaccattacaggaacacaggaccagatacagaatgcacagtatttgctgcagaacagtgtgaagcagtattctggaaagtttttctaagactagtgaagaactgaaggagtcctgcatctttttttttttatctgcttctgtttaaaaagccaacattcctctgcttcataggtgttctgcatttgaggtgtagtgaaatctttgctgttcaccagatgtaatgttttagttccttacaaacagggttgggggggggaagggcgtgcaaaaactaacattgaaattttgaaacagcagcagagtgagtggattttatttttcgttattgttggtggtttaaaaaattccccccatgtaattattgtgaacaccttgctttgtggtcactgtaacatttggggggtgggacagggaggaaaagtaacaatagtccacatgtccctggcatctgttcagagcagtgtgcagaatgtaatgctcttttgtaagaaacgttttatgatttttaaaataaatttagtgaacctatttttggtggtcattttttttttaagacagtcattttaaaatggtggctgaatttcccaacccacccccaaactaaacactaagtttaattttcagctcctctgttggacatataagtgcatctcttgttggacataggcaaaataacttggcaaacttagttctggtgatttcttgatggtttggaagtctattgctgggaagaaattccatcatacatattcatgcttataataagctggggattttttgtttgtttttgcaaatgcttgcccctacttttcaacaattttctatgttagttgtgaagaactaaggtggggagcagtactacaagttgagtaatggtatgagtatataccagaattctgattggcagcaagttttattaatcagaataacacttggttatggaagtgactaatgctgaaaaaattgattatttttattagataatttctcacctatagacttaaactgtcaatttgctctagtgtcttattagttaaactttgtaaaatatatatatacttgtttttccattgtatgcaaattgaaagaaaaagatgtaccatttctctgttgtatgttggattatgtaggaaatgtttgtgtacaattcaaaaaaaaaaaagatgaaaaaagttcctgtggatgttttgtgtagtatcttggcatttgtattgatagttaaaattcacttccaaataaataaaacacccatgatgcta

SEQ ID NO: 444158 - DNA, 2946 bp, Homo sapiens
gcgggggaggggagcctgcgctcgttttctgtctagctccgaccggctgaggcggcgcggcagcggagggacggcagtctcgcgcggtgaggagccgggttgggggagcggctcgtggaggctactgcagcactggggtgtcagttgttggtccgacccagaacgcttcagttctgctctgcaaggatatataataactgattggtgtgcccgtttaataaaagaatatggaaactgaacagccagaagaaaccttccctaacactgaaaccaatggtgaatttggtaaacgccctgcagaagatatggaagaggaacaagcatttaaaagatctagaaacactgatgagatggttgaattacgcattctgcttcagagcaagaatgctggggcagtgattggaaaaggaggcaagaatattaaggctctccgtacagactacaatgccagtgtttcagtcccagacagcagtggccccgagcgcatattgagtatcagtgctgatattgaaacaattggagaaattctgaagaaaatcatccctaccttggaagagggcctgcagttgccatcacccactgcaaccagccagctcccgctcgaatctgatgctgtggaatgcttaaattaccaacactataaaggaagtgactttgactgcgagttgaggctgttgattcatcagagtctagcaggaggaattattggggtcaaaggtgctaaaatcaaagaacttcgagagaacactcaaaccaccatcaagcttttccaggaatgctgtcctcattccactgacagagttgttcttattggaggaaaacccgatagggttgtagagtgcataaagatcatccttgatcttatatctgagtctcccatcaaaggacgtgcacagccttatgatcccaatttttacgatgaaacctatgattatggtggttttacaatgatgtttgatgaccgtcgcggacgcccagtgggatttcccatgcggggaagaggtggttttgacagaatgcctcctggtcggggtgggcgtcccatgcctccatctagaagagattatgatgatatgagccctcgtcgaggaccacctccccctcctcccggacgaggcggccggggtggtagcagagctcggaatcttcctcttcctccaccaccaccacctagagggggagacctcatggcctatgacagaagagggagacctggagaccgttacgacggcatggttggtttcagtgctgatgaaacttgggactctgcaatagatacatggagcccatcagaatggcagatggcttatgaaccacagggtggctccggatatgattattcctatgcagggggtcgtggctcatatggtgatcttggtggacctattattactacacaagtaactattcccaaagatttggctggatctattattggcaaaggtggtcagcggattaaacaaatccgtcatgagtcgggagcttcgatcaaaattgatgagcctttagaaggatccgaagatcggatcattaccattacaggaacacaggaccagatacagaatgcacagtatttgctgcagaacagtgtgaagcagtatgcagatgttgaaggattctaatgcaagatattttttcttttttatagtgtgaagcagtattctggaaagtttttctaagactagtgaagaactgaaggagtcctgcatctttttttttttatctgcttctgtttaaaaagccaacattcctctgcttcataggtgttctgcatttgaggtgtagtgaaatctttgctgttcaccagatgtaatgttttagttccttacaaacagggttgggggggggaagggcgtgcaaaaactaacattgaaattttgaaacagcagcagagtgagtggattttatttttcgttattgttggtggtttaaaaaattccccccatgtaattattgtgaacaccttgctttgtggtcactgtaacatttggggggtgggacagggaggaaaagtaacaatagtccacatgtccctggcatctgttcagagcagtgtgcagaatgtaatgctcttttgtaagaaacgttttatgatttttaaaataaatttagtgaacctatttttggtggtcattttttttttaagacagtcattttaaaatggtggctgaatttcccaacccacccccaaactaaacactaagtttaattttcagctcctctgttggacatataagtgcatctcttgttggacataggcaaaataacttggcaaacttagttctggtgatttcttgatggtttggaagtctattgctgggaagaaattccatcatacatattcatgcttataataagctggggattttttgtttgtttttgcaaatgcttgcccctacttttcaacaattttctatgttagttgtgaagaactaaggtggggagcagtactacaagttgagtaatggtatgagtatataccagaattctgattggcagcaagttttattaatcagaataacacttggttatggaagtgactaatgctgaaaaaattgattatttttattagataatttctcacctatagacttaaactgtcaatttgctctagtgtcttattagttaaactttgtaaaatatatatatacttgtttttccattgtatgcaaattgaaagaaaaagatgtaccatttctctgttgtatgttggattatgtaggaaatgtttgtgtacaattcaaaaaaaaaaaagatgaaaaaagttcctgtggatgttttgtgtagtatcttggcatttgtattgatagttaaaattcacttccaaataaataaaacacccatgatgctagatttgatgtgtgcccaatttgaacaagggttgattgacacctgtaaaatttgttgaaacgttcctcttaaaaggaaatatagtaatcttatgta

SEQ ID NO: 444159 - DNA, 4031 bp, Homo sapiens
  misc_feature (2850)..(2850): n is a, c, g, or t
  misc_feature (2887)..(2887): n is a, c, g, or t
  misc_feature (2922)..(2922): n is a, c, g, or t
  misc_feature (3017)..(3017): n is a, c, g, or t
  misc_feature (3042)..(3042): n is a, c, g, or t
  misc_feature (3075)..(3075): n is a, c, g, or t
  misc_feature (3115)..(3115): n is a, c, g, or t
  misc_feature (4031)..(4031): n is a, c, g, or t
gcgggggaggggagcctgcgctcgttttctgtctagctccgaccggctgaggcggcgcggcagcggagggacggcagtctcgcgcggtgaggagccgggttgggggagcggctcgtggaggctactgcagcactggggtgtcagttgttggtccgacccagaacgcttcagttctgctctgcaaggatatataataactgattggtgtgcccgtttaataaaagaatatggaaactgaacagccagaagaaaccttccctaacactgaaaccaatggtgaatttggtaaacgccctgcagaagatatggaagaggaacaagcatttaaaagatctagaaacactgatgagatggttgaattacgcattctgcttcagagcaagaatgctggggcagtgattggaaaaggaggcaagaatattaaggctctccgtacagactacaatgccagtgtttcagtcccagacagcagtggccccgagcgcatattgagtatcagtgctgatattgaaacaattggagaaattctgaagaaaatcatccctaccttggaagagggcctgcagttgccatcacccactgcaaccagccagctcccgctcgaatctgatgctgtggaatgcttaaattaccaacactataaaggaagtgactttgactgcgagttgaggctgttgattcatcagagtctagcaggaggaattattggggtcaaaggtgctaaaatcaaagaacttcgagagaacactcaaaccaccatcaagcttttccaggaatgctgtcctcattccactgacagagttgttcttattggaggaaaacccgatagggttgtagagtgcataaagatcatccttgatcttatatctgagtctcccatcaaaggacgtgcacagccttatgatcccaatttttacgatgaaacctatgattatggtggttttacaatgatgtttgatgaccgtcgcggacgcccagtgggatttcccatgcggggaagaggtggttttgacagaatgcctcctggtcggggtgggcgtcccatgcctccatctagaagagattatgatgatatgagccctcgtcgaggaccacctccccctcctcccggacgaggcggccggggtggtagcagagctcggaatcttcctcttcctccaccaccaccacctagagggggagacctcatggcctatgacagaagagggagacctggagaccgttacgacggcatggttggtttcagtgctgatgaaacttgggactctgcaatagatacatggagcccatcagaatggcagatggcttatgaaccacagggtggctccggatatgattattcctatgcagggggtcgtggctcatatggtgatcttggtggacctattattactacacaagtaactattcccaaagatttggctggatctattattggcaaaggtggtcagcggattaaacaaatccgtcatgagtcgggagcttcgatcaaaattgatgagcctttagaaggatccgaagatcggatcattaccattacaggaacacaggaccagatacagaatgcacagtatttgctgcagaacagtgtgaagcagtatgcagatgttgaaggattctaatgcaagatattttttcttttttatagtgtgaagcagtattctggaaagtttttctaagactagtgaagaactgaaggagtcctgcatctttttttttttatctgcttctgtttaaaaagccaacattcctctgcttcataggtgttctgcatttgaggtgtagtgaaatctttgctgttcaccagatgtaatgttttagttccttacaaacagggttgggggggggaagggcgtgcaaaaactaacattgaaattttgaaacagcagcagagtgagtggattttatttttcgttattgttggtggtttaaaaaattccccccatgtaattattgtgaacaccttgctttgtggtcactgtaacatttggggggtgggacagggaggaaaagtaacaatagtccacatgtccctggcatctgttcagagcagtgtgcagaatgtaatgctcttttgtaagaaacgttttatgatttttaaaataaatttagtgaacctatttttggtggtcattttttttttaagacagtcattttaaaatggtggctgaatttcccaacccacccccaaactaaacactaagtttaattttcagctcctctgttggacatataagtgcatctcttgttggacataggcaaaataacttggcaaacttagttctggtgatttcttgatggtttggaagtctattgctgggaagaaattccatcatacatattcatgcttataataagctggggattttttgtttgtttttgcaaatgcttgcccctacttttcaacaattttctatgttagttgtgaagaactaaggtggggagcagtactacaagttgagtaatggtatgagtatataccagaattctgattggcagcaagttttattaatcagaataacacttggttatggaagtgactaatgctgaaaaaattgattatttttattagataatttctcacctatagacttaaactgtcaatttgctctagtgtcttattagttaaactttgtaaaatatatatatacttgtttttccattgtatgcaaattgaaagaaaaagatgtaccatttctctgttgtatgttggattatgtaggaaatgtttgtgtacaattccaaaaaaaaaaaacaaaaaaaaacagcggtggaaaccttccctaacactgaaaccaatggtgaatttggtaaacgccctgcagaagatatggaagaggaacaagcatntaaaagatctagaaacactgatgagatggttgaattncgcattctgcttcagagcaagaatgctggggcagngattggaaaaggaggcaagaatattaaggctctccgtacagactacaatgccagtgtttcagtcccagacagcagtggccccgagcgcatattgngtatcagtgctgatattgaaacaantggagaaattctgaagaaaatcatccctacctnggaagagggcctgcagttgccatcacccactgcaaccagncagctcccgctcgaatctgatgctgtggaatgcttaaattaccaaacactataaaggaagtgactttgactgcgagttgaggctgttgattcatcagagtctagcaggaggaattattggggtcaaaggtgctaaaatcaaagaacttcgagagaacactcaaaccaccatcaagcttatccaggaatgctgtcctcattccactgacagagttgtcttatcggaggaaaatccgatagggtggtagagtgcataaagatcatccttgatcttatatctgagtctcccatcaaaggacgtgcacaggcttattgatcccaatttttacgatgagacctatgattatggtggttataccaagaagtagatgacagtcgcggacgcccaggggggataacccatgcggaggaaagacgctggataggacaagaatgcctcatgagcggggtgggggtccaatgactcaatctagaaacagattatagaagaactgagtcgtcgtaaggaccaaacatgcacacttagtcccgggaagaatgaggccagagatgggatgcaagagataggaacacgaccatataccctcagaccgacaacacgacaaacaagagggtatgaacacaccaagggccactacagtacgaacaaggcgcccaaccaggaacaaccgaccaaaacgcacgaaagcaggacacaacgagccacacacaaaccacgggagacatgcaacacacaacgccgccacacaacagacagcagtaaagaacaaacaaggaaacgaaacaaaacaacacagccagcttcgggacaaacgatcgacaccagaagcaaaaacaagacaacagagcgagaaggacgaacagaaaacgagacacgaaccgacacgcagcaccaagactagctagcgaagaagccn

SEQ ID NO: 444160 - DNA, 3352 bp, Homo sapiens
gcgggggaggggagcctgcgctcgttttctgtctagctccgaccggctgaggcggcgcggcagcggagggacggcagtctcgcgcggtgaggagccgggttgggggagcggctcgtggaggctactgcagcactggggtgtcagttgttggtccgacccagaacgcttcagttctgctctgcaaggatatataataactgattggtgtgcccgtttaataaaagaatatggaaactgaacagccagaagaaaccttccctaacactgaaaccaatggtgaatttggtaaacgccctgcagaagatatggaagaggaacaagcatttaaaagatctagaaacactgatgagatggttgaattacgcattctgcttcagagcaagaatgctggggcagtgattggaaaaggaggcaagaatattaaggctctccgtacagactacaatgccagtgtttcagtcccagacagcagtggccccgagcgcatattgagtatcagtgctgatattgaaacaattggagaaattctgaagaaaatcatccctaccttggaagagggcctgcagttgccatcacccactgcaaccagccagctcccgctcgaatctgatgctgtggaatgcttaaatgtatgtcatagtgccattgaaccccactgaagtatggagcctggcccataggatcgattatatttttaacatagtgtgcttttcccatctctatagaaaaaggcttaaaaacatgatacatgaatggtcttacaactcactgttgaccctgctccatgctgcagtgggaattaactacatttgcaaagtgctttgcagtcatttttattatggtgttatttgaatgttaataataattttgtggtaacagcgacatgctaaatggctgcagtgtgggtatggtgttgcaggacctgaaaataaaatagttttttaaggtggtgcagaatgtcctttttgggcctggctattgaggataataagcacataactggtaaagttattgaaatataaattcaggttgctcactgcaacagtatattattgttatgcttatagcagataagtgtgtattggggaattgttgatttgagactaaaattttataattctccctccacataccaacactataaaggaagtgactttgactgcgagttgaggctgttgattcatcagagtctagcaggaggaattattggggtcaaaggtgctaaaatcaaagaacttcgagagaacactcaaaccaccatcaagcttttccaggaatgctgtcctcattccactgacagagttgttcttattggaggaaaacccgatagggttgtagagtgcataaagatcatccttgatcttatatctgagtctcccatcaaaggacgtgcacagccttatgatcccaatttttacgatgaaacctatgattatggtggttttacaatgatgtttgatgaccgtcgcggacgcccagtgggatttcccatgcggggaagaggtggttttgacagaatgcctcctggtcggggtgggcgtcccatgcctccatctagaagagattatgatgatatgagccctcgtcgaggaccacctccccctcctcccggacgaggcggccggggtggtagcagagctcggaatcttcctcttcctccaccaccaccacctagagggggagacctcatggcctatgacagaagagggagacctggagaccgttacgacggcatggttggtttcagtgctgatgaaacttgggactctgcaatagatacatggagcccatcagaatggcagatggcttatgaaccacagggtggctccggatatgattattcctatgcagggggtcgtggctcatatggtgatcttggtggacctattattactacacaagtaactattcccaaagatttggctggatctattattggcaaaggtggtcagcggattaaacaaatccgtcatgagtcgggagcttcgatcaaaattgatgagcctttagaaggatccgaagatcggatcattaccattacaggaacacaggaccagatacagaatgcacagtatttgctgcagaacagtgtgaagcagtatgcagatgttgaaggattctaatgcaagatattttttcttttttatagtgtgaagcagtattctggaaagtttttctaagactagtgaagaactgaaggagtcctgcatctttttttttttatctgcttctgtttaaaaagccaacattcctctgcttcataggtgttctgcatttgaggtgtagtgaaatctttgctgttcaccagatgtaatgttttagttccttacaaacagggttgggggggggaagggcgtgcaaaaactaacattgaaattttgaaacagcagcagagtgagtggattttatttttcgttattgttggtggtttaaaaaattccccccatgtaattattgtgaacaccttgctttgtggtcactgtaacatttggggggtgggacagggaggaaaagtaacaatagtccacatgtccctggcatctgttcagagcagtgtgcagaatgtaatgctcttttgtaagaaacgttttatgatttttaaaataaatttagtgaacctatttttggtggtcattttttttttaagacagtcattttaaaatggtggctgaatttcccaacccacccccaaactaaacactaagtttaattttcagctcctctgttggacatataagtgcatctcttgttggacataggcaaaataacttggcaaacttagttctggtgatttcttgatggtttggaagtctattgctgggaagaaattccatcatacatattcatgcttataataagctggggattttttgtttgtttttgcaaatgcttgcccctacttttcaacaattttctatgttagttgtgaagaactaaggtggggagcagtactacaagttgagtaatggtatgagtatataccagaattctgattggcagcaagttttattaatcagaataacacttggttatggaagtgactaatgctgaaaaaattgattatttttattagataatttctcacctatagacttaaactgtcaatttgctctagtgtcttattagttaaactttgtaaaatatatatatacttgtttttccattgtatgcaaattgaaagaaaaagatgtaccatttctctgttgtatgttggattatgtaggaaatgtttgtgtacaattcaaaaaaaaaaaagatgaaaaaagttcctgtggatgttttgtgtagtatcttggcatttgtattgatagttaaaattcacttccaaataaataaaacacccatgatgcta

SEQ ID NO: 444161 - DNA, 2797 bp, Homo sapiens
gcgggggaggggagcctgcgctcgttttctgtctagctccgaccggctgaggcggcgcggcagcggagggacggcagtctcgcgcggtgaggagccgggttgggggagcggctcgtggaggctactgcagcactggggtgtcagttgttggtccgacccagaacgcttcagttctgctctgcaaggatatataataactgattggtgtgcccgtttaataaaagaatatggaaactgaacagccagaagaaaccttccctaacactgaaaccaatggtgaatttggtaaacgccctgcagaagatatggaagaggaacaagcatttaaaagatctagaaacactgatgagatggttgaattacgcattctgcttcagagcaagaatgctggggcagtgattggaaaaggaggcaagaatattaaggctctccgtacagactacaatgccagtgtttcagtcccagacagcagtggccccgagcgcatattgagtatcagtgctgatattgaaacaattggagaaattctgaagaaaatcatccctaccttggaagagggcctgcagttgccatcacccactgcaaccagccagctcccgctcgaatctgatgctgtggaatgcttaaattaccaacactataaaggaagtgactttgactgcgagttgaggctgttgattcatcagagtctagcaggaggaattattggggtcaaaggtgctaaaatcaaagaacttcgagagaacactcaaaccaccatcaagcttttccaggaatgctgtcctcattccactgacagagttgttcttattggaggaaaacccgatagggttgtagagtgcataaagatcatccttgatcttatatctgagtctcccatcaaaggacgtgcacagccttatgatcccaatttttacgatgaaacctatgattatggtggttttacaatgatgtttgatgaccgtcgcggacgcccagtgggatttcccatgcggggaagaggtggttttgacagaatgcctcctggtcggggtgggcgtcccatgcctccatctagaagagattatgatgatatgagccctcgtcgaggaccacctccccctcctcccggacgaggcggccggggtggtagcagagctcggaatcttcctcttcctccaccaccaccacctagagggggagacctcatggcctatgacagaagagggagacctggagaccgttacgacggcatggttggtttcagtgctgatgaaacttgggactctgcaatagatacatggagcccatcagaatggcagatggcttatgaaccacagggtggctccggatatgattattcctatgcagggggtcgtggctcatatggtgatcttggtggacctattattactacacaagtaactattcccaaagatttggctggatctattattggcaaaggtggtcagcggattaaacaaatccgtcatgagtcgggagcttcgatcaaacaggaccagatacagaatgcacagtatttgctgcagaacagtgtgaagcagtatgcagatgttgaaggattctaatgcaagatattttttcttttttatagtgtgaagcagtattctggaaagtttttctaagactagtgaagaactgaaggagtcctgcatctttttttttttatctgcttctgtttaaaaagccaacattcctctgcttcataggtgttctgcatttgaggtgtagtgaaatctttgctgttcaccagatgtaatgttttagttccttacaaacagggttgggggggggaagggcgtgcaaaaactaacattgaaattttgaaacagcagcagagtgagtggattttatttttcgttattgttggtggtttaaaaaattccccccatgtaattattgtgaacaccttgctttgtggtcactgtaacatttggggggtgggacagggaggaaaagtaacaatagtccacatgtccctggcatctgttcagagcagtgtgcagaatgtaatgctcttttgtaagaaacgttttatgatttttaaaataaatttagtgaacctatttttggtggtcattttttttttaagacagtcattttaaaatggtggctgaatttcccaacccacccccaaactaaacactaagtttaattttcagctcctctgttggacatataagtgcatctcttgttggacataggcaaaataacttggcaaacttagttctggtgatttcttgatggtttggaagtctattgctgggaagaaattccatcatacatattcatgcttataataagctggggattttttgtttgtttttgcaaatgcttgcccctacttttcaacaattttctatgttagttgtgaagaactaaggtggggagcagtactacaagttgagtaatggtatgagtatataccagaattctgattggcagcaagttttattaatcagaataacacttggttatggaagtgactaatgctgaaaaaattgattatttttattagataatttctcacctatagacttaaactgtcaatttgctctagtgtcttattagttaaactttgtaaaatatatatatacttgtttttccattgtatgcaaattgaaagaaaaagatgtaccatttctctgttgtatgttggattatgtaggaaatgtttgtgtacaattcaaaaaaaaaaaagatgaaaaaagttcctgtggatgttttgtgtagtatcttggcatttgtattgatagttaaaattcacttccaaataaataaaacacccatgatgcta

SEQ ID NO: 444162 - DNA, 2797 bp, Homo sapiens
gcgggggaggggagcctgcgctcgttttctgtctagctccgaccggctgaggcggcgcggcagcggagggacggcagtctcgcgcggtgaggagccgggttgggggagcggctcgtggaggctactgcagcactggggtgtcagttgttggtccgacccagaacgcttcagttctgctctgcaaggatatataataactgattggtgtgcccgtttaataaaagaatatggaaactgaacagccagaagaaaccttccctaacactgaaaccaatggtgaatttggtaaacgccctgcagaagatatggaagaggaacaagcatttaaaagatctagaaacactgatgagatggttgaattacgcattctgcttcagagcaagaatgctggggcagtgattggaaaaggaggcaagaatattaaggctctccgtacagactacaatgccagtgtttcagtcccagacagcagtggccccgagcgcatattgagtatcagtgctgatattgaaacaattggagaaattctgaagaaaatcatccctaccttggaagagggcctgcagttgccatcacccactgcaaccagccagctcccgctcgaatctgatgctgtggaatgcttaaattaccaacactataaaggaagtgactttgactgcgagttgaggctgttgattcatcagagtctagcaggaggaattattggggtcaaaggtgctaaaatcaaagaacttcgagagaacactcaaaccaccatcaagcttttccaggaatgctgtcctcattccactgacagagttgttcttattggaggaaaacccgatagggttgtagagtgcataaagatcatccttgatcttatatctgagtctcccatcaaaggacgtgcacagccttatgatcccaatttttacgatgaaacctatgattatggtggttttacaatgatgtttgatgaccgtcgcggacgcccagtgggatttcccatgcggggaagaggtggttttgacagaatgcctcctggtcggggtgggcgtcccatgcctccatctagaagagattatgatgatatgagccctcgtcgaggaccacctccccctcctcccggacgaggcggccggggtggtagcagagctcggaatcttcctcttcctccaccaccaccacctagagggggagacctcatggcctatgacagaagagggagacctggagaccgttacgacggcatggttggtttcagtgctgatgaaacttgggactctgcaatagatacatggagcccatcagaatggcagatggcttatgaaccacagggtggctccggatatgattattcctatgcagggggtcgtggctcatatggtgatcttggtggacctattattactacacaagtaactattcccaaagatttggctggatctattattggcaaaggtggtcagcggattaaacaaatccgtcatgagtcgggagcttcgatcaaaattgatgagcctttagaaggatccgaagatcggatcattaccattacaggaacacaggaccagatacagaatgcacagtatttgctgcagaacagtgtgaagcagtatgcagatgttgaaggattctaatgcaagatattttttcttttttatagtgtgaagcagtattctggaaagtttttctaagactagtgaagaactgaaggagtcctgcatctttttttttttatctgcttctgtttaaaaagccaacattcctctgcttcataggtgttctgcatttgaggtgtagtgaaatctttgctgttcaccagatgtaatgttttagttccttacaaacagggttgggggggggaagggcgtgcaaaaactaacattgaaattttgaaacagcagcagagtgagtggattttatttttcgttattgttggtggtttaaaaaattccccccatgtaattattgtgaacaccttgctttgtggtcactgtaacatttggggggtgggacagggaggaaaagtaacaatagtccacatgtccctggcatctgttcagagcagtgtgcagaatgtaatgctcttttgtaagaaacgttttatgatttttaaaataaatttagtgaacctatttttggtggtcattttttttttaagacagtcattttaaaatggtggctgaatttcccaacccacccccaaactaaacactaagtttaattttcagctcctctgttggacatataagtgcatctcttgttggacataggctgctgggaagaaattccatcatacatattcatgcttataataagctggggattttttgtttgtttttgcaaatgcttgcccctacttttcaacaattttctatgttagttgtgaagaactaaggtggggagcagtactacaagttgagtaatggtatgagtatataccagaattctgattggcagcaagttttattaatcagaataacacttggttatggaagtgactaatgctgaaaaaattgattatttttattagataatttctcacctatagacttaaactgtcaatttgctctagtgtcttattagttaaactttgtaaaatatatatatacttgtttttccattgtatgcaaattgaaagaaaaagatgtaccatttctctgttgtatgttggattatgtaggaaatgtttgtgtacaattcaaaaaaaaaaaagatgaaaaaagttcctgtggatgttttgtgtagtatcttggcatttgtattgatagttaaaattcacttccaaataaataaaacacccatgatgcta

SEQ ID NO: 444163 - DNA, 2606 bp, Homo sapiens
gcgggggaggggagcctgcgctcgttttctgtctagctccgaccggctgaggcggcgcggcagcggagggacggcagtctcgcgcggtgaggagccgggttgggggagcggctcgtggaggctactgcagcactggggtgtcagttgttggtccgacccagaacgcttcagttctgctctgcaaggatatataataactgattggtgtgcccgtttaataaaagaatatggaaactgaacagccagaagaaaccttccctaacactgaaaccaatggtgaatttggtaaacgccctgcagaagatatggaagaggaacaagcatttaaaagatctagaaacactgatgagatggttgaattacgcattctgcttcagagcaagaatgctggggcagtgattggaaaaggaggcaagaatattaaggctctccgtacagactacaatgccagtgtttcagtcccagacagcagtggccccgagcgcatattgagtatcagtgctgatattgaaacaattggagaaattctgaagaaaatcatccctaccttggaagagggcctgcagttgccatcacccactgcaaccagccagctcccgctcgaatctgatgctgtggaatgcttaaattaccaacactataaaggaagtgactttgactgcgagttgaggctgttgattcatcagagtctagcaggaggaattattggggtcaaaggtgctaaaatcaaagaacttcgagagaacactcaaaccaccatcaagcttttccaggaatgctgtcctcattccactgacagagttgttcttattggaggaaaacccgatagggttgtagagtgcataaagatcatccttgatcttatatctgagtctcccatcaaaggacgtgcacagccttatgatcccaatttttacgatgaaacctatgattatggtggttttacaatgatgtttgatgaccgtcgcggacgcccagtgggatttcccatgcggggaagaggtggttttgacagaatgcctcctggtcggggtgggcgtcccatgcctccatctagaagagattatgatgatatgagccctcgtcgaggaccacctccccctcctcccggacgaggcggccggggtggtagcagagctcggaatcttcctcttcctccaccaccaccacctagagggggagacctcatggcctatgacagaagagggagacctggagaccgttacgacggcatggttggtttcagtgctgatgaaacttgggactctgcaatagatacatggagcccatcagaatggcagatggcttatgaaccacagggtggctccggatatgattattcctatgcagggggtcgtggctcatatggtgatcttggtggacctattattactacacaagtaactattcccaaagatttggctggatctattattggcaaaggtggtcagcggattaaacaaatccgtcatgagtcgggagcttcgatcaaaattgatgagcctttagaaggatccgaagatcggatcattaccattacaggaacacaggaccagatacagaatgcacagtatttgctgcagaacagtgtgaagcagtatgcagatgttgaaggattctaatgcaagatattttttcttttttatagtgtgaagcagtattctggaaagtttttctaagactagtgaagaactgaaggagtcctgcatctttttttttttatctgcttctgtttaaaaagccaacattcctctgcttcataggtgttctgcatttgaggtgtagtgaaatctttgctgttcaccagatgtaatgttttagttccttacaaacagggttgggggggggaagggcgtgcaaaaactaacattgaaattttgaaacagcagcagagtgagtggattttatttttcgttattgttggtggtttaaaaaattccccccaaactaaacactaagtttaattttcagctcctctgttggacatataagtgcatctcttgttggacataggcaaaataacttggcaaacttagttctggtgatttcttgatggtttggaagtctattgctgggaagaaattccatcatacatattcatgcttataataagctggggattttttgtttgtttttgcaaatgcttgcccctacttttcaacaattttctatgttagttgtgaagaactaaggtggggagcagtactacaagttgagtaatggtatgagtatataccagaattctgattggcagcaagttttattaatcagaataacacttggttatggaagtgactaatgctgaaaaaattgattatttttattagataatttctcacctatagacttaaactgtcaatttgctctagtgtcttattagttaaactttgtaaaatatatatatacttgtttttccattgtatgcaaattgaaagaaaaagatgtaccatttctctgttgtatgttggattatgtaggaaatgtttgtgtacaattcaaaaaaaaaaaagatgaaaaaagttcctgtggatgttttgtgtagtatcttggcatttgtattgatagttaaaattcacttccaaataaataaaacacccatgatgcta

SEQ ID NO: 444164 - DNA, 2268 bp, Homo sapiens
  misc_feature (2242)..(2243): n is a, c, g, or t
  misc_feature (2247)..(2247): n is a, c, g, or t
  misc_feature (2249)..(2249): n is a, c, g, or t
  misc_feature (2264)..(2264): n is a, c, g, or t
gcgggggaggggagcctgcgctcgttttctgtctagctccgaccggctgaggcggcgcggcagcggagggacggcagtctcgcgcggtgaggagccgggttgggggagcggctcgtggaggctactgcagcactggggtgtcagttgttggtccgacccagaacgcttcagttctgctctgcaaggatatataataactgattggtgtgcccgtttaataaaagaatatggaaactgaacagccagaagaaaccttccctaacactgaaaccaatggtgaatttggtaaacgccctgcagaagatatggaagaggaacaagcatttaaaagatctagaaacactgatgagatggttgaattacgcattctgcttcagagcaagaatgctggggcagtgattggaaaaggaggcaagaatattaaggctctccgtacagactacaatgccagtgtttcagtcccagacagcagtggccccgagcgcatattgagtatcagtgctgatattgaaacaattggagaaattctgaagaaaatcatccctaccttggaagagggcctgcagttgccatcacccactgcaaccagccagctcccgctcgaatctgatgctgtggaatgcttaaattaccaacactataaaggaagtgactttgactgcgagttgaggctgttgattcatcagagtctagcaggaggaattattggggtcaaaggtgctaaaatcaaagaacttcgagagaacactcaaaccaccatcaagcttttccaggaatgctgtcctcattccactgacagagttgttcttattggaggaaaacccgatagggttgtagagtgcataaagatcatccttgatcttatatctgagtctcccatcaaaggacgtgcacagccttatgatcccaatttttacgatgaaacctatgattatggtggttttacaatgatgtttgatgaccgtcgcggacgcccagtgggatttcccatgcggggaagaggtggttttgacagaatgcctcctggtcggggtgggcgtcccatgcctccatctagaagagattatgatgatatgagccctcgtcgaggaccacctccccctcctcccggacgaggcggccggggtggtagcagagctcggaatcttcctcttcctccaccaccaccacctagagggggagacctcatggcctatgacagaagagggagacctggagaccgttacgacggcatggttggtttcagtgctgatgaaacttgggactctgcaatagatacatggagcccatcagaatggcagatggcttatgaaccacagggtggctccggatatgattattcctatgcagggggtcgtggctcatatggtgatcttggtggacctattattactacacaagtaactattcccaaagatttggctggatctattattggcaaaggtggtcagcggattaaacaaatccgtcatgagtcgggagcttcgatcaaaattgatgagcctttagaaggatccgaagatcggatcattaccattacaggaacacaggaccagatacagaatgcacagtatttgctgcagaacagtgtgaagcagtatgcagatgttgaaggattctaatgcaagatattttttcttttttatagtgtgaagcagtattctggaaagtttttctaagactagtgaagaactgaaggagtcctgcatctttttttttttatctgcttctgtttaaaaagccaacattcctctgcttcataggtgttctgcatttgaggtgtagtgaaatctttgctgttcaccagatgtaatgttttagttccttacaaacagggttgggggggggaagggcgtgcaaaaactaacattgaaattttgaaacagcagcagagtgagtggattttatttttcgttattgttggtggtttaaaaaattccccccatgtaattattgtgaacaccttgctttgtggtcactgtaacatttggggggtgggacagggaggaaaagtaacaatagtccacatgtccctggcatctgttcagagcagtgtgcagaatgtaatgctcttttgtaagaaacgttttatgatttttaaaataaatttagtgaacctatttttggtggtcattttttttttaagacagtcattttaaaaaaaaaaaaaaaaaaaaaaaaaaaaaaaaaaaaaaaaaaaaaaaaaaaaaaaaaaaaaaaaaaaaaaaaagggggggggggnnaaanantttccccgggggggnccca

SEQ ID NO: 444165 - DNA, 2171 bp, Homo sapiens
  misc_feature (2152)..(2152): n is a, c, g, or t
  misc_feature (2154)..(2154): n is a, c, g, or t
  misc_feature (2158)..(2158): n is a, c, g, or t
  misc_feature (2161)..(2161): n is a, c, g, or t
gcgggggaggggagcctgcgctcgttttctgtctagctccgaccggctgaggcggcgcggcagcggagggacggcagtctcgcgcggtgaggagccgggttgggggagcggctcgtggaggctactgcagcactggggtgtcagttgttggtccgacccagaacgcttcagttctgctctgcaaggatatataataactgattggtgtgcccgtttaataaaagaatatggaaactgaacagccagaagaaaccttccctaacactgaaaccaatggtgaatttggtaaacgccctgcagaagatatggaagaggaacaagcatttaaaagatctagaaacactgatgagatggttgaattacgcattctgcttcagagcaagaatgctggggcagtgattggaaaaggaggcaagaatattaaggctctccgtacagactacaatgccagtgtttcagtcccagacagcagtggccccgagcgcatattgagtatcagtgctgatattgaaacaattggagaaattctgaagaaaatcatccctaccttggaagagggcctgcagttgccatcacccactgcaaccagccagctcccgctcgaatctgatgctgtggaatgcttaaattaccaacactataaaggaagtgactttgactgcgagttgaggctgttgattcatcagagtctagcaggaggaattattggggtcaaaggtgctaaaatcaaagaacttcgagagaacactcaaaccaccatcaagcttttccaggaatgctgtcctcattccactgacagagttgttcttattggaggaaaacccgatagggttgtagagtgcataaagatcatccttgatcttatatctgagtctcccatcaaaggacgtgcacagccttatgatcccaatttttacgatgaaacctatgattatggtggttttacaatgatgtttgatgaccgtcgcggacgcccagtgggatttcccatgcggggaagaggtggttttgacagaatgcctcctggtcggggtgggcgtcccatgcctccatctagaagagattatgatgatatgagccctcgtcgaggaccacctccccctcctcccggacgaggcggccggggtggtagcagagctcggaatcttcctcttcctccaccaccaccacctagagggggagacctcatggcctatgacagaagagggagacctggagaccgttacgacggcatggttggtttcagtgctgatgaaacttgggactctgcaatagatacatggagcccatcagaatggcagatggcttatgaaccacagggtggctccggatatgattattcctatgcagggggtcgtggctcatatggtgatcttggtggacctattattactacacaagtaactattcccaaagatttggctggatctattattggcaaaggtggtcagcggattaaacaaatccgtcatgagtcgggagcttcgatcaaaattgatgagcctttagaaggatccgaagatcggatcattaccattacaggaacacaggaccagatacagaatgcacagtatttgctgcagaacagtgtgaagcagtattctggaaagtttttctaagactagtgaagaactgaaggagtcctgcatctttttttttttatctgcttctgtttaaaaagccaacattcctctgcttcataggtgttctgcatttgaggtgtagtgaaatctttgctgttcaccagatgtaatgttttagttccttacaaacagggttgggggggggaagggcgtgcaaaaactaacattgaaattttgaaacagcagcagagtgagtggattttatttttcgttattgttggtggtttaaaaaattccccccatgtaattattgtgaacaccttgctttgtggtcactgtaacatttggggggtgggacagggaggaaaagtaacaatagtccacatgtccctggcatctgttcagagcagtgtgcagaatgtaatgctcttttgtaagaaacgttttatgatttttaaaataaatttagtgaacctaaaaaaaaaaaaaaaaaaaaaaaaaaaaaaaaaaaaaaaaaaaaaaaaaaaaaaaaaaaaaaaaaaaaaaaaaaaaaggggggggcgcggccnanaatnccncccggggggg

SEQ ID NO: 444166 - DNA, 1747 bp, Homo sapiens
  misc_feature (1731)..(1731): n is a, c, g, or t
gcgggggaggggagcctgcgctcgttttctgtctagctccgaccggctgaggcggcgcggcagcggagggacggcagtctcgcgcggtgaggagccgggttgggggagcggctcgtggaggctactgcagcactggggtgtcagttgttggtccgacccagaacgcttcagttctgctctgcaaggatatataataactgattggtgtgcccgtttaataaaagaatatggaaactgaacagccagaagaaaccttccctaacactgaaaccaatggtgaatttggtaaacgccctgcagaagatatggaagaggaacaagcatttaaaagatctagaaacactgatgagatggttgaattacgcattctgcttcagagcaagaatgctggggcagtgattggaaaaggaggcaagaatattaaggctctccgtacagactacaatgccagtgtttcagtcccagacagcagtggccccgagcgcatattgagtatcagtgctgatattgaaacaattggagaaattctgaagaaaatcatccctaccttggaagagggcctgcagttgccatcacccactgcaaccagccagctcccgctcgaatctgatgctgtggaatgcttaaattaccaacactataaaggaagtgactttgactgcgagttgaggctgttgattcatcagagtctagcaggaggaattattggggtcaaaggtgctaaaatcaaagaacttcgagagaacactcaaaccaccatcaagcttttccaggaatgctgtcctcattccactgacagagttgttcttattggaggaaaacccgatagggttgtagagtgcataaagatcatccttgatcttatatctgagtctcccatcaaaggacgtgcacagccttatgatcccaatttttacgatgaaacctatgattatggtggttttacaatgatgtttgatgaccgtcgcggacgcccagtgggatttcccatgcggggaagaggtggttttgacagaatgcctcctggtcggggtgggcgtcccatgcctccatctagaagagattatgatgatatgagccctcgtcgaggaccacctccccctcctcccggacgaggcggccggggtggtagcagagctcggaatcttcctcttcctccaccaccaccacctagagggggagacctcatggcctatgacagaagagggagacctggagaccgttacgacggcatggttggtttcagtgctgatgaaacttgggactctgcaatagatacatggagcccatcagaatggcagatggcttatgaaccacagggtggctccggatatgattattcctatgcagggggtcgtggctcatatggtgatcttggtggacctattattactacacaagtaactattcccaaagatttggctggatctattattggcaaaggtggtcagcggattaaacaaatccgtcatgagtcgggagcttcgatcaaaattgatgagcctttagaaggatccgaagatcggatcattaccattacaggaacacaggaccagatacagaatgcacagtatttgctgcagaacagtgtgaagcagtattctggaaagtttttctaagactagtgaagaactgaaggagtcctgcatctttttttttttatctgcttctgtttaaaaagccaacattcctctgcttcataggtgttctgcatttgaggtgggaggagangaaggtacgagcatga

SEQ ID NO: 444167 - DNA, 1777 bp, Homo sapiens
gcgggggaggggagcctgcgctcgttttctgtctagctccgaccggctgaggcggcgcggcagcggagggacggcagtctcgcgcggtgaggagccgggttgggggagcggctcgtggaggctactgcagcactggggtgtcagttgttggtccgacccagaacgcttcagttctgctctgcaaggatatataataactgattggtgtgcccgtttaataaaagaatatggaaactgaacagccagaagaaaccttccctaacactgaaaccaatggtgaatttggtaaacgccctgcagaagatatggaagaggaacaagcatttaaaagatctagaaacactgatgagatggttgaattacgcattctgcttcagagcaagaatgctggggcagtgattggaaaaggaggcaagaatattaaggctctccgtacagactacaatgccagtgtttcagtcccagacagcagtggccccgagcgcatattgagtatcagtgctgatattgaaacaattggagaaattctgaagaaaatcatccctaccttggaagagggcctgcagttgccatcacccactgcaaccagccagctcccgctcgaatctgatgctgtggaatgcttaaattaccaacactataaaggaagtgactttgactgcgagttgaggctgttgattcatcagagtctagcaggaggaattattggggtcaaaggtgctaaaatcaaagaacttcgagagaacactcaaaccaccatcaagcttttccaggaatgctgtcctcattccactgacagagttgttcttattggaggaaaacccgatagggttgtagagtgcataaagatcatccttgatcttatatctgagtctcccatcaaaggacgtgcacagccttatgatcccaatttttacgatgaaacctatgattatggtggttttacaatgatgtttgatgaccgtcgcggacgcccagtgggatttcccatgcggggaagaggtggttttgacagaatgcctcctggtcggggtgggcgtcccatgcctccatctagaagagattatgatgatatgagccctcgtcgaggaccacctccccctcctcccggacgaggcggccggggtggtagcagagctcggaatcttcctcttcctccaccaccaccacctagagggggagacctcatggcctatgacagaagagggagacctggagaccgttacgacggcatggttggtttcagtgctgatgaaacttgggactctgcaatagatacatggagcccatcagaatggcagatggcttatgaaccacagggtggctccggatatgattattcctatgcagggggtcgtggctcatatggtgatcttggtggacctattattactacacaagtaactattcccaaagatttggctggatctattattggcaaaggtggtcagcggattaaacaaatccgtcatgagtcgggagcttcgatcaaaattgatgagcctttagaaggatccgaagatcggatcattaccattacaggaacacaggaccagatacagaatgcacagtatttgctgcagaacagggtcagtttaagtttagctttgtgttagcttatacatactaaaacctttaaaaagcttttcttctcaattgatttttttcttttagaagccatggtgtctcaaccttttggggacctaacttctaaacattctaatagtttgccttaatttttcttctgctttcttactaaaaacgaagacattcaata

SEQ ID NO: 444168 - DNA, 1099 bp, Homo sapiens
gcgggggaggggagcctgcgctcgttttctgtctagctccgaccggctgaggcggcgcggcagcggagggacggcagtctcgcgcggtgaggagccgggttgggggagcggctcgtggaggctactgcagcactggggtgtcagttgttggtccgacccagaacgcttcagttctgctctgcaaggatatataataactgattggtgtgcccgtttaataaaagaatatggaaactgaacagccagaagaaaccttccctaacactgaaaccaatggtgaatttggtaaacgccctgcagaagatatggaagaggaacaagcatttaaaagatctagaaacactgatgagatggttgaattacgcattctgcttcagagcaagaatgctggggcagtgattggaaaaggaggcaagaatattaaggctctccgtacagactacaatgccagtgtttcagtcccagacagcagtggccccgagcgcatattgagtatcagtgctgatattgaaacaattggagaaattctgaagaaaatcatccctaccttggaagagggcctgcagttgccatcacccactgcaaccagccagctcccgctcgaatctgatgctgtggaatgcttaaattaccaacactataaaggaagtgactttgactgcgagttgaggctgttgattcatcagagtctagcaggaggaattattggggtcaaaggtgctaaaatcaaagaacttcgagagaacactcaaaccaccatcaagcttttccaggaatgctgtcctcattccactgacagagttgttcttattggaggaaaacccgatagggttgtagagtgcataaagatcatccttgatcttatatctgagtctcccatcaaaggacgtgcacagccttatgatcccaatttttacgatgaaacctatgattatggtggttttacaatgatgtttgatgaccgtcgcggacgcccagtgggatttcccatgcggggaagaggtggttttgacagaatgcctcctggtcggggtgggcgtcccatgcctccatctagaagagattatgatgatatgatactggggggccaatgttggtg

SEQ ID NO: 444169 - DNA, 905 bp, Homo sapiens
gcgggggaggggagcctgcgctcgttttctgtctagctccgaccggctgaggcggcgcggcagcggagggacggcagtctcgcgcggtgaggagccgggttgggggagcggctcgtggaggctactgcagcactggggtgtcagttgttggtccgacccagaacgcttcagttctgctctgcaaggatatataataactgattggtgtgcccgtttaataaaagaatatggaaactgaacagccagaagaaaccttccctaacactgaaaccaatggtgaatttggtaaacgccctgcagaagatatggaagaggaacaagcatttaaaagatctagaaacactgatgagatggttgaattacgcattctgcttcagagcaagaatgctggggcagtgattggaaaaggaggcaagaatattaaggctctccgtacagactacaatgccagtgtttcagtcccagacagcagtggccccgagcgcatattgagtatcagtgctgatattgaaacaattggagaaattctgaagaaaatcatccctaccttggaagagggcctgcagttgccatcacccactgcaaccagccagctcccgctcgaatctgatgctgtggaatgcttaaattaccaacactataaaggaagtgactttgactgcgagttgaggctgttgattcatcagagtctagcaggaggaattattggggtcaaaggtgctaaaatcaaagaacttcgagagaacactcaaaccaccatcaagcttttccaggaatgctgtcctcattccactgacagagttgttcttattggaggaaaacccgatagggttgtagagtgcataaagatcatccttgatcttatatctgagtctcccatcaaaggacgtgcgggacgtggacat

SEQ ID NO: 444170 - DNA, 784 bp, Homo sapiens
gcgggggaggggagcctgcgctcgttttctgtctagctccgaccggctgaggcggcgcggcagcggagggacggcagtctcgcgcggtgaggagccgggttgggggagcggctcgtggaggctactgcagcactggggtgtcagttgttggtccgacccagaacgcttcagttctgctctgcaaggatatataataactgattggtgtgcccgtttaataaaagaatatggaaactgaacagccagaagaaaccttccctaacactgaaaccaatggtgaatttggtaaacgccctgcagaagatatggaagaggaacaagcatttaaaagatctagaaacactgatgagatggttgaattacgcattctgcttcagagcaagaatgctggggcagtgattggaaaaggaggcaagaatattaaggctctccgtacagactacaatgccagtgtttcagtcccagacagcagtggccccgagcgcatattgagtatcagtgctgatattgaaacaattggagaaattctgaagaaaatcatccctaccttggaagagggcctgcagttgccatcacccactgcaaccagccagctcccgctcgaatctgatgctgtggaatgcttaaattaccaacactataaaggaagtgactttgactgcgagttgaggctgttgattcatcagagtctagcaggaggaattattggggtcaaaggtaaggctacagcatcctcatcctccacgctgttggagacggtgctggtgatgaagggcttgggtgg

SEQ ID NO: 444171 - DNA, 1013 bp, Homo sapiens
cgtggcacggctccagcgtcgcgctctcgaattcatttgctttccttaacgagagaaggttccagatgagggctgaaccctcttcgccccgcccacggccctgaacgctgggggaggagtgcatggggaggggcggccctcaaacgggtcattgccattaatagagacctcaaacaccgcctgctaaaaatacccgactggaggagcataaaagcgcagccgagcccagcgccccgcacttttctgagcagacgtccagagcagagtcagccagcatgaccgagcgccgcgtccccttctcgctcctgcggggccccagctgggaccccttccgcgactggtacccgcatagccgcctcttcgaccaggccttcgggctgccccggctgccggaggagtggtcgcagtggttaggcggcagcagctggccaggctacgtgcgccccctgccccccgccgccatcgagagccccgcagtggccgcgcccgcctacagccgcgcgctcagccggcaactcagcagcggggtctcggagatccggcacactgcggaccgctggcgcgtgtccctggatgtcaaccacttcgccccggacgagctgacggtcaagaccaaggatggcgtggtggagatcaccggcaagcacgaggagcggcaggacgagcatggctacatctcccggtgcttcacgcggaaatacacgctgccccccggtgtggaccccacccaagtttcctcctccctgtcccctgagggcacactgaccgtggaggcccccatgcccaagctagccacgcagtccaacgagatcaccatcccagtcaccttcgagtcgcgggcccagcttgggggcccagaagctgcaaaatccgatgagactgccgccaagtaaagccttagcccggatgcccacccctgctgccgccactggctgtgcctcccccgccacctgtgtgttcttttgatacatttatcttctgtttttctcaaataaagttcaaagcaaccacct

SEQ ID NO: 444172 - DNA, 835 bp, Homo sapiens
cggacgcgtgggtcgacccacgcgtccgcataaaagcgcagccgagcccagcgccccgcacttttctgagcagacgtccagagcagagtcagccagcatgaccgagcgccgcgtccccttctcgctcctgcggggccccagctgggaccccttccgcgactggtacccgcatagccgcctcttcgaccaggccttcgggctgccccggctgccggaggagtggtcgcagtggttaggcggcagcagctggccaggctacgtgcgccccctgccccccgccgccatcgagagccccgcagtggccgcgcccgcctacagccgcgcgctcagccggcaactcagcagcggggtctcggagatccggcacactgcggaccgctggcgcgtgtccctggatgtcaaccacttcgccccggacgagctgacggtcaagaccaaggatggcgtggtggagatcaccggcaagcacgaggagcggcaggacgagcatggctacatctcccggtgcttcacgcggaaatacacgctgccccccggtgtggaccccacccaagtttcctcctccctgtcccctgagggcacactgaccgtggaggcccccatgcccaagctagccacgcagtccaacgagatcaccatcccagtcaccttcgagtcgcgggcccagcttgggggcccagaagctgcaaaatccgatgagactgccgccaagtaaagccttagcccggatgcccacccctgctgccgccactggctgtgcctcccccgccacctgtgtgttcttttgatacatttatcttctgtttttctcaaataaagttcaaagcaaccacct

SEQ ID NO: 444173 - DNA, 1235 bp, Homo sapiens
gagggaactggtaatagaatttattcaaatgtgccttaatataggcgctggggcttgcccatggtgctcttgatatataaggcccggacattctgccagtttttcttgagcaatgacaccaagaagttgacagccaggtgaatgttatacacaagctcatcgtctgtcatcttcacgtgaccaacagctacagccagacataacaccttcttcatttggaacttgattgtggacttcacctcatccactttggccaccatgttttcgttgtgtgtgagcagggaagggaactttcctgccttatttaaacctgggccgaggattcgtggaatctgcttgatcagagactctgaggccaaaacgcatcatacttcttggccagcttcttgaccagttttttattcttgttgagttttttcagcgcctcgatgtccatgtgggggatatccacggccttagcctcgtcaagacccacacccagagcagagtcagccagcatgaccgagcgccgcgtccccttctcgctcctgcggggccccagctgggaccccttccgcgactggtacccgcatagccgcctcttcgaccaggccttcgggctgccccggctgccggaggagtggtcgcagtggttaggcggcagcagctggccaggctacgtgcgccccctgccccccgccgccatcgagagccccgcagtggccgcgcccgcctacagccgcgcgctcagccggcaactcagcagcggggtctcggagatccggcacactgcggaccgctggcgcgtgtccctggatgtcaaccacttcgccccggacgagctgacggtcaagaccaaggatggcgtggtggagatcaccggcaagcacgaggagcggcaggacgagcatggctacatctcccggtgcttcacgcggaaatacacgctgccccccggtgtggaccccacccaagtttcctcctccctgtcccctgagggcacactgaccgtggaggcccccatgcccaagctagccacgcagtccaacgagatcaccatcccagtcaccttcgagtcgcgggcccagcttgggggcccagaagctgcaaaatccgatgagactgccgccaagtaaagccttagcccggatgcccacccctgctgccgccactggctgtgcctcccccgccacctgtgtgttcttttgatacatttatcttctgtttttctcaaataaagttcaaagcaaccacct

SEQ ID NO: 444174 - DNA, 1039 bp, Homo sapiens
ggctggaggacaaaacttaggctaggtacgaggctgggtgttaatcggccgaggccagagcagagtcagccagcatgaccgagcgccgcgtccccttctcgctcctgcggggccccagctgggaccccttccgcgactggtacccgcatagccgcctcttcgaccaggccttcgggctgccccggctgccggaggagtggtcgcagtggttaggcggcagcagctggccaggctacgtgcgccccctgccccccgccgccatcgagagccccgcagtggccgcgcccgcctacagccgcgcgctcagccggcaactcagcagcggggtctcggagatccggcacactgcggaccgctggcgcgtgtccctggatgtcaaccacttcgccccggacgagctgacggtcaagaccaaggatggcgtggtggagatcaccggcaagcacgaggagcggcaggacgagcatggctacatctcccggtgcttcacgcggaaatacacgctgccccccggtgtggaccccacccaagtttcctcctccctgtcccctgagggcacactgaccgtggaggcccccatgcccaagctagccacgcagtccaacgagatcaccatcccagtcaccttcgagtcgcgggcccagcttgggggcccagaagctgcaaaatccgatgagactgccgccaagtaaagccttagcccggatgcccacccctgctgccgccactggctgtgcctcccccgccacctgtgtgttcttttgatacatttatcttctgtttttctcaaataaagttcaaagcaaccacctacccgaagacaccacaacaaaactaacaccccacaccccacaacccacacagcacaaaagggacgccccaaacaactccccaggcgacacacaagcacagacaaagacaagggcgacaaggaacacaaaccacacagagcggacacaaccccgaagaaacacagaggagcgcgaggcgccccggcgcaccagaacccacagaacggcgacaccacgtcaggcaaccc

SEQ ID NO: 444175 - DNA, 677 bp, Homo sapiens
tgtggccccaggtggtccttccaggttggggaccgaataccacccttggccagccttggtttgcacggttccgatgagtgtccaagtgttagcgcaacagttggcagtttaagtggccccctgcaccggcttcaataaaaggccccagtgtcagatccgcttataacgagggctaagctgttaatcacaagaggggcatggagatcggcgcattcggaccggtggggtgtgtcatggatgtctaacactttcgcccgggacagcgttcggtcaaagaccaaggatgcctgttgcagatcaccggcaagcacgaggagcggcaggacgagcatggctacatctcccggtgcttcacgcggaaatacacgctgccccccggtgtggaccccacccaagtttcctcctccctgtcccctgagggcacactgaccgtggaggcccccatgcccaagctagccacgcagtccaacgagatcaccatcccagtcaccttcgagtcgcgggcccagcttgggggcccagaagctgcaaaatccgatgagactgccgccaagtaaagccttagcccggatgcccacccctgctgccgccactggctgtgcctcccccgccacctgtgtgttcttttgatacatttatcttctgtttttctcaaataaagttcaaagcaaccacct

SEQ ID NO: 444176 - DNA, 1826 bp, Homo sapiens
cgtggcacggctccagcgtcgcgctctcgaattcatttgctttccttaacgagagaaggttccagatgagggctgaaccctcttcgccccgcccacggccctgaacgctgggggaggagtgcatggggaggggcggccctcaaacgggtcattgccattaatagagacctcaaacaccgcctgctaaaaatacccgactggaggagcataaaagcgcagccgagcccagcgccccgcacttttctgagcagacgtccagagcagagtcagccagcatgaccgagcgccgcgtccccttctcgctcctgcggggccccagctgggaccccttccgcgactggtacccgcatagccgcctcttcgaccaggccttcgggctgccccggctgccggaggagtggtcgcagtggttaggcggcagcagctggccaggctacgtgcgccccctgccccccgccgccatcgagagccccgcagtggccgcgcccgcctacagccgcgcgctcagccggcaactcagcagcggggtctcggagatccggcacactgcggaccgctggcgcgtgtccctggatgtcaaccacttcgccccggacgagctgacggtcaagaccaaggatggcgtggtggagatcaccggcaagcacgaggagcggcaggacgagcatggctacatctcccggtgcttcacgcggaaatacacctgccccccggtgtggactcgccatccgcaatgtttctcatcgcttcacgctgtcctccatgaggtggtcgagcatcgtgaccgatggatggccgcgcacgatgccacaaaagcttgagcacacgcctagtccgatacgagatccactcattctccaaggtctagcctatcgcagctcagcagggcaccgacgcttgggcggccgcagaaaggcctggcagatacatcctgaagtgaggacgtgcgcagcacgagatggtaaagatgccctttagcccccgggggaatgcgtcgcgactcgccctgtcttagcacgggcacaacctaggtgtaggtgcccttcgcgcccacgggccaggcatggtggttgtaacattgggtggagtaacaaattttttctcgtcttgataagcgtggtctaaagcgttaaagccggtttcaacaaacgtacattaggccaacggacccatggcaggggaattgacgaaatttccacgaagagtgagtggagcggcggacgtgaaaaatgggtattccgctcaagccgtgtcgggcgcaaaataaccttaaagaagcgcttgtcctccaagtgttttacgggatttgggcccccgttgtggagcccctcctgaatgaattgaggcgcgatccgattaactagaagaaagacttggcgtggcgaaagggggccgagggaatgatgaccacgggaagtctcgtctttggcgctttcgtatacccacacaggggtttatcccttgccgcaatgaaaaccgtgggagagggggagaaaccctaatattcttggccaattttcgagtttcccacctcctggaggtttggagtaaaccacgaattttcccgtattaaagagggggaagcattttttatcaatggacttctaaaaaagaagcggaggagataagataataacgataggtatggatttaggaaccaaggggataaaagttcgagggtgaaaaaacactttgcgttcgagaggaaattcagagccgaattggaagcgcgtttgcagaattaagattaaggttggcaacaaggagagagtctaatagattggatatgggaaggataatagttttattcctaaggcaagggggta

SEQ ID NO: 444177 - DNA, 785 bp, Homo sapiens
cggacgcgtgggtcgacccacgcgtccccagagcagagtcagccagcatgaccgagcgccgcgtccccttctcgctcctgcggggccccagctgggaccccttccgcgactggtacccgcatagccgcctcttcgaccaggccttcgggctgccccggctgccggaggagtggtcgcagtggttaggcggcagcagctggccaggctacgtgcgccccctgccccccgccgccatcgagagccccgcagtggccgcgcccgcctacagccgcgcgctcagccggcaactcagcagcggggtctcggagatccggcacactgcggaccgctggcgcgtgtccctggatgtcaaccacttcgccccggacgagctgacggtcaagaccaaggatggcgtggtggagatcaccggcaagcacgaggagcggcaggacgagcatggctacatctcccggtgcttcacgcggaaatacacgctgccccccggtgtggaccccacccaagtttcctcctccctgtcccctgagggcacactgaccgtggaggcccccatgcccaagctagccacgcagtccaacgagatcaccatcccagtcaccttcgagtcgcgggcccagcttgggggcccagaagctgcaaaatccgatgagactgccgccaagtaaagccttagcccggatgcccacccctgctgccgccactggctgtgcctcccccgccacctgtgtgttcttttgatacatttatcttctgtttttctcaaataaagttcaaagcaaccacct

SEQ ID NO: 444178 - DNA, 688 bp, Homo sapiens
cggacgcgtgggtcgacccacgcgtccgcataaaagcgcagccgagcccagcgccccgcacttttctgagcagacgtccagagcagagtcagccagcatgaccgagcgccgcgtgcgccccctgccccccgccgccatcgagagccccgcagtggccgcgcccgcctacagccgcgcgctcagccggcaactcagcagcggggtctcggagatccggcacactgcggaccgctggcgcgtgtccctggatgtcaaccacttcgccccggacgagctgacggtcaagaccaaggatggcgtggtggagatcaccggcaagcacgaggagcggcaggacgagcatggctacatctcccggtgcttcacgcggaaatacacgctgccccccggtgtggaccccacccaagtttcctcctccctgtcccctgagggcacactgaccgtggaggcccccatgcccaagctagccacgcagtccaacgagatcaccatcccagtcaccttcgagtcgcgggcccagcttgggggcccagaagctgcaaaatccgatgagactgccgccaagtaaagccttagcccggatgcccacccctgctgccgccactggctgtgcctcccccgccacctgtgtgttcttttgatacatttatcttctgtttttctcaaataaagttcaaagcaaccacct

SEQ ID NO: 444179 - DNA, 999 bp, Homo sapiens
  misc_feature (906)..(906): n is a, c, g, or t
  misc_feature (916)..(916): n is a, c, g, or t
  misc_feature (919)..(919): n is a, c, g, or t
  misc_feature (922)..(923): n is a, c, g, or t
  misc_feature (932)..(932): n is a, c, g, or t
  misc_feature (935)..(938): n is a, c, g, or t
  misc_feature (941)..(942): n is a, c, g, or t
  misc_feature (946)..(946): n is a, c, g, or t
  misc_feature (952)..(952): n is a, c, g, or t
  misc_feature (954)..(954): n is a, c, g, or t
  misc_feature (960)..(960): n is a, c, g, or t
  misc_feature (967)..(967): n is a, c, g, or t
ggctggaggacaaaacttaggctaggtacgaggctgggtgttaatcggccgagggcataaaagcgcagccgagcccagcgccccgcacttttctgagcagacgtccagagcagagtcagccagcatgaccgagcgccgcgtccccttctcgctcctgcggggccccagctgggaccccttccgcgactggtacccgcatagccgcctcttcgaccaggccttcgggctgccccggctgccggaggagtggtcgcagtggttaggcggcagcagctggccaggctacgtgcgccccctgccccccgccgccatcgagagccccgcagtggccgcgcccgcctacagccgcgcgctcagccggcaactcagcagcggggtctcggagatccggcacactgcggaccgctggcgcgtgtccctggatgtcaaccacttcgccccggacgagctgacggtcaagaccaaggatggcgtggtggagatcaccggcaagcacgaggagcggcaggacgagcatggctacatctcccggtgcttcacgcggaaatacacgctgccccccggtgtggaccccacccaagtttcctcctccctgtcccctgagggcacactgaccgtggaggcccccatgcccaagctagccacgcagtccaacgagatcaccatcccagtcaccttcgagtcgcgggcccagcttgggggcccagaagctgcaaaatccgatgagactgccgccaagtaaagccttagcccggatgcccacccctgctgccgccactggctgtgcctcccccgccacctgtgtgttcttttgatacatttatcttctgtttttctcaaataaagttcaaagcaaccacctaaaaaaaaacacaaaaaaaaataaaaaaaaaaaaaaaaaactgnggttttttgnggnggnnaaaaaatanaannnnggnnaatntttccncncctttntaaaggnaaacgggcccaaagagggtaaataaagagaga

SEQ ID NO: 444180 - DNA, 1355 bp, Homo sapiens
  misc_feature (1353)..(1353): n is a, c, g, or t
ggctggaggacaaaacttaggctaggtacgaggctgggtgttaatcggccgagggcataaaagcgcagccgagcccagcgccccgcacttttctgagcagacgtccagagcagagtcagccagcatgaccgagcgccgcgtccccttctcgctcctgcggggccccagctgggaccccttccgcgactggtacccgcatagccgcctcttcgaccaggccttcgggctgccccggctgccggaggagtggtcgcagtggttaggcggcagcagctggccaggctacgtgcgccccctgccccccgccgccatcgagagccccgcagtggccgcgcccgcctacagccgcgcgctcagccggcaactcagcagcggggtctcggagatccggcacactgcggaccgctggcgcgtgtccctggatgtcaaccacttcgccccggacgagctgacggtcaagaccaaggatggcgtggtggagatcaccggcaagcacgaggagcggcaggacgagcatggctacatctcccggtgcttcacgcggaaatacacgctgccccccggtgtggaccccacccaagtttcctcctccctgtcccctgagggcacactgaccgtggaggcccccatgcccaagctagccacgcagtccaacgagatcaccatcccagtcaccttcgagtcgcgggcccagcttgggggcccagaagctgcaaaatccgatgagactgccgccaagtaaagccttagcccggatgcccacccctgctgccgccactggctgtgcctcccccgccacctgtgtgttcttttgatacatttatcttctgtttttctcaaataaagttcaaagcaaccacctcctgtcactggcccaggcctggtgtttgtggaaggaagcctcaggcacctgccatttgctggctttcaggagtcatctttgctcaggcccgtgctgggccatgtgggtacactggtgtaggttgctggacacaggctgactcacatccataaagacagaggtcttagggccgggcgcagtggctcatacctacaatcccagcactttggggggttgaagcaggaggagtgcttgaagccaagagttctagaccagcctggacaacatagtaagactgtctctaaaaaataaaaattaggcagggtggtactgcacgcctgtagtcccagctactcaggaggctgaggcaggaggatcgcttgagcccaggagttgtgaagggtacagtgagctaacatcgtgccattgcactccagcctgggcaacagaacaagatcctgtctcaaaacaaccaaaagcccagagagaaagagtgagaccccatctttaanag

SEQ ID NO: 444181 - DNA, 1009 bp, Homo sapiens
ggctggaggacaaaacttaggctaggtacgaggctgggtgttaatcggccgagggcataaaagcgcagccgagcccagcgccccgcacttttctgagcagacgtccagagcagagtcagccagcatgaccgagcgccgcgtccccttctcgctcctgcggggccccagctgggaccccttccgcgactggtacccgcatagccgcctcttcgaccaggccttcgggctgccccggctgccggaggagtggtcgcagtggttaggcggcagcagctggccaggctacgtgcgccccctgccccccgccgccatcgagagccccgcagtggccgcgcccgcctacagccgcgcgctcagccggcaactcagcagcggggtctcggagatccggcacactgcggaccgctggcgcgtgtccctggatgtcaaccacttcgccccggacgagctgacggtcaagaccaaggatggcgtggtggagatcaccggcaagcacgaggagcggcaggacgagcatggctacatctcccggtgcttcacgcggaaatacacgctgccccccggtgtggaccccacccaagtttcctcctccctgtcccctgagggcacactgaccgtggaggcccccatgcccaagctagccacgcagtccaacgagatcaccatcccagtcaccttcgagtcgcgggcccagcttgggggcccagaagctgcaaaatccgatgagactgccgccaagtaaagccttagcccggatgcccacccctgctgccgccactggctgtgcctcccccgccacctgtgtgttcttttgatacatttatcttctgtttttctcaaataaagttcaaagcaaccacctaaaaaaaaaaaaaaaaaactcgaaaagtctgagtaaagctgttttttgtattttatatttgcttctgccattttactgtcactaattaatgtttagttcttatatttgttaactgatttcggtgtcttgaatatatttttttaaatt

SEQ ID NO: 444182 - DNA, 1007 bp, Homo sapiens
ggctggaggacaaaacttaggctaggtacgaggctgggtgttaatcggccgagggcataaaagcgcagccgagcccagcgccccgcacttttctgagcagacgtccagagcagagtcagccagcatgaccgagcgccgcgtccccttctcgctcctgcggggccccagctgggaccccttccgcgactggtacccgcatagccgcctcttcgaccaggccttcgggctgccccggctgccggaggagtggtcgcagtggttaggcggcagcagctggccaggctacgtgcgccccctgccccccgccgccatcgagagccccgcagtggccgcgcccgcctacagccgcgcgctcagccggcaactcagcagcggggtctcggagatccggcacactgcggaccgctggcgcgtgtccctggatgtcaaccacttcgccccggacgagctgacggtcaagaccaaggatggcgtggtggagatcaccggcaagcacgaggagcggcaggacgagcatggctacatctcccggtgcttcacgcggaaatacacgctgccccccggtgtggaccccacccaagtttcctcctccctgtcccctgagggcacactgaccgtggaggcccccatgcccaagctagccacgcagtccaacgagatcaccatcccagtcaccttcgagtcgcgggcccagcttgggggcccagaagctgcaaaatccgatgagactgccgccaagtaaagccttagcccggatgcccacccctgctgccgccactggctgtgcctcccccgccacctgtgtgttcttttgatacatttatcttctgtttttctcaaataaagttcaaagcaaccacctaaaaaaaaacaaagcacacaacagaaaaaaaaaaaaaaaccgggggccatattaggcgggggaaaacgaggttaaaaccacgtgttacattttcccgaccacttttttaaaaggggaatggcgcgccaaaaggggaaaatgaacg

SEQ ID NO: 444183 - DNA, 1202 bp, Homo sapiens
ggctggaggacaaaacttaggctaggtacgaggctgggtgttaatcggccgagggcataaaagcgcagccgagcccagcgccccgcacttttctgagcagacgtccagagcagagtcagccagcatgaccgagcgccgcgtccccttctcgctcctgcggggccccagctgggaccccttccgcgactggtacccgcatagccgcctcttcgaccaggccttcgggctgccccggctgccggaggagtggtcgcagtggttaggcggcagcagctggccaggctacgtgcgccccctgccccccgccgccatcgagagccccgcagtggccgcgcccgcctacagccgcgcgctcagccggcaactcagcagcggggtctcggagatccggcacactgcggaccgctggcgcgtgtccctggatgtcaaccacttcgccccggacgagctgacggtcaagaccaaggatggcgtggtggagatcaccggcaagcacgaggagcggcaggacgagcatggctacatctcccggtgcttcacgcggaaatacacgctgccccccggtgtggaccccacccaagtttcctcctccctgtcccctgagggcacactgaccgtggaggcccccatgcccaagctagccacgcagtccaacgagatcaccatcccagtcaccttcgagtcgcgggcccagcttgggggcccagaagctgcaaaatccgatgagactgccgccaagtaaagccttagcccggatgcccacccctgctgccgccactggctgtgcctcccccgccacctgtgtgttcttttgatacatttatcttctgtttttctcaaataaagttcaaagcaaccacctaaaaaaacaacaaaaaaaaaaaaaaccaaaacacaacaaaaaaacaaacaaagggtgagaggacagaaaagacaacacgagagaggacacaaaagacagagagagatacaaaaaaaaagacaaacagagggagacagaaagaaagaagagaaaaaaacagcacaaagcgcgagaacaacaaggagagaaaaacagaaaaaaaaacaaagcacacaacagaaaaaaaaaaaaaaaccgggggccatattaggcgggggaaaacgaggttaaaaccacgtgttacattttcccgaccacttttttaaaaggggaatggcgcgccaaaaggggaaaatgaacg

SEQ ID NO: 444184 - DNA, 1560 bp, Homo sapiens
cggacgcgtgggtcgacccacgcgtccgcataaaagcgcagccgagcccagcgccccgcacttttctgagcagacgtccagagcagagtcagccagcatgaccgagcgccgcgtccccttctcgctcctgcggggccccagctgggaccccttccgcgactggtacccgcatagccgcctcttcgaccaggccttcgggctgccccggctgccggaggagtggtcgcagtggttaggcggcagcagctggccaggctacgtgcgccccctgccccccgccgccatcgagagccccgcagtggccgcgcccgcctacagccgcgcgctcagccggcaactcagcagcggggtctcggagatccggcacactgcggaccgctggcgcgtgtccctggatgtcaaccacttcgccccggacgagctgacggtcaagaccaaggatggcgtggtggagatcaccggtgagcccccctgctcctgcaggggagaggaggaggctagcagggcgggcagggccgggggcgtgcggttgaaacgggggtcccgggggcctggggagttaaacgttggcccagcaccgggaaaaacaggactcctgattcccttgctcaggaattgggagtgcgggtcgcttctaagggcgctttctgctctgtaatcccagcgctttgggaggccgagacgggaggatcgcttgaggccaggagttcaagactagcctgggcaacatagcgagacgcgcccccccgccccgaccccgcgccattacaaaaaaaaagcaaacaaaaatttttttaaagatcatcgatgaagagagaaaatgcgcttttctacagagtccccttcccacccacagccccatccccagataagcggggagttccctggcgcggtgccagtttctagccgctgagtgggcgtgtgcgcggctccaagtgcgcctgcgtactgctcactccccagctccgcgccctgctccgttcctcccaaaactctgaatcgaagaactttccggaagtttctgagagcccagaccggcgggcacgcccccatccccaaccccctctgttaatccctaccagcctgcagtcctggctgcttccaagcaggaggtggggcctctggcctagcggggccgaaaggcagtcccctcccccgcagtctgatttccctcttccccccaaaggcaagcacgaggagcggcaggacgagcatggctacatctcccggtgcttcacgcggaaatacacgctgccccccggtgtggaccccacccaagtttcctcctccctgtcccctgagggcacactgaccgtggaggcccccatgcccaagctagccacgcagtccaacgagatcaccatcccagtcaccttcgagtcgcgggcccagcttgggggcccagaagctgcaaaatccgatgagactgccgccaagtaaagccttagcccggatgcccacccctgctgccgccactggctgtgcctcccccgccacctgtgtgttcttttgatacatttatcttctgtttttctcaaataaagttcaaagcaaccacct

SEQ ID NO: 444185 - DNA, 1486 bp, Homo sapiens
cggacgcgtgggtcgacccacgcgtccgcataaaagcgcagccgagcccagcgccccgcacttttctgagcagacgtccagagcagagtcagccagcatgaccgagcgccgcgtccccttctcgctcctgcggggccccagctgggaccccttccgcgactggtacccgcatagccgcctcttcgaccaggccttcgggctgccccggctgccggaggagtggtcgcagtggttaggcggcagcagctggccaggctacgtgcgccccctgccccccgccgccatcgagagccccgcagtggccgcgcccgcctacagccgcgcgctcagccggcaactcagcagcggggtctcggagatccggcacactgcggaccgctggcgcgtgtccctggatgtcaaccacttcgccccggacgagctgacggtcaagaccaaggatggcgtggtggagatcaccggtgagcccccctgctcctgcaggggagaggaggaggctagcagggcgggcagggccgggggcgtgcggttgaaacgggggtcccgggggcctggggagttaaacgttggcccagcaccgggaaaaacaggactcctgattcccttgctcaggaattgggagtgcgggtcgcttctaagggcgctttctgctctgtaatcccagcgctttgggaggccgagacgggaggatcgcttgaggccaggagttcaagactagcctgggcaacatagcgagacgcgcccccccgccccgaccccgcgccattacaaaaaaaaagcaaacaaaaatttttttaaagatcatcgatgaagagagaaaatgcgcttttctacagagtccccttcccacccacagccccatccccagataagcggggagttccctggcgcggtgccagtttctagccgctgagtgggcgtgtgcgcggctccaagtgcgcctgcgtactgctcactccccagctccgcgccctgctccgttcctcccaaaactctgaatcgaagaactttccggaagtttctgagagcccagaccggcgggcacgcccccatccccaaccccctctgttaatccctaccagcctgcagtcctggctgcttccaagcaggaggcaagcacgaggagcggcaggacgagcatggctacatctcccggtgcttcacgcggaaatacacgctgccccccggtgtggaccccacccaagtttcctcctccctgtcccctgagggcacactgaccgtggaggcccccatgcccaagctagccacgcagtccaacgagatcaccatcccagtcaccttcgagtcgcgggcccagcttgggggcccagaagctgcaaaatccgatgagactgccgccaagtaaagccttagcccggatgcccacccctgctgccgccactggctgtgcctcccccgccacctgtgtgttcttttgatacatttatcttctgtttttctcaaataaagttcaaagcaaccacct

SEQ ID NO: 444186 - DNA, 1510 bp, Homo sapiens
cggacgcgtgggtcgacccacgcgtccccagagcagagtcagccagcatgaccgagcgccgcgtccccttctcgctcctgcggggccccagctgggaccccttccgcgactggtacccgcatagccgcctcttcgaccaggccttcgggctgccccggctgccggaggagtggtcgcagtggttaggcggcagcagctggccaggctacgtgcgccccctgccccccgccgccatcgagagccccgcagtggccgcgcccgcctacagccgcgcgctcagccggcaactcagcagcggggtctcggagatccggcacactgcggaccgctggcgcgtgtccctggatgtcaaccacttcgccccggacgagctgacggtcaagaccaaggatggcgtggtggagatcaccggtgagcccccctgctcctgcaggggagaggaggaggctagcagggcgggcagggccgggggcgtgcggttgaaacgggggtcccgggggcctggggagttaaacgttggcccagcaccgggaaaaacaggactcctgattcccttgctcaggaattgggagtgcgggtcgcttctaagggcgctttctgctctgtaatcccagcgctttgggaggccgagacgggaggatcgcttgaggccaggagttcaagactagcctgggcaacatagcgagacgcgcccccccgccccgaccccgcgccattacaaaaaaaaagcaaacaaaaatttttttaaagatcatcgatgaagagagaaaatgcgcttttctacagagtccccttcccacccacagccccatccccagataagcggggagttccctggcgcggtgccagtttctagccgctgagtgggcgtgtgcgcggctccaagtgcgcctgcgtactgctcactccccagctccgcgccctgctccgttcctcccaaaactctgaatcgaagaactttccggaagtttctgagagcccagaccggcgggcacgcccccatccccaaccccctctgttaatccctaccagcctgcagtcctggctgcttccaagcaggaggtggggcctctggcctagcggggccgaaaggcagtcccctcccccgcagtctgatttccctcttccccccaaaggcaagcacgaggagcggcaggacgagcatggctacatctcccggtgcttcacgcggaaatacacgctgccccccggtgtggaccccacccaagtttcctcctccctgtcccctgagggcacactgaccgtggaggcccccatgcccaagctagccacgcagtccaacgagatcaccatcccagtcaccttcgagtcgcgggcccagcttgggggcccagaagctgcaaaatccgatgagactgccgccaagtaaagccttagcccggatgcccacccctgctgccgccactggctgtgcctcccccgccacctgtgtgttcttttgatacatttatcttctgtttttctcaaataaagttcaaagcaaccacct

SEQ ID NO: 444187 - DNA, 798 bp, Homo sapiens
cggacgcgtgggtcgacccacgcgtccgcataaaagcgcagccgagcccagcgccccgcacttttctgagcagacgtccagagcagagtcagccagcatgaccgagcgccgcgtccccttctcgctcctgcggggccccagctgggaccccttccgcgactggtacccgcatagccgcctcttcgaccaggccttcgggctgccccggctgccggaggagtggtcgcagtggttaggcggcagcagctggccaggctacgtgcgccccctgccccccgccgccatcgagagccccgcagtggccgcgcccgcctacagccgcgcgctcagccggcaactcagcagcggggtctcggagatccggcacactgcggaccgctggcgcgtgtccctggatgtcaaccacttcgccccggacgagctgacggtcaagaccaaggatggcgtggtggagatcaccggcaagcacgaggagcggcaggacgagcatggctacatctcccggtgcttcacgcggaaatacacgctgccccccggtgtggaccccacccaagtttcctcctccctgtcccctgagggcacactgaccgtggaggcccccatgcccaagctagccacgcagtccaacgagatcaccatcccaaagctgcaaaatccgatgagactgccgccaagtaaagccttagcccggatgcccacccctgctgccgccactggctgtgcctcccccgccacctgtgtgttcttttgatacatttatcttctgtttttctcaaataaagttcaaagcaaccacct

SEQ ID NO: 444188 - DNA, 1723 bp, Homo sapiens
cggacgcgtgggtcgacccacgcgtccgcataaaagcgcagccgagcccagcgccccgcacttttctgagcagacgtccagagcagagtcagccagcatgaccgagcgccgcgtccccttctcgctcctgcggggccccagctgggaccccttccgcgactggtacccgcatagccgcctcttcgaccaggccttcgggctgccccggctgccggaggagtggtcgcagtggttaggcggcagcagctggccaggctacgtgcgccccctgccccccgccgccatcgagagccccgcagtggccgcgcccgcctacagccgcgcgctcagccggcaactcagcagcggggtctcggagatccggcacactgcggaccgctggcgcgtgtccctggatgtcaaccacttcgccccggacgagctgacggtcaagaccaaggatggcgtggtggagatcaccggtgagcccccctgctcctgcaggggagaggaggaggctagcagggcgggcagggccgggggcgtgcggttgaaacgggggtcccgggggcctggggagttaaacgttggcccagcaccgggaaaaacaggactcctgattcccttgctcaggaattgggagtgcgggtcgcttctaagggcgctttctgctctgtaatcccagcgctttgggaggccgagacgggaggatcgcttgaggccaggagttcaagactagcctgggcaacatagcgagacgcgcccccccgccccgaccccgcgccattacaaaaaaaaagcaaacaaaaatttttttaaagatcatcgatgaagagagaaaatgcgcttttctacagagtccccttcccacccacagccccatccccagataagcggggagttccctggcgcggtgccagtttctagccgctgagtgggcgtgtgcgcggctccaagtgcgcctgcgtactgctcactccccagctccgcgccctgctccgttcctcccaaaactctgaatcgaagaactttccggaagtttctgagagcccagaccggcgggcacgcccccatccccaaccccctctgttaatccctaccagcctgcagtcctggctgcttccaagcaggaggtggggcctctggcctagcggggccgaaaggcagtcccctcccccgcagtctgatttccctcttccccccaaaggcaagcacgaggagcggcaggacgagcatggctacatctcccggtgcttcacgcggaaatacaccgtgagtcctggcgccaggtcggggtgggtgggtggcgtgggggtattgttaatgttttttaatgttatgatgtactggttggagactgtatattgttatattagtaactcttgtcctctcctgctccgctcagtactttctcatccgcgtcctccccttttctcccttagtcctcggtacactgatctctccgtcgatcttcccctcctagctggtccatttccttccatcgttcctcccacttctctacgctctagcggcatcagccccagccactcccttcccgctaccgtctcgtttcttcatccgcatatcacttatcctcgcaccgaccgcttctgcagtatctcctactccatcgtctgcctctcgctctcggtgaactctggctagctccatttgtctccacatgcttgccctgcgtggagtctgacgtccatagacctttccttccctttccttctcttttgtc

SEQ ID NO: 444189 - DNA, 1675 bp, Homo sapiens
ggctggaggacaaaacttaggctaggtacgaggctgggtgttaatcggccgagggcataaaagcgcagccgagcccagcgccccgcacttttctgagcagacgtccagagcagagtcagccagcatgaccgagcgccgcgtccccttctcgctcctgcggggccccagctgggaccccttccgcgactggtacccgcatagccgcctcttcgaccaggccttcgggctgccccggctgccggaggagtggtcgcagtggttaggcggcagcagctggccaggctacgtgcgccccctgccccccgccgccatcgagagccccgcagtggccgcgcccgcctacagccgcgcgctcagccggcaactcagcagcggggtctcggagatccggcacactgcggaccgctggcgcgtgtccctggatgtcaaccacttcgccccggacgagctgacggtcaagaccaaggatggcgtggtggagatcaccggcaagcacgaggagcggcaggacgagcatggctacatctcccggtgcttcacgcggaaatacacctgccccccggtgtggactcgccatccgcaatgtttctcatcgcttcacgctgtcctccatgaggtggtcgagcatcgtgaccgatggatggccgcgcacgatgccacaaaagcttgagcacacgcctagtccgatacgagatccactcattctccaaggtctagcctatcgcagctcagcagggcaccgacgcttgggcggccgcagaaaggcctggcagatacatcctgaagtgaggacgtgcgcagcacgagatggtaaagatgccctttagcccccgggggaatgcgtcgcgactcgccctgtcttagcacgggcacaacctaggtgtaggtgcccttcgcgcccacgggccaggcatggtggttgtaacattgggtggagtaacaaattttttctcgtcttgataagcgtggtctaaagcgttaaagccggtttcaacaaacgtacattaggccaacggacccatggcaggggaattgacgaaatttccacgaagagtgagtggagcggcggacgtgaaaaatgggtattccgctcaagccgtgtcgggcgcaaaataaccttaaagaagcgcttgtcctccaagtgttttacgggatttgggcccccgttgtggagcccctcctgaatgaattgaggcgcgatccgattaactagaagaaagacttggcgtggcgaaagggggccgagggaatgatgaccacgggaagtctcgtctttggcgctttcgtatacccacacaggggtttatcccttgccgcaatgaaaaccgtgggagagggggagaaaccctaatattcttggccaattttcgagtttcccacctcctggaggtttggagtaaaccacgaattttcccgtattaaagagggggaagcattttttatcaatggacttctaaaaaagaagcggaggagataagataataacgataggtatggatttaggaaccaaggggataaaagttcgagggtgaaaaaacactttgcgttcgagaggaaattcagagccgaattggaagcgcgtttgcagaattaagattaaggttggcaacaaggagagagtctaatagattggatatgggaaggataatagttttattcctaaggcaagggggta

SEQ ID NO: 444190 - DNA, 803 bp, Homo sapiens
ggctggaggacaaaacttaggctaggtacgaggctgggtgttaatcggccgagggcataaaagcgcagccgagcccagcgccccgcacttttctgagcagacgtccagagcagagtcagccagcatgaccgagcgccgcgtccccttctcgctcctgcggggccccagctgggaccccttccgcgactggtacccgcatagccgcctcttcgaccaggccttcgggctgccccggctgccggaggagtggtcgcagtggttaggcggcagcagctggccaggctacgtgcgccccctgccccccgccgccatcgagagccccgcagtggccgcgcccgcctacagccgcgcgctcagccggcaactcagcagcggggtctcggagatccggcacactgcggaccgctggcgcgtgtccctggatgtcaaccacttcgccccggacgagctgacggtcaagaccaaggatggcgtggtggagatcaccggcaagcacgaggagcggcaggacgagcatggctacatctcccggtgcttcacgcggaaatacactctccaccagccatccgttggtctcacccggcaactcagcagcggggatgtcggagatccggcacactgccggagcgagggcgcgtgtccctggatgtcaaccacttcgaccgcggacgacgctgacggtcaagaccaaggatggcgtggcgcagatcaccggccaagagcccgaggcagcgcgaggacgagcaatggctacgatctgcccggagctccgacagcggcaaacacaggctggcgcccacggg

SEQ ID NO: 444191 - DNA, 565 bp, Homo sapiens
cggacgcgtgggtcgacccacgcgtccgcataaaagcgcagccgagcccagcgccccgcacttttctgagcagacgtccagagcagagtcagccagcatgaccgagcgccgcgtccccttctcgctcctgcggggccccagctgggaccccttccgcgactggtacccgcatagccgcctcttcgaccaggccttcgggctgccccggctgccggaggagtggtcgcagtggttaggcggcagcagctggccaggctacgtgcgccccctgccccccgccgccatcgagagccccgcagtggccgcgcccgcctacagccgcgcgctcagccggcaactcagcagcggggtctcggagatccggcacactgcggaccgctggcgcgtgtccctggatgtcaaccacttcgccccggacgagctgacggtcaagaccaaggatggcgtggtggagatcaccgcccacccctgctgccgccactggctgtgcctcccccgccacctgtgtgttcttttgatacatttatcttctgtttttctcaaataaagttcaaagcaaccacct

SEQ ID NO: 444192 - DNA, 385 bp, Homo sapiens
cggacgcgtgggtcgacccacgcgtccgcataaaagcgcagccgagcccagcgccccgcacttttctgagcagacgtccagagcagagtcagccagcatgaccgagcgccgcgtccccttctcgctcctgcggggccccagctgggaccccttccgcgactggtacccgcatagccgcctcttcgaccaggccttcgggctgccccggctgccggaggagtggtcgcagtggttaggcggcagcagctggccaggctacgtgcgccccctgccccccgccgccatcgagagccccgcagtggcgctgtgcctcccccgccacctgtgtgttcttttgatacatttatcttctgtttttctcaaataaagttcaaagcaaccacct

SEQ ID NO: 444193 - DNA, 414 bp, Homo sapiens
cggacgcgtgggtcgacccacgcgtccgcataaaagcgcagccgagcccagcgccccgcacttttctgagcagacgtccagagcagagtcagccagcatgaccgagcgccgcgtccccttctcgctcctgcggggccccagctgggaccccttccgcgactggtacccgcatagccgcctcttcgaccaggccttcgggctgccccggctgccggaggagtggtcgcagtggttaggcggcagcagctggccaggctacaagctgcaaaatccgatgagactgccgccaagtaaagccttagcccggatgcccacccctgctgccgccactggctgtgcctcccccgccacctgtgtgttcttttgatacatttatcttctgtttttctcaaataaagttcaaagcaaccacct

SEQ ID NO: 444194 - DNA, 683 bp, Homo sapiens
tggggggggctttgaactttatttgagaaaaacagaagataaatgtatcaaaagaacacacaggtggcgggggaggcacagccagtggcggcagcaggggggggcatccgggctaaggctttacttggcggcagtctcatcggattttgcagcccagctgggaccccttccgcgactggtacccgcatagccgcctcttcgaccaggccttcgggctgccccggctgccggaggagtggtcgcagtggttaggcggcagcagctggccaggctacgtgcgccccctgccccccgccgccatcgagagccccgcagtggccgcgcccgcctacagccgcgcgctcagccggcaactcagcagcggggtctcggagatccggcacactgcggaccgctggcgcgtgtccctggatgtgtcccctgagggcacactgaccgtggaggcccccatgcccaagctagccacgcagtccaacgagatcaccatcccagtcaccttcgagtcgcgggcccagcttgggggcccagaagctgcaaaatccgatgagactgccgccaagtaaagccttagcccggatgcccacccctgctgccgccactggctgtgcctcccccgccacctgtgtgttcttttgatacatttatcttctgtttttctcaaataaagttcaaagcaaccacct

SEQ ID NO: 444195 - DNA, 812 bp, Homo sapiens
ggctggaggacaaaacttaggctaggtacgaggctgggtgttaatcggccgaggccagagcagagtcagccagcatgaccgagcgccgcgtccccttctcgctcctgcggggccccagctgggaccccttccgcgactggtacccgcatagccgcctcttcgaccaggccttcgggctgccccggctgccggaggagtggtcgcagtggttaggcggcagcagctggccaggctacgtgcgccccctgccccccgccgccatcgagagccccgcagtggccgcgcccgcctacagccgcgcgctcagccggcaactcagcagcggggtctcggagatccggcacactgcggaccgctggcgcgtgtccctggatgtcaaccacttcgccccggacgagctgacggtcaagaccaaggatggcgtggtggagatcaccggcaagcacgaggagcggcaggacgagcatggctacatctcccggtgcttcacgcggaaatacacgctgccccccggtgtggaccccacccaagtttcctcctccctgtcccctgagggcacactgaccgtggaggcccccatgcccaagctagccacgcagtccaacgagatcaccatcccagtcaccttcgagtcgcgggcccagcttgggggcccagaagctgcaaaatccgatgagactgccgccaagtaaagccttagcccggatgcccacccctgctgccgccactggctgtgcctcccccgccacctgtgtgttcttttgatacatttatcttctgtttttctcaaataaagttcaaagcaaccacct

SEQ ID NO: 444196 - DNA, 982 bp, Homo sapiens
taggaccaggacggccggcaggaaaacaggaaactccagtcccagagcagcgggcagaagaccgtccccaggatgtgggcacttctcgccagagggtcctgagcctggggcgcactcttctggtttgggagacctcaaacaccgcctgctaaaaatacccgactggaggagcataaaagcgcagccgagcccagcgccccgcacttttctgagcagacgtccagagcagagtcagccagcatgaccgagcgccgcgtccccttctcgctcctgcggggccccagctgggaccccttccgcgactggtacccgcatagccgcctcttcgaccaggccttcgggctgccccggctgccggaggagtggtcgcagtggttaggcggcagcagctggccaggctacgtgcgccccctgccccccgccgccatcgagagccccgcagtggccgcgcccgcctacagccgcgcgctcagccggcaactcagcagcggggtctcggagatccggcacactgcggaccgctggcgcgtgtccctggatgtcaaccacttcgccccggacgagctgacggtcaagaccaaggatggcgtggtggagatcaccggcaagcacgaggagcggcaggacgagcatggctacatctcccggtgcttcacgcggaaatacacgctgccccccggtgtggaccccacccaagtttcctcctccctgtcccctgagggcacactgaccgtggaggcccccatgcccaagctagccacgcagtccaacgagatcaccatcccagtcaccttcgagtcgcgggcccagcttgggggcccagaagctgcaaaatccgatgagactgccgccaagtaaagccttagcccggatgtgcgacactggctgtgcttccccggcactgtgtgtcctttggaaccctgtagtcctcggagcctcacataaaggtcaaggaccaagaaaacgccacaacgacaacaag

SEQ ID NO: 444197 - DNA, 862 bp, Homo sapiens
ggctggaggacaaaacttaggctaggtacgaggctgggtgttaatcggccgagggcataaaagcgcagccgagcccagcgccccgcacttttctgagcagacgtccagagcagagtcagccagcatgaccgagcgccgcgtccccttctcgctcctgcggggccccagctgggaccccttccgcgactggtacccgcatagccgcctcttcgaccaggccttcgggctgccccggctgccggaggagtggtcgcagtggttaggcggcagcagctggccaggctacgtgcgccccctgccccccgccgccatcgagagccccgcagtggccgcgcccgcctacagccgcgcgctcagccggcaactcagcagcggggtctcggagatccggcacactgcggaccgctggcgcgtgtccctggatgtcaaccacttcgccccggacgagctgacggtcaagaccaaggatggcgtggtggagatcaccggcaagcacgaggagcggcaggacgagcatggctacatctcccggtgcttcacgcggaaatacacgctgccccccggtgtggaccccacccaagtttcctcctccctgtcccctgagggcacactgaccgtggaggcccccatgcccaagctagccacgcagtccaacgagatcaccatcccagtcaccttcgagtcgcgggcccagcttgggggcccagaagctgcaaaatccgatgagactgccgccaagtaaagccttagcccggatgcccacccctgctgccgccactggctgtgcctcccccgccacctgtgtgttcttttgatacatttatcttctgtttttctcaaataaagttcaaagcaaccacct

SEQ ID NO: 444198 - DNA, 710 bp, Homo sapiens
cggacgcgtgggtcgacccacgcgtccgcataaaagcgcagccgagcccagcgccccgcacttttctgagcagacgtccagagcagagtcagccagcatgaccgagcgccgcgtccccttctcgctcctgcggggccccagctgggaccccttccgcgactggtacccgcatagccgccgcgcccgcctacagccgcgcgctcagccggcaactcagcagcggggtctcggagatccggcacactgcggaccgctggcgcgtgtccctggatgtcaaccacttcgccccggacgagctgacggtcaagaccaaggatggcgtggtggagatcaccggcaagcacgaggagcggcaggacgagcatggctacatctcccggtgcttcacgcggaaatacacgctgccccccggtgtggaccccacccaagtttcctcctccctgtcccctgagggcacactgaccgtggaggcccccatgcccaagctagccacgcagtccaacgagatcaccatcccagtcaccttcgagtcgcgggcccagcttgggggcccagaagctgcaaaatccgatgagactgccgccaagtaaagccttagcccggatgcccacccctgctgccgccactggctgtgcctcccccgccacctgtgtgttcttttgatacatttatcttctgtttttctcaaataaagttcaaagcaaccacct

SEQ ID NO: 444199 - DNA, 903 bp, Homo sapiens
ggctggaggacaaaacttaggctaggtacgaggctgggtgttaatcggccgagggcataaaagcgcagccgagcccagcgccccgcacttttctgagcagacgtccagagcagagtcagccagcatgaccgagcgccgcgtccccttctcgctcctgcggggccccagctgggaccccttccgcgactggtacccgcatagccgcctcttcgaccaggccttcgggctgccccggctgccggaggagtggtcgcagtggttaggcggcagcagctggccaggctacgtgcgccccctgccccccgccgccatcgagagccccgcagtggccgcgcccgcctacagccgcgcgctcagccggcaactcagcagcggggtctcggagatccggcacactgcggaccgctggcgcgtgtccctggatgtcaaccacttcgccccggacgagctgacggtcaagaccaaggatggcgtggtggagatcaccggcaagcacgaggagcggcaggacgagcatggctacatctcccggtgcttcacgcggaaatacacgctgccccccggtgtggaccccacccaagtttcctcctccctgtcccctgagggcacactgaccgtggaggcccccatgcccaagctagccacgcagtccaacgagatcaccatcccagtcaccttcgagtcgcgggcccagcttgggggcccagaagctgcaaaatccgatgagactgccgccaagtaaagccttagcccggatgcccacccctgctgccgccactggctgtgcctcccccgccacctgtgtgttcttttgatacatttatcttctgtttttctcaaataaagttcaaagcaaccacctaaaaaaccaccacaccgactaccaatacaacacacaagcgc

SEQ ID NO: 444200 - DNA, 1216 bp, Homo sapiens
ggctggaggacaaaacttaggctaggtacgaggctgggtgttaatcggccgagggcataaaagcgcagccgagcccagcgccccgcacttttctgagcagacgtccagagcagagtcagccagcatgaccgagcgccgcgtccccttctcgctcctgcggggccccagctgggaccccttccgcgactggtacccgcatagccgcctcttcgaccaggccttcgggctgccccggctgccggaggagtggtcgcagtggttaggcggcagcagctggccaggctacgtgcgccccctgccccccgccgccatcgagagccccgcagtggccgcgcccgcctacagccgcgcgctcagccggcaactcagcagcggggtctcggagatccggcacactgcggaccgctggcgcgtgtccctggatgtcaaccacttcgccccggacgagctgacggtcaagaccaaggatggcgtggtggagatcaccggcaagcacgaggagcggcaggacgagcatggctacatctcccggtgcttcacgcggaaatacacgctgccccccggtgtggaccccacccaagtttcctcctccctgtcccctgagggcacactgaccgtggaggcccccatgcccaagctagccacgcagtccaacgagatcaccatcccagtcaccttcgagtcgcgggcccagcttgggggcccagaagctgcaaaatccgatgagactgccgccaagtaaagccttagcccggatgcccacccctgctgccgccactggctgtgcctcccccgccacctgtgtgttcttttgatacatttatcttctgtttttctcaaataaagttcaaagcaaccacctaaaaaaaaaaaaaaaaaactggcatctctctttggcctgaggttctgtattctgggaaaggtacacagggtggagtagggagaagctgccccaggaggcgatgtagtggtggaaagaagaggcagagaggtcgtcgtcgtcgcccagcagcaagggctgcaaaatagtagaactcgtggttgctttggacaggtgtgatttgtgcaagccaggttcaacccttgcctcaagaaatcagatgggaccaatttagtgtccttccacctgtgagccaagcccccatttgaggacatctatcgtattcttgtgtgctgggtctcaaatagaatttttaaagattcttaaaaaaaaaaa

SEQ ID NO: 444201 - DNA, 1124 bp, Homo sapiens
ggctggaggacaaaacttaggctaggtacgaggctgggtgttaatcggccgagggcataaaagcgcagccgagcccagcgccccgcacttttctgagcagacgtccagagcagagtcagccagcatgaccgagcgccgcgtccccttctcgctcctgcggggccccagctgggaccccttccgcgactggtacccgcatagccgcctcttcgaccaggccttcgggctgccccggctgccggaggagtggtcgcagtggttaggcggcagcagctggccaggctacgtgcgccccctgccccccgccgccatcgagagccccgcagtggccgcgcccgcctacagccgcgcgctcagccggcaactcagcagcggggtctcggagatccggcacactgcggaccgctggcgcgtgtccctggatgtcaaccacttcgccccggacgagctgacggtcaagaccaaggatggcgtggtggagatcaccggcaagcacgaggagcggcaggacgagcatggctacatctcccggtgcttcacgcggaaatacacgctgccccccggtgtggaccccacccaagtttcctcctccctgtcccctgagggcacactgaccgtggaggcccccatgcccaagctagccacgcagtccaacgagatcaccatcccagtcaccttcgagtcgcgggcccagcttgggggcccagaagctgcaaaatccgatgagactgccgccaagtaaagccttagcccggatgcccacccctgctgccgccactggctgtgcctcccccgccacctgtgtgttcttttgatacatttatcttctgtttttctcaaataaagttcaaagcaaccacctaaaaaaaaaaaaaatcgtgcatctagcggggcggaacagagtacgaaagggctggcaaacggtcccgcaccgttggtgtaccaggggaaatgcggaccccaaaggaggggaaaattgaaagcggaataatactatagaatacgaagacaagagaagaaacgaaatagagaacaagaaactaaacaaacaagataatagacagacaaagaaaaacaatacatcataaacaatgatatactcgtacgaagcgaataaacgagaa

SEQ ID NO: 444202 - DNA, 1089 bp, Homo sapiens
ggctggaggacaaaacttaggctaggtacgaggctgggtgttaatcggccgagggcataaaagcgcagccgagcccagcgccccgcacttttctgagcagacgtccagagcagagtcagccagcatgaccgagcgccgcgtccccttctcgctcctgcggggccccagctgggaccccttccgcgactggtacccgcatagccgcctcttcgaccaggccttcgggctgccccggctgccggaggagtggtcgcagtggttaggcggcagcagctggccaggctacgtgcgccccctgccccccgccgccatcgagagccccgcagtggccgcgcccgcctacagccgcgcgctcagccggcaactcagcagcggggtctcggagatccggcacactgcggaccgctggcgcgtgtccctggatgtcaaccacttcgccccggacgagctgacggtcaagaccaaggatggcgtggtggagatcaccggcaagcacgaggagcggcaggacgagcatggctacatctcccggtgcttcacgcggaaatacacgctgccccccggtgtggaccccacccaagtttcctcctccctgtcccctgagggcacactgaccgtggaggcccccatgcccaagctagccacgcagtccaacgagatcaccatcccagtcaccttcgagtcgcgggcccagcttgggggcccagaagctgcaaaatccgatgagactgccgccaagtaaagccttagcccggatgcccacccctgctgccgccactggctgtgcctcccccgccacctgtgtgttcttttgatacatttatcttctgtttttctcaaataaagttcaaagcaaccacctacccgaagacaccacaacaaaactaacaccccacaccccacaacccacacagcacaaaagggacgccccaaacaactccccaggcgacacacaagcacagacaaagacaagggcgacaaggaacacaaaccacacagagcggacacaaccccgaagaaacacagaggagcgcgaggcgccccggcgcaccagaacccacagaacggcgacaccacgtcaggcaaccc

SEQ ID NO: 444203 - DNA, 813 bp, Homo sapiens
cggacgcgtgggtcgacccacgcgtccgcataaaagcgcagccgagcccagcgccccgcacttttctgagcagacgtccagagcagagtcagccagcatgaccgagcgccgcgtccccttctcgctcctgcggggccccagctgggaccccttccgcgactggtacccgcatagccgcctcttcgaccaggccttcgggctgccccggctgccggaggagtggtcgcagtggttaggcggcagcagctggccaggctacgtgcgccccctgccccccgccgccatcgagagccccgcagtggccgcgcccgcctacagccgcgcgctcagccggcaactcagcagcggggtctcggagatccggcacactgcggaccgctggcgcgtgtccctggatgtcaaccacttcgccccggacgagctgacggtcaagaccaaggatggcgtggtggagatcaccggcaagcacgaggagcggcaggacgagcatggctacatctcccggtgcttcacgcggaaatacacgctgccccccggtgtggaccccacccaagtttcctcctccctgtcccctgagggcacactgaccgtggaggcccccatgcccaagctagccacgcagtccaacgagatcaccatcccagtcaccttcgagtcgcgggcccagcttgggggcccagaagctgcaaaatccgatgagactgccgccaagtaaagccttagcccggatggctgtgcctcccccgccacctgtgtgttcttttgatacatttatcttctgtttttctcaaataaagttcaaagcaaccacct

SEQ ID NO: 444204 - DNA, 1679 bp, Homo sapiens
cggacgcgtgggtcgacccacgcgtccgcataaaagcgcagccgagcccagcgccccgcacttttctgagcagacgtccagagcagagtcagccagcatgaccgagcgccgcgtccccttctcgctcctgcggggccccagctgggaccccttccgcgactggtacccgcatagccgcctcttcgaccaggccttcgggctgccccggctgccggaggagtggtcgcagtggttaggcggcagcagctggccaggctacgtgcgccccctgccccccgccgccatcgagagccccgcagtggccgcgcccgcctacagccgcgcgctcagccggcaactcagcagcggggtctcggagatccggcacactgcggaccgctggcgcgtgtccctggatgtcaaccacttcgccccggacgagctgacggtcaagaccaaggatggcgtggtggagatcaccggtgagcccccctgctcctgcaggggagaggaggaggctagcagggcgggcagggccgggggcgtgcggttgaaacgggggtcccgggggcctggggagttaaacgttggcccagcaccgggaaaaacaggactcctgattcccttgctcaggaattgggagtgcgggtcgcttctaagggcgctttctgctctgtaatcccagcgctttgggaggccgagacgggaggatcgcttgaggccaggagttcaagactagcctgggcaacatagcgagacgcgcccccccgccccgaccccgcgccattacaaaaaaaaagcaaacaaaaatttttttaaagatcatcgatgaagagagaaaatgcgcttttctacagagtccccttcccacccacagccccatccccagataagcggggagttccctggcgcggtgccagtttctagccgctgagtgggcgtgtgcgcggctccaagtgcgcctgcgtactgctcactccccagctccgcgccctgctccgttcctcccaaaactctgaatcgaagaactttccggaagtttctgagagcccagaccggcgggcacgcccccatccccaaccccctctgttaatccctaccagcctgcagtcctggctgcttccaagcaggaggtggggcctctggcctagcggggccgaaaggcagtcccctcccccgcagtctgatttccctcttccccccaaaggcaagcacgaggagcggcaggacgagcatggctacatctcccggtgcttcacgcggaaatacaccgtgagtcctggcgccaggtcggggtgggtgggtggcgtgggggtggggtcagggaagagggcacagggacccacccggtgtgtaatgtaacgcttgcctttcctctctgcacgtccaggctgccccccggtgtggaccccacccaagtttcctcctccctgtcccctgagggcacactgaccgtggaggcccccatgcccaagctagccacgcagtccaacgagatcaccatcccagtcaccttcgagtcgcgggcccagcttgggggcccagaagctgcaaaatccgatgagactgccgccaagtaaagccttagcccggatgcccacccctgctgccgccactggctgtgcctcccccgccacctgtgtgttcttttgatacatttatcttctgtttttctcaaataaagttcaaagcaaccacct

SEQ ID NO: 444205 - DNA, 2033 bp, Homo sapiens
cggacgcgtgggtcgacccacgcgtccgcataaaagcgcagccgagcccagcgccccgcacttttctgagcagacgtccagagcagagtcagccagcatgaccgagcgccgcgtccccttctcgctcctgcggggccccagctgggaccccttccgcgactggtacccgcatagccgcctcttcgaccaggccttcgggctgccccggctgccggaggagtggtcgcagtggttaggcggcagcagctggccaggctacgtgcgccccctgccccccgccgccatcgagagccccgcagtggccgcgcccgcctacagccgcgcgctcagccggcaactcagcagcggggtctcggagatccggcacactgcggaccgctggcgcgtgtccctggatgtcaaccacttcgccccggacgagctgacggtcaagaccaaggatggcgtggtggagatcaccggtgagcccccctgctcctgcaggggagaggaggaggctagcagggcgggcagggccgggggcgtgcggttgaaacgggggtcccgggggcctggggagttaaacgttggcccagcaccgggaaaaacaggactcctgattcccttgctcaggaattgggagtgcgggtcgcttctaagggcgctttctgctctgtaatcccagcgctttgggaggccgagacgggaggatcgcttgaggccaggagttcaagactagcctgggcaacatagcgagacgcgcccccccgccccgaccccgcgccattacaaaaaaaaagcaaacaaaaatttttttaaagatcatcgatgaagagagaaaatgcgcttttctacagagtccccttcccacccacagccccatccccagataagcggggagttccctggcgcggtgccagtttctagccgctgagtgggcgtgtgcgcggctccaagtgcgcctgcgtactgctcactccccagctccgcgccctgctccgttcctcccaaaactctgaatcgaagaactttccggaagtttctgagagcccagaccggcgggcacgcccccatccccaaccccctctgttaatccctaccagcctgcagtcctggctgcttccaagcaggaggtggggcctctggcctagcggggccgaaaggcagtcccctcccccgcagtctgatttccctcttccccccaaaggcaagcacgaggagcggcaggacgagcatggctacatctcccggtgcttcacgcggaaatacaccgtgagtcctggcgccaggtcggggtgggtgggtggcgtgggggtggggtcagggaagagggcacagggacccacccggtgtgtaatgtaacgcttgcctttcctctctgcacgtccaggctgccccccggtgtggaccccacccaagtttcctcctccctgtcccctgagggcacactgaccgtggaggcccccatgcccaagctagccacgcagtccaacgagatcaccatcccagtcaccttcgagtcgcgggcccagcttgggggcccagaagctgcaaaatccgatgagactgccgccaagtaaagccttagcccggatgcccacccctgctgccgccactggctgtgcctcccccgccacctgtgtgttcttttgatacatttatcttctgtttttctcaaataaagttcaaagcaaccacctaaaaaaaaaaaaaaaaaactggcatctctctttggcctgaggttctgtattctgggaaaggtacacagggtggagtagggagaagctgccccaggaggcgatgtagtggtggaaagaagaggcagagaggtcgtcgtcgtcgcccagcagcaagggctgcaaaatagtagaactcgtggttgctttggacaggtgtgatttgtgcaagccaggttcaacccttgcctcaagaaatcagatgggaccaatttagtgtccttccacctgtgagccaagcccccatttgaggacatctatcgtattcttgtgtgctgggtctcaaatagaatttttaaagattcttaaaaaaaaaaa

SEQ ID NO: 444206 - DNA, 667 bp, Homo sapiens
cggacgcgtgggtcgacccacgcgtccgcataaaagcgcagccgagcccagcgccccgcacttttctgagcagacgtccagagcagagtcagccagcatgaccgagcgccgcgtccccttctcgctcctgcggggccccagctgggaccccttccgcgactggtacccgcatagccgcctcttcgaccaggccttcgggctgccccggctgccggaggagtggtcgcagtggttaggcggcagcagctggccaggctacgtgcgccccctgccccccgccgccatcgagagccccgcagtggccgcgcccgcctacagccgcgcgctcagccggcaactcagcagcggggtctcggagatccggcacactgcggaccgctggcgcgtgtccctggatgtgtcccctgagggcacactgaccgtggaggcccccatgcccaagctagccacgcagtccaacgagatcaccatcccagtcaccttcgagtcgcgggcccagcttgggggcccagaagctgcaaaatccgatgagactgccgccaagtaaagccttagcccggatgcccacccctgctgccgccactggctgtgcctcccccgccacctgtgtgttcttttgatacatttatcttctgtttttctcaaataaagttcaaagcaaccacct

SEQ ID NO: 444207 - DNA, 672 bp, Homo sapiens
cggacgcgtgggtcgacccacgcgtccgcataaaagcgcagccgagcccagcgccccgcacttttctgagcagacgtccagagcagagtcagccagcatgaccgagcgccgcgtccccttctcgctcctgcggggccccagctgggaccccttccgcgactggtacccgcatagccgcctcttcgaccaggccttcgggctgccccggctgccggaggagtggtcgcagtggttaggcggcagcagctggccaggctacgtgcgccccctgccccccgccgccatcgagagccccgcagtggccgcgcccgcctacagccgcgcgctcagccggcaactcagcagcggggtctcggagatccggcacactgcggaccgctggcgcgtgtccctggatgtcaaccacttcgccccggacgagctgacggtcaagaccaagtgcccaagctagccacgcagtccaacgagatcaccatcccagtcaccttcgagtcgcgggcccagcttgggggcccagaagctgcaaaatccgatgagactgccgccaagtaaagccttagcccggatgcccacccctgctgccgccactggctgtgcctcccccgccacctgtgtgttcttttgatacatttatcttctgtttttctcaaataaagttcaaagcaaccacct

SEQ ID NO: 444208 - DNA, 942 bp, Homo sapiens
  misc_feature (495)..(495): n is a, c, g, or t
cggacgcgtgggtcgacccacgcgtccgcataaaagcgcagccgagcccagcgccccgcacttttctgagcagacgtccagagcagagtcagccagcatgaccgagcgccgcgtccccttctcgctcctgcggggccccagctgggaccccttccgcgactggtacccgcatagccgcctcttcgaccaggccttcgggctgccccggctgccggaggagtggtcgcagtggttaggcggcagcagctggccaggctacgtgcgccccctgccccccgccgccatcgagagccccgcagtggctggcagcgctagcagacagagcgataaagcaagccaaactcaagtaagtagcaggattatccgagatgaatcgcggacaacactatgacggacctgcgatagggcagtcgtcagtcacccgctgtgagtagtccaaacacaagtcatcgcccccgggaaacgacgactcgagccgcatgcaagcatactaangcgagtgcgctcagaggtatggacgaatgcaccctggcatagggcagacgatgtgaggccagcgaggaccgtagcgattggcgtacgaatcatcgcgcggatgaccgttacgcacaggaaagatcagcgactggctccgcgctcgagatgatggagcacccagccaatggggtcctccttcccggtacaacttggaggaggcaacaactggacagtgagaggacgccaccatgacagcaagactagctaccgcagtgccggaccgagactcaacgcatgcacagatcagcctctcgaggtgatgggccaacgctggggggcgccagaaagcatgcaaaatcgcgaggagcctgcacgccaagataaagaccttaggcccgtaatgcgcaacacgtcggcgatgaccaagggctgaggcatccctacaacccgggaggtctcttgaac

SEQ ID NO: 444209 - DNA, 203 bp, Homo sapiens
  misc_feature (2)..(2): n is a, c, g, or t
cngcgtccgcccatgagaggagagggccctctctacctaacttgatacaactccagggagctgtcaggagagctcgtgtcgcccgagcgctacgcgctaaatgcactgatttcataagtatgtggaatccttttccttttgaatctgtatatcatatataagactgaatctacttaataaacactgaacaacaaaccgaaaac

SEQ ID NO: 444210 - DNA, 2919 bp, Homo sapiens
ctccagcaccagcaccagcaggcccgtgcccaccgctcagctcagccccacggagatcagcgccgtgcggcagctcatcgcgggctaccgggagtctgctgccttcctgctgcgctctgcagatgaactggaaaacctcatcctacagcagaactgaccccaccggcacctggagcgcactgccctagggaaggaggctgtcccagcctggacctggcttcctgcctcaccagttggtacattttgtttttgaaagaggtgggatccaaaagagctgtttctagccacactccaagcacctgagactcacccttagcacagcacaacctccagtgcccaaggcctctcccacaccccagccatccacacatctggccccacctgctcagtactactcaacatttgaattcgtgtaaatatttatttttgtgtgtgaacaatactacaaagtaatcagtaagatcttttgcaaaaatgttaccccaggcaattatttgtgaaaatcttaatgttaaaacctggcagagacaatcgccaccctagaattcctggtatcagttacttaacgtgtcacttctcctcccagaggcagtacccaagctagacatgaaccgtttgcatttcttggcagacaggagtgagaaagactggggaaggggctccctccccctacccacacaaggattagatctaaagatcagcataagctacagtttgaagtcatgtttttctgagttcaagctgttggaactgaccaccctccagcctgccttagtactgcggcaagagcgtaggttcaatgtgttttcaagagaaaggaaagaatatgttgttaaagtccattgggcctcccaggcccctccaggacaatggatttcatcatgtcgaccccacctcttgggtgggctcctcctttccagtgaaactacacctgaagccctagagatggcagaatcaggagcaagtttctgcatggaaacaggattccatttagctggctcagtcagggaacttgttttgcttttgttttaaaagatgcagcttcaaccccttccccctactcccgacttggagggcaccaaagagctggttctgatgaactaagctcactgctgtctcaccctcaccagagggactgccttctcccaaaaggagctcccaaagcccttgtcccacagccatttaaaaatcttctgaagggcctcagggcacaaagtgatcatttgggatcctaagttaaaaaggaaatgcaagagtaggatactccaattccagagtctttgcaggaggctaatcccacaagaagggtagcatcagagaagtgggcattggtcttagtggtggatcatcaggtagacaagtgatagtgtgtgtaacccatctgaaattcattttaccgtcaccactcttacaaaggacagtttattcccaaggacagtgctgacggggagggggacaggcagggagttaggagggttttcgaggatttcaaacaggtggaacccatccatccctattcccaagggccacttacaactctaagggtggttacaggattaactaccagttcattttcaaaatgctgctttgaactcagagggttgatacttttaatttgtaattttttgtaaaactttttacaaaatagtaaagtatttcaccagaataccagtttcaatccgtccatggtctgatttttatataatttagtggtgctttagaaactttgtttttgttgtttctgagctaaacagctcaatcctttttcgcctgtatctacctaagaccaatgtgaacctttgtatttttgctcctaattttggactcagtgaaagtgtactgtttacatgtacagatgcccccagtccctgtgtgttctgcaagacttgctcttgaggaggaagatgcacctcactaagctcatctgcttagcaaagccacaaacaaaaacctctcactttttacctacgtttccacctaaaaatacaacaaaaaacctataccacgtagaactcagattggctgaaaaacactttccacctggtagatggcccatatgcctcaattatgtggtccatttaggagcaggagtcagaagagagacctcttattggctgctggtgggtaactgcatggacagaggaaaagggaaggcaggactttgctgcagagctgtgggatgaatgtagttcttccctgggcagcctgggagtgggaaggtcagaatgactcatgttgccttcaggatcaagccatccaggatttagggacaacccaagaggtctttagtcctctggcataatttagacatgttttggaagagcatgagttccatatctgagatgagatttaagactttcagtgcagatagtacaagccatttcttcagggttcctctgggggcagctccttcatgaggtcccacctccggggaggggcacagggctccagatagtaagcacttaaggcaaacagtggatggcaccaacttttaaaggtgactctattaatggcttcacctctaaattatatttttacagatatgcacctatgcaacttaacgtggctcttctaagcaggtgaggacttcctcctcaatgctctctataaaaattatttgtgttctatatagtgagttttaccagtaaatgtggcttaatattttaattcttagaatgtgtcttctctacgtgatgtgactaaattctgttttgtttgtggaatgactagcacaggccgactccctctctccctcacttaacaaaagaccaatgagctgttaatcgagctgttatctccatggtattacttgctaaatgcactgatttcataagtatgtggaatccttttccttttgaatctgtatatcatatataagactgaatctacttaataaacactgaacaacaaaccgaaaac

SEQ ID NO: 444211 - DNA, 1362 bp, Homo sapiens
aacccctgtaaagacagattattaaccatcctcattgcccaaatgaaagaaaatcaggcctccaaagtggaaatgtaattaatggtgcaactggaatttgaatcccagatctgactataaaacaaaaaaaaagaccctgcttttgttccctactccctgctaccccactttgtttttgttgtttctgagctaaacagctcaatcctttttcgcctgtatctacctaagaccaatgtgaacctttgtatttttgctcctaattttggactcagtgaaagtgtactgtttacatgtacagatgcccccagtccctgtgtgttctgcaagacttgctcttgaggaggaagatgcacctcactaagctcatctgcttagcaaagccacaaacaaaaacctctcactttttacctacgtttccacctaaaaatacaacaaaaaacctataccacgtagaactcagattggctgaaaaacactttccacctggtagatggcccatatgcctcaattatgtggtccatttaggagcaggagtcagaagagagacctcttattggctgctggtgggtaactgcatggacagaggaaaagggaaggcaggactttgctgcagagctgtgggatgaatgtagttcttccctgggcagcctgggagtgggaaggtcagaatgactcatgttgccttcaggatcaagccatccaggatttagggacaacccaagaggtctttagtcctctggcataatttagacatgttttggaagagcatgagttccatatctgagatgagatttaagactttcagtgcagatagtacaagccatttcttcagggttcctctgggggcagctccttcatgaggtcccacctccggggaggggcacagggctccagatagtaagcacttaaggcaaacagtggatggcaccaacttttaaaggtgactctattaatggcttcacctctaaattatatttttacagatatgcacctatgcaacttaacgtggctcttctaagcaggtgaggacttcctcctcaatgctctctataaaaattatttgtgttctatatagtgagttttaccagtaaatgtggcttaatattttaattcttagaatgtgtcttctctacgtgatgtgactaaattctgttttgtttgtggaatgactagcacaggccgactccctctctccctcacttaacaaaagaccaatgagctgttaatcgagctgttatctccatggtattacttgctaaatgcactgatttcataagtatgtggaatccttttccttttgaatctgtatatcatatataagactgaatctacttaataaacactgaacaacaaaccgaaaac

SEQ ID NO: 444212 - DNA, 1519 bp, Homo sapiens
ctccagcaccagcaccagcaggcccgtgcccaccgctcagctcagccccacggagatcagcgccgtgcggcagctcatcgcgggctaccgggagtctgctgccttcctgctgcgctctgcagatgaactggaaaacctcatcctacagcagaactgaccccaccggcacctggagcgcactgccctagggaaggaggctgtcccagcctggacctggcttcctgcctcaccagttggtacattttgtttttgaaagaggtgggatccaaaagagctgtttctagccacactccaagcacctgagactttgggcacaaggacacttttttttttttttttttttttttttggaatctcaccacacgggtgctctgacctgcttggaagaggccaacggggcagctctggaagggttgggggctcccctgacaaggcgctggggctgcagctctgtttagaatcaccttcgtggaccctgatgttagaatcccacccccagataattacctttcaagtcttaggtgagcagaattgcatatttattgagaaaagcaaagtggaccctttcttcctctccccttagtaatttatttttctgaaaatggattcttttgtgtttgtacagattgctagtctgtgtctgtctgatcagaaggatgtatccccatacctaacattccatatcactacactgatgtgggctggggccagtaggggcaggacaggtgccaggctggctgttcctctgcatgcctggtgcaccctgtggccgctagcccttggccaggccatcctgttgcagatcccagtgctgccacagggacaccaccaggcacctccctaggcaacgccaagcaggaggacctcacccacacccatggcaaagcaaaacaaaagaggcaccccgaccccattctacagaagccccagtccatggtcacctgtattctacctcacactccagcgtgggctttttccaggatgtgccctgagcctgttctgaacagctgtaaccccaactcccccacacaatgtgtctgcctgggaggtaagtaagtccagactgggtgtccaggagctggaacccagagagcgtcctgtccctaaccagccactgcagccctccagctctggccctcagctgcttgacaggacggactgctgggagatggcagccggttggcagggcccttgccctcacaccccgctgcccaggagccaggtctgaacttctgtgcacaggcctggcccctcagactcactcctgccaagaggggccacttcttcagggtgagccccggctatcaggcagccgtgagctccagggcgggctgcagctcccatccccttgcgccatgtttggagtaaagggatcagtggaagtggaggagccacttgggttctcctaagaccagcccttccggaggggccggtcctggaagaaacccataatccctgggtctgggggtggggggtaatggtgtggagatctatctgccttgcagctcgcccctgagtt

SEQ ID NO: 444213 - DNA, 4697 bp, Homo sapiens
ctccagcaccagcaccagcaggcccgtgcccaccgctcagctcagccccacggagatcagcgccgtgcggcagctcatcgcgggctaccgggagtctgctgccttcctgctgcgctctgcagatgaactggaaaacctcatcctacagcagaactgaccccaccggcacctggagcgcactgccctagggaaggaggctgtcccagcctggacctggcttcctgcctcaccagttggtacattttgtttttgaaagaggtgggatccaaaagagctgtttctagccacactccaagcacctgagactttgggcacaaggacacttttttttttttttttttttttttttggaatctcaccacacgggtgctctgacctgcttggaagaggccaacggggcagctctggaagggttgggggctcccctgacaaggcgctggggctgcagctctgtttagaatcaccttcgtggaccctgatgttagaatcccacccccagataattacctttcaagtcttaggtgagcagaattgcatatttattgagaaaagcaaagtggaccctttcttcctctccccttagtaatttatttttctgaaaatggattcttttgtgtttgtacagattgctagtctgtgtctgtctgatcagaaggatgtatccccatacctaacattccatatcactacactgatgtgggctggggccagtaggggcaggacaggtgccaggctggctgttcctctgcatgcctggtgcaccctgtggccgctagcccttggccaggccatcctgttgcagatcccagtgctgccacagggacaccaccaggcacctccctaggcaacgccaagcaggaggacctcacccacacccatggcaaagcaaaacaaaagaggcaccccgaccccattctacagaagccccagtccatggtcacctgtattctacctcacactccagcgtgggctttttccaggatgtgccctgagcctgttctgaacagctgtaaccccaactcccccacacaatgtgtctgcctgggaggtaagtaagtccagactgggtgtccaggagctggaacccagagagcgtcctgtccctaaccagccactgcagccctccagctctggccctcagctgcttgacaggacggactgctgggagatggcagccggttggcagggcccttgccctcacaccccgctgcccaggagccaggtctgaacttctgtgcacaggcctggcccctcagactcactcctgccaagaggggccacttcttcagggtgagccccggctatcaggcagccgtgagctccagggcgggctgcagctcccatccccttgcgccatgtttggagtaaagggatcagtggaagtggaggagccacttgggttctcctaagaccagcccttccggaggggccggtcctggaagaaacccataatccctggagtgtgaaaaagggcaaaaagaaaaagctggcctggtttccttcctccctgattgattgattgataggcacttcctcttgctcagtgcaatacctaccagtgctgctaaaccagggactcgcccagacctcagcaggcccccagggcctctccgtgcaacactccgtagccatgacagcagctctctgctgcccgcccctgcccagagctggcagaagccctctgttgcctttcctccctcagagcagagaggccccaggggagccagggccgagtggatcctaggatggccacggagagccactcgctcccagaacaggcaccccttcccaaaccagcttttctgcagccaattgcctgttgcagctgtggccactgcctcccggcactgtggcagactccccccaaggagggatggggggggcaccagtgaggatgccccatcctgcctcaggtccagaactctgaaaggtagggtgcccaccccgtgcttacttccggcccctagaggttgggggtggtcgttatctctcaagtggcctccaataccccatccagccacaccacctctgccttccatctgaccaatccccaggcctctggtcagggccaggacacctgagactcacccttagcacagcacaacctccagtgcccaaggcctctcccacaccccagccatccacacatctggccccacctgctcagtactactcaacatttgaattcgtgtaaatatttatttttgtgtgtgaacaatactacaaagtaatcagtaagatcttttgcaaaaatgttaccccaggcaattatttgtgaaaatcttaatgttaaaacctggcagagacaatcgccaccctagaattcctggtatcagttacttaacgtgtcacttctcctcccagaggcagtacccaagctagacatgaaccgtttgcatttcttggcagacaggagtgagaaagactggggaaggggctccctccccctacccacacaaggattagatctaaagatcagcataagctacagtttgaagtcatgtttttctgagttcaagctgttggaactgaccaccctccagcctgccttagtactgcggcaagagcgtaggttcaatgtgttttcaagagaaaggaaagaatatgttgttaaagtccattgggcctcccaggcccctccaggacaatggatttcatcatgtcgaccccacctcttgggtgggctcctcctttccagtgaaactacacctgaagccctagagatggcagaatcaggagcaagtttctgcatggaaacaggattccatttagctggctcagtcagggaacttgttttgcttttgttttaaaagatgcagcttcaaccccttccccctactcccgacttggagggcaccaaagagctggttctgatgaactaagctcactgctgtctcaccctcaccagagggactgccttctcccaaaaggagctcccaaagcccttgtcccacagccatttaaaaatcttctgaagggcctcagggcacaaagtgatcatttgggatcctaagttaaaaaggaaatgcaagagtaggatactccaattccagagtctttgcaggaggctaatcccacaagaagggtagcatcagagaagtgggcattggtcttagtggtggatcatcaggtagacaagtgatagtgtgtgtaacccatctgaaattcattttaccgtcaccactcttacaaaggacagtttattcccaaggacagtgctgacggggagggggacaggcagggagttaggagggttttcgaggatttcaaacaggtggaacccatccatccctattcccaagggccacttacaactctaagggtggttacaggattaactaccagttcattttcaaaatgctgctttgaactcagagggttgatacttttaatttgtaattttttgtaaaactttttacaaaatagtaaagtatttcaccagaataccagtttcaatccgtccatggtctgatttttatataatttagtggtgctttagaaactttgtttttgttgtttctgagctaaacagctcaatcctttttcgcctgtatctacctaagaccaatgtgaacctttgtatttttgctcctaattttggactcagtgaaagtgtactgtttacatgtacagatgcccccagtccctgtgtgttctgcaagacttgctcttgaggaggaagatgcacctcactaagctcatctgcttagcaaagccacaaacaaaaacctctcactttttacctacgtttccacctaaaaatacaacaaaaaacctataccacgtagaactcagattggctgaaaaacactttccacctggtagatggcccatatgcctcaattatgtggtccatttaggagcaggagtcagaagagagacctcttattggctgctggtgggtaactgcatggacagaggaaaagggaaggcaggactttgctgcagagctgtgggatgaatgtagttcttccctgggcagcctgggagtgggaaggtcagaatgactcatgttgccttcaggatcaagccatccaggatttagggacaacccaagaggtctttagtcctctggcataatttagacatgttttggaagagcatgagttccatatctgagatgagatttaagactttcagtgcagatagtacaagccatttcttcagggttcctctgggggcagctccttcatgaggtcccacctccggggaggggcacagggctccagatagtaagcacttaaggcaaacagtggatggcaccaacttttaaaggtgactctattaatggcttcacctctaaattatatttttacagatatgcacctatgcaacttaacgtggctcttctaagcaggtgaggacttcctcctcaatgctctctataaaaattatttgtgttctatatagtgagttttaccagtaaatgtggcttaatattttaattcttagaatgtgtcttctctacgtgatgtgactaaattctgttttgtttgtggaatgactagcacaggccgactccctctctccctcacttaacaaaagaccaatgagctgttaatcgagctgttatctccatggtattacttgctaaatgcactgatttcataagtatgtggaatccttttccttttgaatctgtatatcatatataagactgaatctacttaataaacactgaacaacaaaccgaaaac

SEQ ID NO: 444214 - DNA, 4642 bp, Homo sapiens
ctccagcaccagcaccagcaggcccgtgcccaccgctcagctcagccccacggagatcagcgccgtgcggcagctcatcgcgggctaccgggagtctgctgccttcctgctgcgctctgcagatgaactggaaaacctcatcctacagcagaactgaccccaccggcacctggagcgcactgccctagggaaggaggctgtcccagcctggacctggcttcctgcctcaccagttggtacattttgtttttgaaagaggtgggatccaaaagagctgtttctagccacactccaagcacctgagactttgggcacaaggacacttttttttttttttttttttttttttggaatctcaccacacgggtgctctgacctgcttggaagaggccaacggggcagctctggaagggttgggggctcccctgacaaggcgctggggctgcagctctgtttagaatcaccttcgtggaccctgatgttagaatcccacccccagataattacctttcaagtcttaggtgagcagaattgcatatttattgagaaaagcaaagtggaccctttcttcctctccccttagtaatttatttttctgaaaatggattcttttgtgtttgtacagattgctagtctgtgtctgtctgatcagaaggatgtatccccatacctaacattccatatcactacactgatgtgggctggggccagtaggggcaggacaggtgccaggctggctgttcctctgcatgcctggtgcaccctgtggccgctagcccttggccaggccatcctgttgcagatcccagtgctgccacagggacaccaccaggcacctccctaggcaacgccaagcaggaggacctcacccacacccatggcaaagcaaaacaaaagaggcaccccgaccccattctacagaagccccagtccatggtcacctgtattctacctcacactccagcgtgggctttttccaggatgtgccctgagcctgttctgaacagctgtaaccccaactcccccacacaatgtgtctgcctgggaggtaagtaagtccagactgggtgtccaggagctggaacccagagagcgtcctgtccctaaccagccactgcagccctccagctctggccctcagctgcttgacaggacggactgctgggagatggcagccggttggcagggcccttgccctcacaccccgctgcccaggagccaggtctgaacttctgtgcacaggcctggcccctcagactcactcctgccaagaggggccacttcttcagggtgagccccggctatcaggcagccgtgagctccagggcgggctgcagctcccatccccttgcgccatgtttggagtaaagggatcagtggaagtggaggagccacttgggttctcctaagaccagcccttccggaggggccggtcctggaagaaacccataatccctggagtgtgaaaaagggcaaaaagaaaaagctggcctggtttccttcctccctgattgattgattgataggcacttcctcttgctcagtgcaatacctaccagtgctgctaaaccagggactcgcccagacctcagcaggcccccagggcctctccgtgcaacactccgtagccatgacagcagctctctgctgcccgcccctgcccagagctggcagaagccctctgttgcctttcctccctcagagcagagaggccccaggggagccagggccgagtggatcctaggatggccacggagagccactcgctcccagaacaggcaccccttcccaaaccagcttttctgcagccaattgcctgttgcagctgtggccactgcctcccggcactgtggcagactccccccaaggagggatggggggggcaccagtgaggatgccccatcctgcctcaggtccagaactctgaaaggtagggtgcccaccccgtgcttacttccggcccctagaggttgggggtggtcgttatctctcaagtggcctccaataccccatccagccacaccacctctgccttccatctgaccaatccccaggcctctggtcagggccaggacacctgagactcacccttagcacagcacaacctccagtgcccaaggcctctcccacaccccagccatccacacatctggccccacctgctcagtactactcaacatttgaattcgtgtaaatatttatttttgtgtgtgaacaatactacaaagtaatcagtaagatcttttgcaaaaatgttaccccaggcaattatttgtgaaaatcttaatgttaaaacctggcagagacaatcgccaccctagaattcctggtatcagttacttaacgtgtcacttctcctcccagaggcagtacccaagctagacatgaaccgtttgcatttcttggcagacaggagtgagaaagactggggaaggggctccctccccctacccacacaaggattagatctaaagatcagcataagctacagtttgaagtcatgtttttctgagttcaagctgttggaactgaccaccctccagcctgccttagtactgcggcaagagcgtaggttcaatgtgttttcaagagaaaggaaagaatatgttgttaaagtccattgggcctcccaggcccctccaggacaatggatttcatcatgtcgaccccacctcttgggtgggctcctcctttccagtgaaactacacctgaagccctagagatggcagaatcaggagcaagtttctgcatggaaacaggattccatttagctggctcagtcagggaacttgttttgcttttgttttaaaagatgcagcttcaaccccttccccctactcccgacttggagggcaccaaagagctggttctgatgaactaagctcactgctgtctcaccctcaccagagggactgccttctcccaaaaggagctcccaaagcccttgtcccacagccatttaaaaatcttctgaagggcctcagggcacaaagtgatcatttgggatcctaagttaaaaaggaaatgcaagagtaggatactccaattccagagtctttgcaggaggctaatcccacaagaagggtagcatcagagaagtgggcattggtcttagtggtggatcatcaggtagacaagtgatagtgtgtgtaacccatctgaaattcattttaccgtcaccactcttacaaaggacagtttattcccaaggacagtgctgacggggagggggacaggcagggagttaggagggttttcgaggatttcaaacaggtggaacccatccatccctattcccaagggccacttacaactctaagggtggttacaggattaactaccagttcattttcaaaatgctgctttgaactcagagggttgatacttttaatttgtaattttttgtaaaactttttactttatataatttagtggtgctttagaaactttgtttttgttgtttctgagctaaacagctcaatcctttttcgcctgtatctacctaagaccaatgtgaacctttgtatttttgctcctaattttggactcagtgaaagtgtactgtttacatgtacagatgcccccagtccctgtgtgttctgcaagacttgctcttgaggaggaagatgcacctcactaagctcatctgcttagcaaagccacaaacaaaaacctctcactttttacctacgtttccacctaaaaatacaacaaaaaacctataccacgtagaactcagattggctgaaaaacactttccacctggtagatggcccatatgcctcaattatgtggtccatttaggagcaggagtcagaagagagacctcttattggctgctggtgggtaactgcatggacagaggaaaagggaaggcaggactttgctgcagagctgtgggatgaatgtagttcttccctgggcagcctgggagtgggaaggtcagaatgactcatgttgccttcaggatcaagccatccaggatttagggacaacccaagaggtctttagtcctctggcataatttagacatgttttggaagagcatgagttccatatctgagatgagatttaagactttcagtgcagatagtacaagccatttcttcagggttcctctgggggcagctccttcatgaggtcccacctccggggaggggcacagggctccagatagtaagcacttaaggcaaacagtggatggcaccaacttttaaaggtgactctattaatggcttcacctctaaattatatttttacagatatgcacctatgcaacttaacgtggctcttctaagcaggtgaggacttcctcctcaatgctctctataaaaattatttgtgttctatatagtgagttttaccagtaaatgtggcttaatattttaattcttagaatgtgtcttctctacgtgatgtgactaaattctgttttgtttgtggaatgactagcacaggccgactccctctctccctcacttaacaaaagaccaatgagctgttaatcgagctgttatctccatggtattacttgctaaatgcactgatttcataagtatgtggaatccttttccttttgaatctgtatatcatatataagactgaatctacttaataaacactgaacaacaaaccgaaaac

SEQ ID NO: 444215 - DNA, 401 bp, Homo sapiens
ctccagcaccagcaccagcaggcccgtgcccaccgctcagctcagccccacggagatcagcgccgtgcggcagctcatcgcgggctaccgggagtctgctgccttcctgctgcgctctgcagatgaactggaaaacctcatcctacagcagaactgaccccaccggcacctggagcgcactgccctagggaaggaggctgtcccagcctggacctggcttcctgcctcaccagttggtacattttgtttttgaaagaggtgggatccaaaagagctgtttctagccacactccaagcacctgagactttgggcacaaggacactttttttttttttttttttttttttttttttttttttgggaattccccccccgggggggctaaccccttttgtgaaaa

SEQ ID NO: 444216 - DNA, 470 bp, Homo sapiens
ctgtataagacactcttttctctgactccatcattaaccagggagatgatgcagtcctttacctgattatatctccacattcactcagaagttgggggaccagttgctgatgttttcactgtccttctggcccctccctcatgtctgcatttcctgtggatgggattttcctctctcatttcagtaaattccactatcttgatgatccgctttgtcttctgtcttccaggtctgtgaactccatcccagcagcatttaaatcatgcttatgtatttcagtcttaaagaaaacctcttgcttagccacaaattcctttctggcgactcccctttatttctaactatgcctcttcagtgtctcagaagagtggtctgccctctgcttccactcttacacttctctctcctcagtcttcaacccagtgtcatctgtcatcgttcctactacttcactgactttttttctcgca

SEQ ID NO: 444217 - DNA, 1010 bp, Homo sapiens
ggtgttacacacctgtggttccagctacttgggaggctgaggtgaaaggatctgggaagttgaggctgcagtgagactggggtgatcaggctggataatcctctctccctgttcccctcatttggctgctccagaccctgagaaacttctacctgtcccatgccagctgagggtgtctgaggagctgacatcaaccccatggatctcctgaactgtgctggaaggtagagacaggcagggaggcttcccaatgggtcaggagaacctgaccccacaaatcaactgatcttcaagagacaggatggagggagggatcattctagagaaccctgctccttgttcctccctgtggcaaaatctggcgccaggaagagtttgagtgtgtaggcgtgtgtgtgcaggtgtaagtgtgcaggcacgtgttgttgcaggtgtgtatgtacagccgtgtgtgcacgcatgtgtgtgcaggtgtatgtgtgtaggtgtgcatgtgcaggcatgtgtgtgtaggtgtgcatctgcaggtgtgtatgtacaagacgtgtgtacaggcatgtgtgtgcaggtgtgcatgtgcaaggtgtgtgtttgcaggcatgcatgtgcaggtgtgcgtgtgcaggcatgtgtgtgcaggtgtgtatgttcataatggccctaacgcccaagctggaaagttgtggatttacgggaatgagggcaagaaacacctggcccgcccagggcggaaaaccgcttaaaggcattcttaagccacaaataataacatgagcgctctgtgtcttaagggcgtgttcctgctgcagttaactaacccaacctattcctttaattcagcccatcccttcgtttcccataagggatacttttagttagttgaatatctctagaaacaatgctaatgactggtttgctgttaataaatatgtgggtaaatctctgtttggggctctcagctctgaaggctgtgagatccctgatttcccacttcacgcctctatattttt

SEQ ID NO: 444218 - DNA, 328 bp, Homo sapiens
gggtctagctgtgtggcccaggctggtctcaaactcctggccccattgatcctcctgcctcagcttcctgagtagctgggatgacaggcatcagccactgcacctgtcagattttttatttttagttgttatttaagtagttattgtgtggccacttgtccaattctgggttggaccggcaggagcctgtgctcatctgtccacagggaccacctcagtgtttggcattaccaggcagcggttgcgtccattgcctctactatccccttcttcgcattggagtagacttccctgggggcagcatgggaagaggttcctgctgcacctt

SEQ ID NO: 444219 - DNA, 382 bp, Homo sapiens
gggtctagctgtgtggcccaggctggtctcaaactcctggccccattgatcctcctgcctcagcttcctgagtagctgggatgacaggcatcagccactgcacctgtcagattttttatttttagttgttatttaagtagttataaaagaatgagcacctcagactggattttagaggagagccccctagactgtctctgtgtggccacttgtccaattctgggttggaccggcaggagcctgtgctcatctgtccacagggaccacctcagtgtttggcattaccaggcagcggttgcgtccattgcctctactatccccttcttcgcattggagtagacttccctgggggcagcatgggaagaggttcctgctgcacctt

SEQ ID NO: 444220 - DNA, 4461 bp, Homo sapiens
  misc_feature (2032)..(2032): n is a, c, g, or t
ccctttggaacctctccctgttttgaagccttcctgtttatccagtcaccccccttatccaccagtccccactctttcttatgtcactccgttgcctgcacatcctgctagcttggatccttttcagtcagtccagcaatctgttccacaagccacagcattgtcaaatcagcccgaggcctttgcagatcatccaccagcctcagttctctcccttgcatctccctgtcattctccatcttcttctttgccttcatctccttctacttccacatccttttcttcagcctgtatactgttttcttcctcctcatctattctttcctcttcttcgacttcctgttctacttctccatccttacctccttcatctatccctcttttttcctctcctttgcattcatcttcctctccaggtttgcctccaacttatttagcttttccctctccagtttctcctgtttcttcttcctttatgatttcctcttcctttccccctattcttcactctccttctgtttctacctccccatctccttttattcctatccaccccttcaatcctcctcattgggggaagaaagtagagaagagaagagaagaaagtggagtagagaagaaaggaatagagaagaaagttgagacacgacaactttaaagagctatagattctgccttgccttccgcattatcaaaaaatgatcacaagcatcagaaacaactcttatccaaaatcaattgtgagaaagaaatgaatgaaaacatgagggcaaccttggctactagcaaaaatgtgttccagcttaaactggaggaaactcagaaactcctcgaagatcaacatctaagcaatttgcaaaaattttgtgatgaagttaatcagataaccaattctgaaaccctctcaagtatagacagtcttgaggctacagagcatgaagaaatatatttaacacttaataaggagcattccacatccatccagcggaataccatttccctcaaaccagcaaatatgcaatcaactaatctcagctgctttgatgaagataaactggcattctctaaaactcaacatataaataattggcttacaaatttagatgcttcaaatactcagaatgtcacagctttctcagatattttaagtaaatctaatgttctgccttcatgggaatattttaatagtaaagaacaaaatccatctcctttgaatggaacagtggaaagagccacaaatactgctaataattcagtaccctttgtatctagcccacccatgtttgtactagataaaaaatgtgaaaagacctctgaaactagcactatgaggacaactgactccacttctggagcattcaaaagagagagaccattagttactgagagcccaacatttaaatttagcaaatcccaaagcacttcagattctctaacccaggaagtggctacatttccagaccaagagaaatattctgaattaaatcaagaaaatggaactacttcaattcctacttcatgtgtaccagtggcaacgcctttagttttgccatctaatatacagtcagctagaccttcagcaaagaacagtatacacataaaagaaattgatgcagtgcagtgttctgataagttagatgaattgaaagatggtaaagaagaagagataaaatattttaattgcaataaggaagagttgcctttattttcagacagttttcaagatgcctatatacctcacaatcctgattcaaaagatgaaaaacaaaaattagctgaaacatcatccttgtctaatgtaacttctaattatgactttgttggccagcataagaaaatgaaatacaacatccatgagagaaatggtgtgagatttcttaaaagtattttaaagaaagaatctaaatatgaacatggttatcttaaggcattaattataaatcagagctttaagtttggaaatcaaaaagcagcagctatcagagatagtattgaattaacaaaggaaaaaggtgcagaaattccaaagacnattaaaaaactgaggtggtttgatgaaactagcaatatagaaaacaatgctgaaaacagtcattcactgaagaataaaacaggaacaactcaacagcattctcaacaattccacattcaaagtggtgctggaagcaacataattagtgtttctacttgtgctgtaaattctgctgatacaaagaagtccagggaggattctatctctgaaaatgttacgactttaggaggatctggagcagaccatatgcctttgaactgttttataccttcaggttataactttgctaaacatgcctggccagcctcaaaaaaagaagaaagtaaaatccctgtacatgatgattctaaaactaagcaaggtaagccacaaagaggtagagcaaaaataattagaaaaccaggatctgcaaaagtccaatcaggctttatatgtacaaacagaaaaggcgctgtcattcaaccacagtctgcaagcaaagtcaacatatttacacaagctcagggaaaattaattataccttgtcctcctcctcaatctacatcaaatattagaagtggtaaaaatatacaagtgtctcagtgtcaaccagtaactcctgaaaatcctcaaaacattattacacataactcttttaattcaaaacatgtgcttccaacagaacacagtttgaatcagtggaatcaggaaagtagttctccactctcaaatgcttgttctgacctagtcactgtgataccatcactgccatcatattgttcttcagagtgccaaactttcgcaaaaataaatcattcaaatggcactcaagcagttgcccggcaagatgcgacattatattgcacccaaagaagtcctgtttgtgaagaaagttatccgtctgtgactctaagaactgctgaagaagaatcagttcccttatggaaaagaggtcctaatgtcctgcatcaaaataagagggctacagggtctactgttatgagaagaaaacgaattgctgaaactaagcggagaaatattttagagcagaaaagacaaaaccctggatctgtaggacagaagtacagtgagcaaattaataattttggacaaagtgtcctgctaagttcaagtgagccaaaacaaactacaaggggtacttcttatattgaagaagtttcagatagtacttctgagtttttgatggctgaaaacttagtgaaagcatcagtgccggaggatgagattctgactgtcttgaatagcaaacagatacagaaatcaaatctacctttaaataaaactcaacaattcaacatctgcacactgtcagctgaagaacagaagatcctagagtcccttaatgatctcaatgaaagactacattatatacaagaatccatttgcaaaaacccatccatcaaaaatactttacaaataataccacttctggagaagagagaagatagaaccagcagctgcagagacaagagataattccagcagaatccgtctaagaagacctttcatgtacttctctaggactagatgcataccgttttgtgaaaaccagccataggaaaacatgtgagcaacaacccccatgaacatttgtcctaactcagattttgtgagcagtgaagtttaacagagcagtgacatttaacaaagcagtgaagtttaacagagttctgagaataccatgaaagacattatgcctgcctaaacaaaaagcaggacataacctagctctgaatacatgccacaaggatgaagcttgtgagtagagcaaacaaacgtttttccaaagaattcacagtgctcctttgcaatttatagatttcatgttgaaatatatgttaaataaaatttctgtttattgaacctctttattaaacctctaacttactgataagatgtttatgaagtatggcatattttgatttttttaattgtaataaatattcttaaagttaccacatcccacaaaatggcccttggtggcagcaatagagcaaaggttacctttttgtatggtgaagggaggccttcctatggctgtacaattacatcgattcttccaaatttcatatttcatacatggcactttggcataccgaaaaaacatgaaatttttcattaaaatgccatgaatcaagccagggccgttggcttatgcctgtaatcccagcactttgcaggccgaggtagacagatggcttgagctcaggagttcgtgaccagcctgggcaaccctgtctctacaaaaaatacaaaaattaaccaggcatggtggcatgcacctgtagtcccagctacttggggtgctgaggcgggaggattacttgagcccaggaggattacttcaacctgggaggttgaggctgcagtgagctgtgtttcgccactgcacaccagcctgggtgacagtgtgagacccagcctcaaaa

SEQ ID NO: 444221 - DNA, 4122 bp, Homo sapiens
  misc_feature (20)..(20): n is a, c, g, or t
  misc_feature (1693)..(1693): n is a, c, g, or t
ctcacgctttatacttctcncagctattaacatattttctcctcttcttcagaattaaatttctcaaaaagaacgtttatattcaagtattcctgttcgtattccttaccctggtcttctctatagaatgcaatctggctgggagatgcttcactccactggaacaaggcttactgattcccaagggcctccttgcttctaaaaccaccgaagtgcttctgtctttatcttatttgtcctcttggcagcataaatgctggttttcttcctacttgtttggtctctcctcttcagtcttcatcatgtttttgtccctcaaacagctatagattctgccttgccttccgcattatcaaaaaatgatcacaagcatcagaaacaactcttatccaaaatcaattgtgagaaagaaatgaatgaaaacatgagggcaaccttggctactagcaaaaatgtgttccagcttaaactggaggaaactcagaaactcctcgaagatcaacatctaagcaatttgcaaaaattttgtgatgaagttaatcagataaccaattctgaaaccctctcaagtatagacagtcttgaggctacagagcatgaagaaatatatttaacacttaataaggagcattccacatccatccagcggaataccatttccctcaaaccagcaaatatgcaatcaactaatctcagctgctttgatgaagataaactggcattctctaaaactcaacatataaataattggcttacaaatttagatgcttcaaatactcagaatgtcacagctttctcagatattttaagtaaatctaatgttctgccttcatgggaatattttaatagtaaagaacaaaatccatctcctttgaatggaacagtggaaagagccacaaatactgctaataattcagtaccctttgtatctagcccacccatgtttgtactagataaaaaatgtgaaaagacctctgaaactagcactatgaggacaactgactccacttctggagcattcaaaagagagagaccattagttactgagagcccaacatttaaatttagcaaatcccaaagcacttcagattctctaacccaggaagtggctacatttccagaccaagagaaatattctgaattaaatcaagaaaatggaactacttcaattcctacttcatgtgtaccagtggcaacgcctttagttttgccatctaatatacagtcagctagaccttcagcaaagaacagtatacacataaaagaaattgatgcagtgcagtgttctgataagttagatgaattgaaagatggtaaagaagaagagataaaatattttaattgcaataaggaagagttgcctttattttcagacagttttcaagatgcctatatacctcacaatcctgattcaaaagatgaaaaacaaaaattagctgaaacatcatccttgtctaatgtaacttctaattatgactttgttggccagcataagaaaatgaaatacaacatccatgagagaaatggtgtgagatttcttaaaagtattttaaagaaagaatctaaatatgaacatggttatcttaaggcattaattataaatcagagctttaagtttggaaatcaaaaagcagcagctatcagagatagtattgaattaacaaaggaaaaaggtgcagaaattccaaagacnattaaaaaactgaggtggtttgatgaaactagcaatatagaaaacaatgctgaaaacagtcattcactgaagaataaaacaggaacaactcaacagcattctcaacaattccacattcaaagtggtgctggaagcaacataattagtgtttctacttgtgctgtaaattctgctgatacaaagaagtccagggaggattctatctctgaaaatgttacgactttaggaggatctggagcagaccatatgcctttgaactgttttataccttcaggttataactttgctaaacatgcctggccagcctcaaaaaaagaagaaagtaaaatccctgtacatgatgattctaaaactaagcaaggtaagccacaaagaggtagagcaaaaataattagaaaaccaggatctgcaaaagtccaatcaggctttatatgtacaaacagaaaaggcgctgtcattcaaccacagtctgcaagcaaagtcaacatatttacacaagctcagggaaaattaattataccttgtcctcctcctcaatctacatcaaatattagaagtggtaaaaatatacaagtgtctcagtgtcaaccagtaactcctgaaaatcctcaaaacattattacacataactcttttaattcaaaacatgtgcttccaacagaacacagtttgaatcagtggaatcaggaaagtagttctccactctcaaatgcttgttctgacctagtcactgtgataccatcactgccatcatattgttcttcagagtgccaaactttcgcaaaaataaatcattcaaatggcactcaagcagttgcccggcaagatgcgacattatattgcacccaaagaagtcctgtttgtgaagaaagttatccgtctgtgactctaagaactgctgaagaagaatcagttcccttatggaaaagaggtcctaatgtcctgcatcaaaataagagggctacagggtctactgttatgagaagaaaacgaattgctgaaactaagcggagaaatattttagagcagaaaagacaaaaccctggatctgtaggacagaagtacagtgagcaaattaataattttggacaaagtgtcctgctaagttcaagtgagccaaaacaaactacaaggggtacttcttatattgaagaagtttcagatagtacttctgagtttttgatggctgaaaacttagtgaaagcatcagtgccggaggatgagattctgactgtcttgaatagcaaacagatacagaaatcaaatctacctttaaataaaactcaacaattcaacatctgcacactgtcagctgaagaacagaagatcctagagtcccttaatgatctcaatgaaagactacattatatacaagaatccatttgcaaaaacccatccatcaaaaatactttacaaataataccacttctggagaagagagaagatagaaccagcagctgcagagacaagagataattccagcagaatccgtctaagaagacctttcatgtacttctctaggactagatgcataccgttttgtgaaaaccagccataggaaaacatgtgagcaacaacccccatgaacatttgtcctaactcagattttgtgagcagtgaagtttaacagagcagtgacatttaacaaagcagtgaagtttaacagagttctgagaataccatgaaagacattatgcctgcctaaacaaaaagcaggacataacctagctctgaatacatgccacaaggatgaagcttgtgagtagagcaaacaaacgtttttccaaagaattcacagtgctcctttgcaatttatagatttcatgttgaaatatatgttaaataaaatttctgtttattgaacctctttattaaacctctaacttactgataagatgtttatgaagtatggcatattttgatttttttaattgtaataaatattcttaaagttaccacatcccacaaaatggcccttggtggcagcaatagagcaaaggttacctttttgtatggtgaagggaggccttcctatggctgtacaattacatcgattcttccaaatttcatatttcatacatggcactttggcataccgaaaaaacatgaaatttttcattaaaatgccatgaatcaagccagggccgttggcttatgcctgtaatcccagcactttgcaggccgaggtagacagatggcttgagctcaggagttcgtgaccagcctgggcaaccctgtctctacaaaaaatacaaaaattaaccaggcatggtggcatgcacctgtagtcccagctacttggggtgctgaggcgggaggattacttgagcccaggaggattacttcaacctgggaggttgaggctgcagtgagctgtgtttcgccactgcacaccagcctgggtgacagtgtgagacccagcctcaaaa

SEQ ID NO: 444222 - DNA, 1178 bp, Homo sapiens
tgtcaaggacgcgccgtcggttgttgtcaagatggcggctgcagggttgctgccgccccatctgctattgcccggcgaggtcgccgctgcctcagctgccatcgccgctacaggcaccagtgccgctgcgcgggagctagggctgtcgaggccaacccttccgcgcccgtgacgcggggcctgagagacggagtgtagggaggggccgagcaggaggaggaggaagccggagctgccatgagggaggttctgggggcgagcagacaggcggcgctgaagtgaaggatgctggcggggaggcccggaacccggagcgcggtcggggaactgggcactgaatcatcggacaacctcgacagagcccccctcggccctcgggagagcggcgggcatcaccgacctggctcttacctagatatgaaaatccatctggagaaaaatttagaagaagagcgccagatattactgcagcaacaaaaaatatgtcgaaatcgagcacgtaaatattttgtggagtcaaatcggagaaaaaaagcttttgaggagaaacgaaaagaacaggaagaaaaagaacaccaaattagagaacaaatacttcaacaaagaaaacagaagtttgaagaagttactgaaaaattccagcgtgcccatgttcctctttcacagcggaggaaagcagtttcccgaaaaccagttcctccattagaagaggccctcaaacaaattcaggaatccaacttaaaatcagaagtaaaccttcccttttcccgtagaccaacaataaactggagagctatagattctgccttgccttccgcattatcaaaaaatgatcacaagcatcagaaacaactcttatccaaaatcaattgtgagaaagaaatgaatgaaaacatgagggcaaccttggctactagcaaaaatgtgttccagcttaaactggaggaaactcagaaactcctcgaagatcaacatctaagcaatttgcaaaattttgtgatgaagttatcagataacccttcttggaccctcttaaggtatacaggtttaaggttagagcatgagaaatatttttacaccttataaggggttttccatacattcgccgaaaccactttcttaaacaggaaatggcaacactaacttgatggttgtgaagaaaaccggatttctccctt

SEQ ID NO: 444223 - DNA, 4592 bp, Homo sapiens
  misc_feature (2163)..(2163): n is a, c, g, or t
tgtcaaggacgcgccgtcggttgttgtcaagatggcggctgcagggttgctgccgccccatctgctattgcccggcgaggtcgccgctgcctcagctgccatcgccgctacaggcaccagtgccgctgcgcgggagctagggctgtcgaggccaacccttccgcgcccgtgacgcggggcctgagagacggagtgtagggaggggccgagcaggaggaggaggaagccggagctgccatgagggaggttctgggggcgagcagacaggcggcgctgaagtgaaggatgctggcggggaggcccggaacccggagcgcggtcggggaactgggcactgaatcatcggacaacctcgacagagcccccctcggccctcgggagagcggcgggcatcaccgacctggctcttacctagatatgaaaatccatctggagaaaaatttagaagaagagcgccagatattactgcagcaacaaaaaatatgtcgaaatcgagcacgtaaatattttgtggagtcaaatcggagaaaaaaagcttttgaggagaaacgaaaagaacaggaagaaaaagaacaccaaattagagaacaaatacttcaacaaagaaaacagaagtttgaagaagttactgaaaaattccagcgtgcccatgttcctctttcacagcggaggaaagcagtttcccgaaaaccagttcctccattagaagaggccctcaaacaaattcaggaatccaacttaaaatcagaagtaaaccttcccttttcccgtagaccaacaataaactggagagctatagattctgccttgccttccgcattatcaaaaaatgatcacaagcatcagaaacaactcttatccaaaatcaattgtgagaaagaaatgaatgaaaacatgagggcaaccttggctactagcaaaaatgtgttccagcttaaactggaggaaactcagaaactcctcgaagatcaacatctaagcaatttgcaaaaattttgtgatgaagttaatcagataaccaattctgaaaccctctcaagtatagacagtcttgaggctacagagcatgaagaaatatatttaacacttaataaggagcattccacatccatccagcggaataccatttccctcaaaccagcaaatatgcaatcaactaatctcagctgctttgatgaagataaactggcattctctaaaactcaacatataaataattggcttacaaatttagatgcttcaaatactcagaatgtcacagctttctcagatattttaagtaaatctaatgttctgccttcatgggaatattttaatagtaaagaacaaaatccatctcctttgaatggaacagtggaaagagccacaaatactgctaataattcagtaccctttgtatctagcccacccatgtttgtactagataaaaaatgtgaaaagacctctgaaactagcactatgaggacaactgactccacttctggagcattcaaaagagagagaccattagttactgagagcccaacatttaaatttagcaaatcccaaagcacttcagattctctaacccaggaagtggctacatttccagaccaagagaaatattctgaattaaatcaagaaaatggaactacttcaattcctacttcatgtgtaccagtggcaacgcctttagttttgccatctaatatacagtcagctagaccttcagcaaagaacagtatacacataaaagaaattgatgcagtgcagtgttctgataagttagatgaattgaaagatggtaaagaagaagagataaaatattttaattgcaataaggaagagttgcctttattttcagacagttttcaagatgcctatatacctcacaatcctgattcaaaagatgaaaaacaaaaattagctgaaacatcatccttgtctaatgtaacttctaattatgactttgttggccagcataagaaaatgaaatacaacatccatgagagaaatggtgtgagatttcttaaaagtattttaaagaaagaatctaaatatgaacatggttatcttaaggcattaattataaatcagagctttaagtttggaaatcaaaaagcagcagctatcagagatagtattgaattaacaaaggaaaaaggtgcagaaattccaaagacnattaaaaaactgaggtggtttgatgaaactagcaatatagaaaacaatgctgaaaacagtcattcactgaagaataaaacaggaacaactcaacagcattctcaacaattccacattcaaagtggtgctggaagcaacataattagtgtttctacttgtgctgtaaattctgctgatacaaagaagtccagggaggattctatctctgaaaatgttacgactttaggaggatctggagcagaccatatgcctttgaactgttttataccttcaggttataactttgctaaacatgcctggccagcctcaaaaaaagaagaaagtaaaatccctgtacatgatgattctaaaactaagcaaggtaagccacaaagaggtagagcaaaaataattagaaaaccaggatctgcaaaagtccaatcaggctttatatgtacaaacagaaaaggcgctgtcattcaaccacagtctgcaagcaaagtcaacatatttacacaagctcagggaaaattaattataccttgtcctcctcctcaatctacatcaaatattagaagtggtaaaaatatacaagtgtctcagtgtcaaccagtaactcctgaaaatcctcaaaacattattacacataactcttttaattcaaaacatgtgcttccaacagaacacagtttgaatcagtggaatcaggaaagtagttctccactctcaaatgcttgttctgacctagtcactgtgataccatcactgccatcatattgttcttcagagtgccaaactttcgcaaaaataaatcattcaaatggcactcaagcagttgcccggcaagatgcgacattatattgcacccaaagaagtcctgtttgtgaagaaagttatccgtctgtgactctaagaactgctgaagaagaatcagttcccttatggaaaagaggtcctaatgtcctgcatcaaaataagagggctacagggtctactgttatgagaagaaaacgaattgctgaaactaagcggagaaatattttagagcagaaaagacaaaaccctggatctgtaggacagaagtacagtgagcaaattaataattttggacaaagtgtcctgctaagttcaagtgagccaaaacaaactacaaggggtacttcttatattgaagaagtttcagatagtacttctgagtttttgatggctgaaaacttagtgaaagcatcagtgccggaggatgagattctgactgtcttgaatagcaaacagatacagaaatcaaatctacctttaaataaaactcaacaattcaacatctgcacactgtcagctgaagaacagaagatcctagagtcccttaatgatctcaatgaaagactacattatatacaagaatccatttgcaaaaacccatccatcaaaaatactttacaaataataccacttctggagaagagagaagatagaaccagcagctgcagagacaagagataattccagcagaatccgtctaagaagacctttcatgtacttctctaggactagatgcataccgttttgtgaaaaccagccataggaaaacatgtgagcaacaacccccatgaacatttgtcctaactcagattttgtgagcagtgaagtttaacagagcagtgacatttaacaaagcagtgaagtttaacagagttctgagaataccatgaaagacattatgcctgcctaaacaaaaagcaggacataacctagctctgaatacatgccacaaggatgaagcttgtgagtagagcaaacaaacgtttttccaaagaattcacagtgctcctttgcaatttatagatttcatgttgaaatatatgttaaataaaatttctgtttattgaacctctttattaaacctctaacttactgataagatgtttatgaagtatggcatattttgatttttttaattgtaataaatattcttaaagttaccacatcccacaaaatggcccttggtggcagcaatagagcaaaggttacctttttgtatggtgaagggaggccttcctatggctgtacaattacatcgattcttccaaatttcatatttcatacatggcactttggcataccgaaaaaacatgaaatttttcattaaaatgccatgaatcaagccagggccgttggcttatgcctgtaatcccagcactttgcaggccgaggtagacagatggcttgagctcaggagttcgtgaccagcctgggcaaccctgtctctacaaaaaatacaaaaattaaccaggcatggtggcatgcacctgtagtcccagctacttggggtgctgaggcgggaggattacttgagcccaggaggattacttcaacctgggaggttgaggctgcagtgagctgtgtttcgccactgcacaccagcctgggtgacagtgtgagacccagcctcaaaa

SEQ ID NO: 444224 - DNA, 3668 bp, Homo sapiens
  misc_feature (2163)..(2163): n is a, c, g, or t
tgtcaaggacgcgccgtcggttgttgtcaagatggcggctgcagggttgctgccgccccatctgctattgcccggcgaggtcgccgctgcctcagctgccatcgccgctacaggcaccagtgccgctgcgcgggagctagggctgtcgaggccaacccttccgcgcccgtgacgcggggcctgagagacggagtgtagggaggggccgagcaggaggaggaggaagccggagctgccatgagggaggttctgggggcgagcagacaggcggcgctgaagtgaaggatgctggcggggaggcccggaacccggagcgcggtcggggaactgggcactgaatcatcggacaacctcgacagagcccccctcggccctcgggagagcggcgggcatcaccgacctggctcttacctagatatgaaaatccatctggagaaaaatttagaagaagagcgccagatattactgcagcaacaaaaaatatgtcgaaatcgagcacgtaaatattttgtggagtcaaatcggagaaaaaaagcttttgaggagaaacgaaaagaacaggaagaaaaagaacaccaaattagagaacaaatacttcaacaaagaaaacagaagtttgaagaagttactgaaaaattccagcgtgcccatgttcctctttcacagcggaggaaagcagtttcccgaaaaccagttcctccattagaagaggccctcaaacaaattcaggaatccaacttaaaatcagaagtaaaccttcccttttcccgtagaccaacaataaactggagagctatagattctgccttgccttccgcattatcaaaaaatgatcacaagcatcagaaacaactcttatccaaaatcaattgtgagaaagaaatgaatgaaaacatgagggcaaccttggctactagcaaaaatgtgttccagcttaaactggaggaaactcagaaactcctcgaagatcaacatctaagcaatttgcaaaaattttgtgatgaagttaatcagataaccaattctgaaaccctctcaagtatagacagtcttgaggctacagagcatgaagaaatatatttaacacttaataaggagcattccacatccatccagcggaataccatttccctcaaaccagcaaatatgcaatcaactaatctcagctgctttgatgaagataaactggcattctctaaaactcaacatataaataattggcttacaaatttagatgcttcaaatactcagaatgtcacagctttctcagatattttaagtaaatctaatgttctgccttcatgggaatattttaatagtaaagaacaaaatccatctcctttgaatggaacagtggaaagagccacaaatactgctaataattcagtaccctttgtatctagcccacccatgtttgtactagataaaaaatgtgaaaagacctctgaaactagcactatgaggacaactgactccacttctggagcattcaaaagagagagaccattagttactgagagcccaacatttaaatttagcaaatcccaaagcacttcagattctctaacccaggaagtggctacatttccagaccaagagaaatattctgaattaaatcaagaaaatggaactacttcaattcctacttcatgtgtaccagtggcaacgcctttagttttgccatctaatatacagtcagctagaccttcagcaaagaacagtatacacataaaagaaattgatgcagtgcagtgttctgataagttagatgaattgaaagatggtaaagaagaagagataaaatattttaattgcaataaggaagagttgcctttattttcagacagttttcaagatgcctatatacctcacaatcctgattcaaaagatgaaaaacaaaaattagctgaaacatcatccttgtctaatgtaacttctaattatgactttgttggccagcataagaaaatgaaatacaacatccatgagagaaatggtgtgagatttcttaaaagtattttaaagaaagaatctaaatatgaacatggttatcttaaggcattaattataaatcagagctttaagtttggaaatcaaaaagcagcagctatcagagatagtattgaattaacaaaggaaaaaggtgcagaaattccaaagacnattaaaaaactgaggtggtttgatgaaactagcaatatagaaaacaatgctgaaaacagtcattcactgaagaataaaacaggaacaactcaacagcattctcaacaattccacattcaaagtggtgctggaagcaacataattagtgtttctacttgtgctgtaaattctgctgatacaaagaagtccagggaggattctatctctgaaaatgttacgactttaggaggatctggagcagaccatatgcctttgaactgttttataccttcaggttataactttgctaaacatgcctggccagcctcaaaaaaagaagaaagtaaaatccctgtacatgatgattctaaaactaagcaaggtaagccacaaagaggtagagcaaaaataattagaaaaccaggatctgcaaaagtccaatcaggctttatatgtacaaacagaaaaggcgctgtcattcaaccacagtctgcaagcaaagtcaacatatttacacaagctcagggaaaattaattataccttgtcctcctcctcaatctacatcaaatattagaagtggtaaaaatatacaagtgtctcagtgtcaaccagtaactcctgaaaatcctcaaaacattattacacataactcttttaattcaaaacatgtgcttccaacagaacacagtttgaatcagtggaatcaggaaagtagttctccactctcaaatgcttgttctgacctagtcactgtgataccatcactgccatcatattgttcttcagagtgccaaactttcgcaaaaataaatcattcaaatggcactcaagcagttgcccggcaagatgcgacattatattgcacccaaagaagtcctgtttgtgaagaaagttatccgtctgtgactctaagaactgctgaagaagaatcagttcccttatggaaaagaggtcctaatgtcctgcatcaaaataagagggctacagggtctactgttatgagaagaaaacgaattgctgaaactaagcggagaaatattttagagcagaaaagacaaaaccctggatctgtaggacagaagtacagtgagcaaattaataattttggacaaagtgtcctgctaagttcaagtgagccaaaacaaactacaaggggtacttcttatattgaagaagtttcagatagtacttctgagtttttgatggctgaaaacttagtgaaagcatcagtgccggaggatgagattctgactgtcttgaatagcaaacagatacagaaatcaaatctacctttaaataaaactcaacaattcaacatctgcacactgtcagctgaagaacagaagatcctagagtcccttaatgatctcaatgaaagactacattatatacaagaatccatttgcaaaaacccatccatcaaaaatactttacaaataataccacttctggtaagtatttgaagaagctctttttttcttgttttaggaaacttctgattttatgtacacatcaatacaggtaa

SEQ ID NO: 444225 - DNA, 566 bp, Homo sapiens
  misc_feature (6)..(6): n is a, c, g, or t
ggctangtacgaggccggtggtgaatcggccgaggatgggggagggtattatactgcctcagtctgactcctcaacccagcagcaatttgaggggatgagggggaagaggagctgccttttggaggcccccttcacctgcagctatgatgcccttccccttctcccctgtcctcaccatatgccttatccccattctactcccctgctatgcaagtgcccctgtggcttgtccccaaccccctcagcaacaaagctcagctggggaacgagagtaatttgaagaatgcttgaagtcagcgtcttccattccagaaagacccccattcttcctttgggggtatgatgtggaagctggtttcagcccaggacccaccactgaggagaggatctagacaggtgggcctaattccaaggggcccttcctggcctggagaaggccttttacacacacacaacacatacacacacacacacacacacacatatcacagttttcacacagcccctgctgcattctctgtccatctgtctgtttctattaataaagatttgttgatctgttcca

SEQ ID NO: 444226 - DNA, 633 bp, Homo sapiens
  misc_feature (609)..(609): n is a, c, g, or t
  misc_feature (628)..(628): n is a, c, g, or t
agggcgagccgtaccacggcggtggcgggggagcgcttcgtgggcagccggcgggctccgaggccgtgagcgcaaagcctcaggccccggctccctcctgagctgcgccgtgccaggccgcccgccgggatgcagtgggccgtgggccggcggtgggcgtgggccgcgctgctcctggctgtcgcagcggtgctgacccaggtcgtctggctctggctgggtacgcagagcttcgtcttccagcgcgaagagatagcgcagttggcgcggcagtacgctgggctggaccacgagctggccttctctcgtctgatcgtggagctgcggcggctgcacccaggccacgtgctgcccgacgaggagctgcagtgggtgttcgtgaatgcgggtggctggatgggcgccatgtgccttctgcacgcctcgctgtccgagtatgtgctgctcttcggcaccgccttgggctcccgcggccactcggggcgctactgggctgagatctcggataccatcatctctggcaccttccaccagtggagagagggcaccaccaaaagtgaggtcttctacccagagggggaaacggtagtaaaacgggccttggttgangcaaaaaagcttttggaanttggg

SEQ ID NO: 444227 - DNA, 568 bp, Homo sapiens
ctcccttctcacgggaattttcaggataaactggccatccgaaaatagcaacaacccagactggctcctcactcccttttccatcactaaaaatcacagagcagtcagagggacccagtaagaccaaaggaggggaggacagagcatgaaaaccaaaatccatgcaaatgaaatgtaattggcacgaccctcacccccaaatcttacatctcaattcccatcctaaaaagcactcatactttatgcatccccgcagctacacacacacaacacacagcacacgcatgaacacagcacacacacgagcacagcacacacacgagcatacagcacacacacaaacgcacagcacacacagcacacagatgagcacacagcacacacacaaacgcacagcacacacacgcacacacatgcacacacagcacacaaacgcaaggccttttacacacacacaacacatacacacacacacacacacacacatatcacagttttcacacagcccctgctgcattctctgtccatctgtctgtttctattaataaagatttgttgatctgttcca

SEQ ID NO: 444228 - DNA, 437 bp, Homo sapiens
  misc_feature (26)..(26): n is a, c, g, or t
  misc_feature (61)..(61): n is a, c, g, or t
  misc_feature (106)..(106): n is a, c, g, or t
  misc_feature (183)..(183): n is a, c, g, or t
  misc_feature (192)..(192): n is a, c, g, or t
  misc_feature (205)..(205): n is a, c, g, or t
  misc_feature (222)..(222): n is a, c, g, or t
tttctgggaagctccgagtctaggtnagccgcccgtattggaaaggccaggaattcaactnccatgtgaaaatctcgttcttaagttttgtctgtaatggtaaagnacctgtacaatgcttgggacatggcatgtccttcgacaaacgttggttcccttttccataacttatttgatgcttcnaaactcaantttccacccatanagtcctccccgcccganacacacacacacacacacacacacacacacacacacaaacttatttgatacttccaaactcaactttccacccatacagtcctcccgccttttacacacacacaacacatacacacacacacacacacacacatatcacagttttcacacagcccctgctgcattctctgtccatctgtctgtttctattaataaagatttgttgatctgttcca

SEQ ID NO: 444229 - DNA, 1711 bp, Homo sapiens
agggcgagccgtaccacggcggtggcgggggagcgcttcgtgggcagccggcgggctccgaggccgtgagcgcaaagcctcaggccccggctccctcctgagctgcgccgtgccaggccgcccgccgggatgcagtgggccgtgggccggcggtgggcgtgggccgcgctgctcctggctgtcgcagcggtgctgacccaggtcgtctggctctggctgggtacgcagagcttcgtcttccagcgcgaagagatagcgcagttggcgcggcagtacgctgggctggaccacgagctggccttctctcgtctgatcgtggagctgcggcggctgcacccaggccacgtgctgcccgacgaggagctgcagtgggtgttcgtgaatgcgggtggctggatgggcgccatgtgccttctgcacgcctcgctgtccgagtatgtgctgctcttcggcaccgccttgggctcccgcggccactcggggcgctactgggctgagatctcggataccatcatctctggcaccttccaccagtggagagagggcaccaccaaaagtgaggtcttctacccaggggagacggtagtacacgggcctggtgaggcaacagctgtggagtgggggccaaacacatggatggtggagtacggccggggcgtcatcccatccaccctggccttcgcgctggccgacactgtcttcagcacccaggacttcctcaccctcttctatactcttcgctcctatgctcggggcctccggcttgagctcaccacctacctctttggccaggacccttgaccagccaggcctgaaggaagacctgcggatggacaggagcgggcaggcccgcacatatccacttgctggagcccatgtttacagacagggacatacaccatgcagatcctgagttcctgctgtatgagcagggatatccatgcttatgtatccaaacacagagacccatgggaacaaatgagacacatatagatactgagacctgtgtgtacagtaggaccatgcactcacacccatctggagagggagcccccggtataccaagggagccagttgtgttcagacacacacatcacagcttgactcactaactgaggcctttccatagctccacagcttcccacctcctccccaccaaaccggggttctagagttaaggatgggggagggtattatactgcctcagtctgactcctcaacccagcagcaatttgaggggatgagggggaagaggagctgccttttggaggcccccttcacctgcagctatgatgcccttccccttctcccctgtcctcaccatatgccttatccccattctactcccctgctatgcaagtgcccctgtggcttgtccccaaccccctcagcaacaaagctcagctggggaacgagagtaatttgaagaatgcttgaagtcagcgtcttccattccagaaagacccccattcttcctttgggggtatgatgtggaagctggtttcagcccaggacccaccactgaggagaggatctagacaggtgggcctaattccaaggggcccttcctggcctggagaaggccttttacacacacacaacacatacacacacacacacacacacacatatcacagttttcacacagcccctgctgcattctctgtccatctgtctgtttctattaataaagatttgttgatctgttcca

SEQ ID NO: 444230 - DNA, 2042 bp, Homo sapiens
agggcgagccgtaccacggcggtggcgggggagcgcttcgtgggcagccggcgggctccgaggccgtgagcgcaaagcctcaggccccggctccctcctgagctgcgccgtgccaggccgcccgccgggatgcagtgggccgtgggccggcggtgggcgtgggccgcgctgctcctggctgtcgcagcggtgctgacccaggtcgtctggctctggctgggtacgcagagcttcgtcttccagcgcgaagagatagcgcagttggcgcggcagtacgctgggctggaccacgagctggccttctctcgtctgatcgtggagctgcggcggctgcacccaggccacgtgctgcccgacgaggagctgcagtgggtgttcgtgaatgcgggtggctggatgggcgccatgtgccttctgcacgcctcgctgtccgagtatgtgctgctcttcggcaccgccttgggctcccgcggccactcggggcgctactgggctgagatctcggataccatcatctctggcaccttccaccagtggagagagggcaccaccaaaagtgaggtcttctacccaggggagacggtagtacacgggcctggtgaggcaacagctgtggagtgggggccaaacacatggatggtggagtacggccggggcgtcatcccatccaccctggccttcgcgctggccgacactgtcttcagcacccaggacttcctcaccctcttctatactcttcgctcctatgctcggggcctccggcttgagctcaccacctacctctttggccaggacccttgaccagccaggcctgaaggaagacctgcggatggacaggagcgggcaggcccgcacatatccacttgctggagcccatgtttacagacagggacatacaccatgcagatcctgagttcctgctgtatgagcagggatatccatgcttatgtatccaaacacagagacccatgggaacaaatgagacacatatagatactgagacctgtgtgtacagtaggaccatgcactcacacccatctggagagggagcccccggtataccaagggagccagttgtgttcagacacacacatcacagcttgactcactaactgaggcctttccatagctccacagcttcccacctcctccccaccaaaccggggttctagagttaaggatgggggagggtattatactgcctcagtctgactcctcaacccagcagcaatttgaggggatgagggggaagaggagctgccttttggaggcccccttcacctgcagctatgatgcccttccccttctcccctgtcctcaccatatgccttatccccattctactcccctgctatgcaagtgcccctgtggcttgtccccaaccccctcagcaacaaagctcagctggggaacgagagtaatttgaagaatgcttgaagtcagcgtcttccattccagaaagacccccattcttcctttgggggtatgatgtggaagctggtttcagcccaggacccaccactgaggagaggatctagacaggtgggcctaattccaaggggcccttcctggcctggagaaggccttttacacacacacaacacatacacacacacacacacacacacatatcacagttttcacacagcccctgctgcattctctgtccatctgtctgtttctattaataaagatttgttgatctgttccaaaaaaaaaaaacaaaaactggaaaatagtctctctctccccttggtccaagggtcacatatagagcgcaactcctattagttctctaagggccgtgcacgcgcaggtgggtctacaagaaggctctccccctaataaggaggagcttatcaccttttattgataacgcctaaataataatttccttatctggtccaaagtacggtatgcacttttctaacacttcaaacaatttccttatataaatctcagcgcctgagaataacccgtgtgaatgcggcgcaaattgatgcttaagcccccaccaggtcttataaaaaggggaaccccta

SEQ ID NO: 444231 - DNA, 1661 bp, Homo sapiens
agggcgagccgtaccacggcggtggcgggggagcgcttcgtgggcagccggcgggctccgaggccgtgagcgcaaagcctcaggccccggctccctcctgagctgcgccgtgccaggccgcccgccgggatgcagtgggccgtgggccggcggtgggcgtgggccgcgctgctcctggctgtcgcagcggtgctgacccaggtcgtctggctctggctgggtacgcagagcttcgtcttccagcgcgaagagatagcgcagttggcgcggcagtacgctgggctggaccacgagctggccttctctcgtctgatcgtggagctgcggcggctgcacccaggccacgtgctgcccgacgaggagctgcagtgggtgttcgtgaatgcgggtggctggatgggcgccatgtgccttctgcacgcctcgctgtccgagtatgtgctgctcttcggcaccgccttgggctcccgcggccactcggggcgctactgggctgagatctcggataccatcatctctggcaccttccaccagtggagagagggcaccaccaaaagtgaggtcttctacccaggggagacggtagtacacgggcctggtgaggcaacagctgtggagtgggggccaaacacatggatggtggagtacggccggggcgtcatcccatccaccctggccttcgcgctggccgacactgtcttcagcacccaggacttcctcaccctcttctatactcttcgctcctatgctcggggcctccggcttgagctcaccacctacctctttggccaggacccttgaccagccaggcctgaaggaagacctgcggatggacaggagcgggcaggcccgcacatatccacttgctggagcccatgtttacagacagggacatacaccatgcagatcctgagttcctgctgtatgagcagggatatccatgcttatgtatccaaacacagagacccatgggaacaaatgagacacatatagatactgagacctgtgtgtacagtaggaccatgcactcacacccatctggagagggagcccccggtataccaagggagccagttgtgttcagacacacacatcacagcttgactcactaactgaggcctttccatagctccacagcttcccacctcctccccaccaaaccggggttctagagttaaggatgggggagggtattatactgcctcagtctgactcctcaacccagcagcaatttgaggggatgagggggaagaggagctgccttttggaggcccccttcacctgcagctatgatgcccttccccttctcccctgtcctcaccatatgccttatccccattctactcccctgctatgcaagtgcccctgtggcttgtccccaaccccctcagcaacaaagctcagctggggaacgagagtaatttgaagaatgcttgaagtcagcgtcttccattccagaaagacccccattcttcctttgggggtatgatgtggaagctggtttcagcccaggacccaccactgaggagaggatcttttacacacacacaacacatacacacacacacacacacacacatatcacagttttcacacagcccctgctgcattctctgtccatctgtctgtttctattaataaagatttgttgatctgttcca

SEQ ID NO: 444232 - DNA, 1556 bp, Homo sapiens
agggcgagccgtaccacggcggtggcgggggagcgcttcgtgggcagccggcgggctccgaggccgtgagcgcaaagcctcaggccccggctccctcctgagctgcgccgtgccaggccgcccgccgggatgcagtgggccgtgggccggcggtgggcgtgggccgcgctgctcctggctgtcgcagcggtgctgacccaggtcgtctggctctggctgggtacgcagagcttcgtcttccagcgcgaagagatagcgcagttggcgcggcagtacgctgggctggaccacgagctggccttctctcgtctgatcgtggagctgcggcggctgcacccaggccacgtgctgcccgacgaggagctgcagtgggtgttcgtgaatgcgggtggctggatgggcgccatgtgccttctgcacgcctcgctgtccgagtatgtgctgctcttcggcaccgccttgggctcccgcggccactcggggcgctactgggctgagatctcggataccatcatctctggcaccttccaccagtggagagagggcaccaccaaaagtgaggtcttctacccaggggagacggtagtacacgggcctggtgaggcaacagctgtggagtgggggccaaacacatggatggtggagtacggccggggcgtcatcccatccaccctggccttcgcgctggccgacactgtcttcagcacccaggacttcctcaccctcttctatactcttcgctcctatgctcggggcctccggcttgagctcaccacctacctctttggccaggacccttgaccagccaggcctgaaggaagacctgcggatggacaggagcgggcaggcccgcacatatccacttgctggagcccatgtttacagacagggacatacaccatgcagatcctgagttcctgctgtatgagcagggatatccatgcttatgtatccaaacacagagacccatgggaacaaatgagacacatatagatactgagacctgtgtgtacagtaggaccatgcactcacacccatctggagagggagcccccggtataccaagggagccagttgtgttcagacacacacatcacagcttgactcactaactgaggcctttccatagctccacagcttcccttccccttctcccctgtcctcaccatatgccttatccccattctactcccctgctatgcaagtgcccctgtggcttgtccccaaccccctcagcaacaaagctcagctggggaacgagagtaatttgaagaatgcttgaagtcagcgtcttccattccagaaagacccccattcttcctttgggggtatgatgtggaagctggtttcagcccaggacccaccactgaggagaggatctagacaggtgggcctaattccaaggggcccttcctggcctggagaaggccttttacacacacacaacacatacacacacacacacacacacacatatcacagttttcacacagcccctgctgcattctctgtccatctgtctgtttctattaataaagatttgttgatctgttcca

SEQ ID NO: 444233 - DNA, 1508 bp, Homo sapiens
agggcgagccgtaccacggcggtggcgggggagcgcttcgtgggcagccggcgggctccgaggccgtgagcgcaaagcctcaggccccggctccctcctgagctgcgccgtgccaggccgcccgccgggatgcagtgggccgtgggccggcggtgggcgtgggccgcgctgctcctggctgtcgcagcggtgctgacccaggtcgtctggctctggctgggtacgcagagcttcgtcttccagcgcgaagagatagcgcagttggcgcggcagtacgctgggctggaccacgagctggccttctctcgtctgatcgtggagctgcggcggctgcacccaggccacgtgctgcccgacgaggagctgcagtgggtgttcgtgaatgcgggtggctggatgggcgccatgtgccttctgcacgcctcgctgtccgagtatgtgctgctcttcggcaccgccttgggctcccgcggccactcggggcgctactgggctgagatctcggataccatcatctctggcaccttccaccagtggagagagggcaccaccaaaagtgaggtcttctacccaggggagacggtagtacacgggcctggtgaggcaacagctgtggagtgggggccaaacacatggatggtggagtacggccggggcgtcatcccatccaccctggccttcgcgctggccgacactgtcttcagcacccaggacttcctcaccctcttctatactcttcgctcctatgctcggggcctccggcttgagctcaccacctacctctttggccaggacccttgaccagccaggcctgaaggaagacctgcggatggacaggagcgggcaggcccgcacatatccacttgctggagcccatgtttacagacagggacatacaccatgcagatcctgagttcctgctgtatgagcagggatatccatgcttatgtatccaaacacagagacccatgggaacaaatgagacacatatagatactgagacctgtgtgtacagtaggaccatgcactcacacccatctggagagggagcccccggtataccaagggagccagttgtgttcagacacacacatcacagcttgactcactaactgaggcctttccatagctccacagcttcccccctgctatgcaagtgcccctgtggcttgtccccaaccccctcagcaacaaagctcagctggggaacgagagtaatttgaagaatgcttgaagtcagcgtcttccattccagaaagacccccattcttcctttgggggtatgatgtggaagctggtttcagcccaggacccaccactgaggagaggatctagacaggtgggcctaattccaaggggcccttcctggcctggagaaggccttttacacacacacaacacatacacacacacacacacacacacatatcacagttttcacacagcccctgctgcattctctgtccatctgtctgtttctattaataaagatttgttgatctgttcca

SEQ ID NO: 444234 - DNA, 1664 bp, Homo sapiens
agggcgagccgtaccacggcggtggcgggggagcgcttcgtgggcagccggcgggctccgaggccgtgagcgcaaagcctcaggccccggctccctcctgagctgcgccgtgccaggccgcccgccgggatgcagtgggccgtgggccggcggtgggcgtgggccgcgctgctcctggctgtcgcagcggtgctgacccaggtcgtctggctctggctgggtacgcagagcttcgtcttccagcgcgaagagatagcgcagttggcgcggcagtacgctgggctggaccacgagctggccttctctcgtctgatcgtggagctgcggcggctgcacccaggccacgtgctgcccgacgaggagctgcagtgggtgttcgtgaatgcgggtggctggatgggcgccatgtgccttctgcacgcctcgctgtccgaggcgctactgggctgagatctcggataccatcatctctggcaccttccaccagtggagagagggcaccaccaaaagtgaggtcttctacccaggggagacggtagtacacgggcctggtgaggcaacagctgtggagtgggggccaaacacatggatggtggagtacggccggggcgtcatcccatccaccctggccttcgcgctggccgacactgtcttcagcacccaggacttcctcaccctcttctatactcttcgctcctatgctcggggcctccggcttgagctcaccacctacctctttggccaggacccttgaccagccaggcctgaaggaagacctgcggatggacaggagcgggcaggcccgcacatatccacttgctggagcccatgtttacagacagggacatacaccatgcagatcctgagttcctgctgtatgagcagggatatccatgcttatgtatccaaacacagagacccatgggaacaaatgagacacatatagatactgagacctgtgtgtacagtaggaccatgcactcacacccatctggagagggagcccccggtataccaagggagccagttgtgttcagacacacacatcacagcttgactcactaactgaggcctttccatagctccacagcttcccacctcctccccaccaaaccggggttctagagttaaggatgggggagggtattatactgcctcagtctgactcctcaacccagcagcaatttgaggggatgagggggaagaggagctgccttttggaggcccccttcacctgcagctatgatgcccttccccttctcccctgtcctcaccatatgccttatccccattctactcccctgctatgcaagtgcccctgtggcttgtccccaaccccctcagcaacaaagctcagctggggaacgagagtaatttgaagaatgcttgaagtcagcgtcttccattccagaaagacccccattcttcctttgggggtatgatgtggaagctggtttcagcccaggacccaccactgaggagaggatctagacaggtgggcctaattccaaggggcccttcctggcctggagaaggccttttacacacacacaacacatacacacacacacacacacacacatatcacagttttcacacagcccctgctgcattctctgtccatctgtctgtttctattaataaagatttgttgatctgttcca

SEQ ID NO: 444235 - DNA, 1180 bp, Homo sapiens
agggcgagccgtaccacggcggtggcgggggagcgcttcgtgggcagccggcgggctccgaggccgtgagcgcaaagcctcaggccccggctccctcctgagctgcgccgtgccaggccgcccgccgggatgcagtgggccgtgggccggcggtgggcgtgggccgcgctgctcctggctgtcgcagcggtgctgacccaggtcgtctggctctggctgggtacgcagagcttcgtcttccagcgcgaagagatagcgcagttggcgcggcagtacgctgggctggaccacgagctggccttctctcgtctgatcgtggagctgcggcggctgcacccaggccacgtgctgcccgacgaggagctgcagtgggtgttcgtgaatgcgggtggctggatgggcgccatgtgccttctgcacgcctcgctgtccgagtatgtgctgctcttcggcaccgccttgggctcccgcggccactcggggcgctactgggctgagatctcggataccatcatctctggcaccttccaccagtggagagagggcaccaccaaaagtgaggtcttctacccaggggagacggtagtacacgggcctggtgaggcaacagctgtggagtgggggccaaacacatggatggtggagtacggccggggcgtcatcccatccaccctggccttcgcgctggccgacactgtcttcagcacccaggacttcctcaccctcttctatactcttcgctcctatgctcggggcctccggcttgagctcaccacctacctctttggccaggacccttgaccagccaggcctgaaggaagacctgcggatggacaggagcgggcaggcccgcacatatccacttgctggagcccatgtttacagacagggacatacaccatgcagatcctgagttcctgctgtatgagcagggatatccatgcttatgtatccaaacacagagacccatgggaacaaatgagacacatatagatactgagacctgtgtgtacagtaggaccatgcactcacacccatctggagagggagcccccggtataccaagggagccagttgtgttcagcacacacacacacatatcacagttttcacacagcccctgctgcattctctgtccatctgtctgtttctattaataaagatttgttgatctgttcca

SEQ ID NO: 444236 - DNA, 1734 bp, Homo sapiens
agggcgagccgtaccacggcggtggcgggggagcgcttcgtgggcagccggcgggctccgaggccgtgagcgcaaagcctcaggccccggctccctcctgagctgcgccgtgccaggccgcccgccgggatgcagtgggccgtgggccggcggtgggcgtgggccgcgctgctcctggctgtcgcagcggtgctgacccaggtcgtctggctctggctgggtacgcagagcttcgtcttccagcgcgaagagatagcgcagttggcgcggcagtacgctgggctggaccacgagctggccttctctcgtctgatcgtggagctgcggcggctgcacccaggccacgtgctgcccgacgaggagctgcagtgggtgttcgtgaatgcgggtggctggatgggcgccatgtgccttctgcacgcctcgctgtccgagtatgtgctgctcttcggcaccgccttgggctcccgcggccactcggtgtcatgtgcgattgtcactcagggcgctactgggctgagatctcggataccatcatctctggcaccttccaccagtggagagagggcaccaccaaaagtgaggtcttctacccaggggagacggtagtacacgggcctggtgaggcaacagctgtggagtgggggccaaacacatggatggtggagtacggccggggcgtcatcccatccaccctggccttcgcgctggccgacactgtcttcagcacccaggacttcctcaccctcttctatactcttcgctcctatgctcggggcctccggcttgagctcaccacctacctctttggccaggacccttgaccagccaggcctgaaggaagacctgcggatggacaggagcgggcaggcccgcacatatccacttgctggagcccatgtttacagacagggacatacaccatgcagatcctgagttcctgctgtatgagcagggatatccatgcttatgtatccaaacacagagacccatgggaacaaatgagacacatatagatactgagacctgtgtgtacagtaggaccatgcactcacacccatctggagagggagcccccggtataccaagggagccagttgtgttcagacacacacatcacagcttgactcactaactgaggcctttccatagctccacagcttcccacctcctccccaccaaaccggggttctagagttaaggatgggggagggtattatactgcctcagtctgactcctcaacccagcagcaatttgaggggatgagggggaagaggagctgccttttggaggcccccttcacctgcagctatgatgcccttccccttctcccctgtcctcaccatatgccttatccccattctactcccctgctatgcaagtgcccctgtggcttgtccccaaccccctcagcaacaaagctcagctggggaacgagagtaatttgaagaatgcttgaagtcagcgtcttccattccagaaagacccccattcttcctttgggggtatgatgtggaagctggtttcagcccaggacccaccactgaggagaggatctagacaggtgggcctaattccaaggggcccttcctggcctggagaaggccttttacacacacacaacacatacacacacacacacacacacacatatcacagttttcacacagcccctgctgcattctctgtccatctgtctgtttctattaataaagatttgttgatctgttcca

SEQ ID NO: 444237 - DNA, 1967 bp, Homo sapiens
agggcgagccgtaccacggcggtggcgggggagcgcttcgtgggcagccggcgggctccgaggccgtgagcgcaaagcctcaggccccggctccctcctgagctgcgccgtgccaggccgcccgccgggatgcagtgggccgtgggccggcggtgggcgtgggccgcgctgctcctggctgtcgcagcggtgctgacccaggtcgtctggctctggctgggtacgcagagcttcgtcttccagcgcgaagagatagcgcagttggcgcggcagtacgctggtgagcgggcagagggcagggaggggagcggccggcctgggagcggagcctagggttccgaaggcgccatccccggacctaggaccggtgccagccctgactccgccgcccctctgcctccgccagggctggaccacgagctggccttctctcgtctgatcgtggagctgcggcggctgcacccaggccacgtgctgcccgacgaggagctgcagtgggtgttcgtgaatgcgggtggctggatgggcgccatgtgccttctgcacgcctcgctgtccgagtatgtgctgctcttcggcaccgccttgggctcccgcggccactcgggtcagtgctagcggcgggccagactgggaggctggggttgtaaaggggcccatgccctcctttctgatgtttggctgggccatgcaatggcgcgaataccctgatagtgtcatgtgcgattgtcactcagggcgctactgggctgagatctcggataccatcatctctggcaccttccaccagtggagagagggcaccaccaaaagtgaggtcttctacccaggggagacggtagtacacgggcctggtgaggcaacagctgtggagtgggggccaaacacatggatggtggagtacggccggggcgtcatcccatccaccctggccttcgcgctggccgacactgtcttcagcacccaggacttcctcaccctcttctatactcttcgctcctatgctcggggcctccggcttgagctcaccacctacctctttggccaggacccttgaccagccaggcctgaaggaagacctgcggatggacaggagcgggcaggcccgcacatatccacttgctggagcccatgtttacagacagggacatacaccatgcagatcctgagttcctgctgtatgagcagggatatccatgcttatgtatccaaacacagagacccatgggaacaaatgagacacatatagatactgagacctgtgtgtacagtaggaccatgcactcacacccatctggagagggagcccccggtataccaagggagccagttgtgttcagacacacacatcacagcttgactcactaactgaggcctttccatagctccacagcttcccacctcctccccaccaaaccggggttctagagttaaggatgggggagggtattatactgcctcagtctgactcctcaacccagcagcaatttgaggggatgagggggaagaggagctgccttttggaggcccccttcacctgcagctatgatgcccttccccttctcccctgtcctcaccatatgccttatccccattctactcccctgctatgcaagtgcccctgtggcttgtccccaaccccctcagcaacaaagctcagctggggaacgagagtaatttgaagaatgcttgaagtcagcgtcttccattccagaaagacccccattcttcctttgggggtatgatgtggaagctggtttcagcccaggacccaccactgaggagaggatctagacaggtgggcctaattccaaggggcccttcctggcctggagaaggccttttacacacacacaacacatacacacacacacacacacacacatatcacagttttcacacagcccctgctgcattctctgtccatctgtctgtttctattaataaagatttgttgatctgttcca

SEQ ID NO: 444238 - DNA, 1128 bp, Homo sapiens
agggcgagccgtaccacggcggtggcgggggagcgcttcgtgggcagccggcgggctccgaggccgtgagcgcaaagcctcaggccccggctccctcctgagctgcgccgtgccaggccgcccgccgggatgcagtgggccgtgggccggcggtgggcgtgggccgcgctgctcctggctgtcgcagcggtgctgacccaggtcgtctggctctggctgggtacgcagagcttcgtcttccagcgcgaagagatagcgcagttggcgcggcagtacgctgggctggaccacgagctggccttctctcgtctgatcgtggagctgcggcggctgcacccaggccacgtgctgcccgacgaggagctgcagtgggtgttcgtgaatgcgggtggctggatgggcgccatgtgccttctgcacgcctcgctgtccgagtatgtgctgctcttcggcaccgccttgggctcccgcggccactcggggcgctactgggctgagatctcggataccatcatctctggcaccttccaccagtggagagagggcaccaccaaaagtgaggtcttctacccaggggagacggtagtacacgggcctggtgaggcaacagctgtggagtgggggccaaacacatggatggtggagtacggccggggcgtcatcccatccaccctggccttcgcgctggccgacactgtcttcagcacccaggacttcctcaccctcttctatactcttcgctcctatgctcggggcctccggcttgagctcaccacctacctctttggccaggacccttgaccagccaggcctgaaggaagacctgcggatggacaggagcgggcaggcccgcacatatccacttgctggagcccatgtttacagacagggacatacaccatgcagatcctgagttcctgctgtatgagcagggatatccatgcttatgtatccaaacacagagacccatgggaacaaatgagacacatatagatactgagacctgtgtgtacagtaggaccatgcactcaccacacacacacacatatcacagttttcacacagcccctgctgcattctctgtccatctgtctgtttctattaataaagatttgttgatctgttcca

SEQ ID NO: 444239 - DNA, 1744 bp, Homo sapiens
agggcgagccgtaccacggcggtggcgggggagcgcttcgtgggcagccggcgggctccgaggccgtgagcgcaaagcctcaggccccggctccctcctgagctgcgccgtgccaggccgcccgccgggatgcagtgggccgtgggccggcggtgggcgtgggccgcgctgctcctggctgtcgcagcggtgctgacccaggtcgtctggctctggctgggtacgcagagcttcgtcttccagcgcgaagagatagcgcagttggcgcggcagtacgctggtgagcgggcagagggcagggaggggagcggccggcctgggagcggagcctagggttccgaaggcgccatccccggacctaggaccggtgccagccctgactccgccgcccctctgcctccgccagggctggaccacgagctggccttctctcgtctgatcgtggagctgcggcggctgcacccaggccacgtgctgcccgacgaggagctgcagtgggtgttcgtgaatgcgggtggctggatgggcgccatgtgccttctgcacgcctcgctgtccgagtatgtgctgctcttcggcaccgccttgggctcccgcggccactcgggggagacggtagtacacgggcctggtgaggcaacagctgtggagtgggggccaaacacatggatggtggagtacggccggggcgtcatcccatccaccctggccttcgcgctggccgacactgtcttcagcacccaggacttcctcaccctcttctatactcttcgctcctatgctcggggcctccggcttgagctcaccacctacctctttggccaggacccttgaccagccaggcctgaaggaagacctgcggatggacaggagcgggcaggcccgcacatatccacttgctggagcccatgtttacagacagggacatacaccatgcagatcctgagttcctgctgtatgagcagggatatccatgcttatgtatccaaacacagagacccatgggaacaaatgagacacatatagatactgagacctgtgtgtacagtaggaccatgcactcacacccatctggagagggagcccccggtataccaagggagccagttgtgttcagacacacacatcacagcttgactcactaactgaggcctttccatagctccacagcttcccacctcctccccaccaaaccggggttctagagttaaggatgggggagggtattatactgcctcagtctgactcctcaacccagcagcaatttgaggggatgagggggaagaggagctgccttttggaggcccccttcacctgcagctatgatgcccttccccttctcccctgtcctcaccatatgccttatccccattctactcccctgctatgcaagtgcccctgtggcttgtccccaaccccctcagcaacaaagctcagctggggaacgagagtaatttgaagaatgcttgaagtcagcgtcttccattccagaaagacccccattcttcctttgggggtatgatgtggaagctggtttcagcccaggacccaccactgaggagaggatctagacaggtgggcctaattccaaggggcccttcctggcctggagaaggccttttacacacacacaacacatacacacacacacacacacacacatatcacagttttcacacagcccctgctgcattctctgtccatctgtctgtttctattaataaagatttgttgatctgttcca

SEQ ID NO: 444240 - DNA, 1597 bp, Homo sapiens
aatagtgaaacaatttacttaagaaatagagcactggacttcccagtatatttgaggttgggtgtatgcatcgcaggcatggtggttgaacagctacacttttcagataaagcctcacaagtcctggaactacccctttcctagctacaagcccagcccaggtttagctaaatttctgcttgattcgagtgaggcttgggagtgcagacttccatacagtgggtccatggccaagcgaggtagccgtccatggcttctccaaagagaggacgtgggtcagatgatgccacagaacatttaggagtggccatctgggccagcccagtgaggtagggctttttgtttttctgaagctccctctccattccccacccctagttagtccatgggccagggaagcagcagccatggaagggcagggcagagctggcttttcacttgggtgctccctgtcccccaggggagacggtagtacacgggcctggtgaggcaacagctgtggagtgggggccaaacacatggatggtggagtacggccggggcgtcatcccatccaccctggccttcgcgctggccgacactgtcttcagcacccaggacttcctcaccctcttctatactcttcgctcctatgctcggggcctccggcttgagctcaccacctacctctttggccaggacccttgaccagccaggcctgaaggaagacctgcggatggacaggagcgggcaggcccgcacatatccacttgctggagcccatgtttacagacagggacatacaccatgcagatcctgagttcctgctgtatgagcagggatatccatgcttatgtatccaaacacagagacccatgggaacaaatgagacacatatagatactgagacctgtgtgtacagtaggaccatgcactcacacccatctggagagggagcccccggtataccaagggagccagttgtgttcagacacacacatcacagcttgactcactaactgaggcctttccatagctccacagcttcccacctcctccccaccaaaccggggttctagagttaaggatgggggagggtattatactgcctcagtctgactcctcaacccagcagcaatttgaggggatgagggggaagaggagctgccttttggaggcccccttcacctgcagctatgatgcccttccccttctcccctgtcctcaccatatgccttatccccattctactcccctgctatgcaagtgcccctgtggcttgtccccaaccccctcagcaacaaagctcagctggggaacgagagtaatttgaagaatgcttgaagtcagcgtcttccattccagaaagacccccattcttcctttgggggtatgatgtggaagctggtttcagcccaggacccaccactgaggagaggatctagacaggtgggcctaattccaaggggcccttcctggcctggagaaggccttttacacacacacaacacatacacacacacacacacacacacatatcacagttttcacacagcccctgctgcattctctgtccatctgtctgtttctattaataaagatttgttgatctgttcca

SEQ ID NO: 444241 - DNA, 1493 bp, Homo sapiens
agggcgagccgtaccacggcggtggcgggggagcgcttcgtgggcagccggcgggctccgaggccgtgagcgcaaagcctcaggccccggctccctcctgagctgcgccgtgccaggccgcccgccgggatgcagtgggccgtgggccggcggtgggcgtgggccgcgctgctcctggctgtcgcagcggtgctgacccaggtcgtctggctctggctgggtacgcagagcttcgtcttccagcgcgaagagatagcgcagttggcgcggcagtacgctgggctggaccacgagctggccttctctcgtctgatcgtggagctgcggcggctgcacccaggccacgtgctgcccgacgaggagctgcagtgggtgttcgtgaatgcgggtggctggatgggcgccatgtgccttctgcacgcctcgctgtccgagtatgtgctgctcttcggcaccgccttgggctcccgcggccactcggggcgctactgggctgagatctcggataccatcatctctggcaccttccaccagtggagagagggcaccaccaaaagtgaggtcttctacccaggacccttgaccagccaggcctgaaggaagacctgcggatggacaggagcgggcaggcccgcacatatccacttgctggagcccatgtttacagacagggacatacaccatgcagatcctgagttcctgctgtatgagcagggatatccatgcttatgtatccaaacacagagacccatgggaacaaatgagacacatatagatactgagacctgtgtgtacagtaggaccatgcactcacacccatctggagagggagcccccggtataccaagggagccagttgtgttcagacacacacatcacagcttgactcactaactgaggcctttccatagctccacagcttcccacctcctccccaccaaaccggggttctagagttaaggatgggggagggtattatactgcctcagtctgactcctcaacccagcagcaatttgaggggatgagggggaagaggagctgccttttggaggcccccttcacctgcagctatgatgcccttccccttctcccctgtcctcaccatatgccttatccccattctactcccctgctatgcaagtgcccctgtggcttgtccccaaccccctcagcaacaaagctcagctggggaacgagagtaatttgaagaatgcttgaagtcagcgtcttccattccagaaagacccccattcttcctttgggggtatgatgtggaagctggtttcagcccaggacccaccactgaggagaggatctagacaggtgggcctaattccaaggggcccttcctggcctggagaaggccttttacacacacacaacacatacacacacacacacacacacacatatcacagttttcacacagcccctgctgcattctctgtccatctgtctgtttctattaataaagatttgttgatctgttcca

SEQ ID NO: 444242 - DNA, 1442 bp, Homo sapiens
aatagtgaaacaatttacttaagaaatagagcactggacttcccagtatatttgaggttgggtgtatgcatcgcaggcatggtggttgaacagctacacttttcagataaagcctcacaagtcctggaactacccctttcctagctacaagcccagcccaggtttagctaaatttctgcttgattcgagtgaggcttgggagtgcagacttccatacagtgggtccatggccaagcgaggtagccgtccatggcttctccaaagagaggacgtgggtcagatgatgccacagaacatttaggagtggccatctgggccagcccagtgaggtagggctttttgtttttctgaagctccctctccattccccacccctagttagtccatgggccagggaagcagcagccatggaagggcagggcagagctggcttttcacttgggtgctccctgtcccccaggggagacggtagtacacgggcctggtgaggcaacagctgtggagtgggggccaaacacatggatggtggagtacggccggggcgtcatcccatccaccctggccttcgcgctggccgacactgtcttcagcacccaggacttcctcaccctcttctatactcttcgctcctatgctcggggcctccggcttgagctcaccacctacctctttggccaggacccttgaccagccaggcctgaaggaagacctgcggatggacaggagcgggcaggcccgcacatatccacttgctggagcccatgtttacagacagggacatacaccatgcagatcctgagttcctgctgtatgagcagggatatccatgcttatgtatccaaacacagagacccatgggaacaaatgagacacatatagatactgagacctgtgtgtacagtaggaccatgcactcacacccatctggagagggagcccccggtataccaagggagccagttgtgttcagacacacacatcacagcttgactcactaactgaggcctttccatagctccacagcttcccttccccttctcccctgtcctcaccatatgccttatccccattctactcccctgctatgcaagtgcccctgtggcttgtccccaaccccctcagcaacaaagctcagctggggaacgagagtaatttgaagaatgcttgaagtcagcgtcttccattccagaaagacccccattcttcctttgggggtatgatgtggaagctggtttcagcccaggacccaccactgaggagaggatctagacaggtgggcctaattccaaggggcccttcctggcctggagaaggccttttacacacacacaacacatacacacacacacacacacacacatatcacagttttcacacagcccctgctgcattctctgtccatctgtctgtttctattaataaagatttgttgatctgttcca

SEQ ID NO: 444243 - DNA, 811 bp, Homo sapiens
agggcgagccgtaccacggcggtggcgggggagcgcttcgtgggcagccggcgggctccgaggccgtgagcgcaaagcctcaggccccggctccctcctgagctgcgccgtgccaggccgcccgccgggatgcagtgggccgtgggccggcggtgggcgtgggccgcgctgctcctggctgtcgcagcggtgctgacccaggtcgtctggctctggctgggtacgcagagcttcgtcttccagcgcgaagagatagcgcagttggcgcggcagtacgctgggctggaccacgagctggccttctctcgtctgatcgtggagctgcggcggctgcacccaggccacgtgctgcccgacgaggagctgcagtgggtgttcgtgaatgcgggtggctggatgggcgccatgtgccttctgcacgcctcgctgtccgagtatgtgctgctcttcggcaccgccttgggctcccgcggccactcggggcgctactgggctgagatctcggataccatcatctctggcaccttccaccagtggagagagggcaccaccaaaagtgaggtcttctacccaggggagacggtagtacacgggcctggtgaggcaacagctgtggagtgggggccaaacacatggatggtggagtacggccggggcgtcatcccatccaccctggccttcgcgctggccgacactgtcttcagcacccaggacttcctcaccctcttctatactcttcggaaaaaaaaaggtgggaggatgtgaattgttagtttttgagttttaccaaataaagtagaatataagaaga

SEQ ID NO: 444244 - DNA, 1478 bp, Homo sapiens
agggcgagccgtaccacggcggtggcgggggagcgcttcgtgggcagccggcgggctccgaggccgtgagcgcaaagcctcaggccccggctccctcctgagctgcgccgtgccaggccgcccgccgggatgcagtgggccgtgggccggcggtgggcgtgggccgcgctgctcctggctgtcgcagcggtgctgacccaggtcgtctggctctggctgggtacgcagagcttcgtcttccagcgcgaagagatagcgcagttggcgcggcagtacgctgggctggaccacgagctggccttctctcgtctgatcgtggagctgcggcggctgcacccaggccacgtgctgcccgacgaggagctgcagtgggtgttcgtgaatgcgggtggctggatgggcgccatgtgccttctgcacgcctcgctgtccgaggcgctactgggctgagatctcggataccatcatctctggcaccttccaccagtggagagagggcaccaccaaaagtgaggtcttctacccagggtgggtaagaaggctctgtcagagaagtgggtcccttcacgcggggggtgcccacaattgcggggagcatggcatggaaaaggagtgtgttgggggggccctcctcatggttcccttcctccaccctcccataagccacaggtgattggttggggcagagctgagggactcttgctttcctctgtcaaggggaaacaaaacataacaacttcctattaaacatgtctgatttttatctgcccaggcacaattttgcccagacagtattccaacaactgttggggagacaatgggtaatcagaaatgctctccatctcaaaaaaaaaaaagaagaagaagaagtggtcagattcaggacgtgttttgaggataagtggtggatttaatgtagggcttgagaaaatgccattgtgtatgactgactggtgtttgaatcctttatcatatcccagggccggtctaggacacataattgtgtgtgcctaggcattcttcccagtttgttgtggctgccctgcccaagcccacatcacctattagcttcacgtccttctctccgcagccaccaaaaccctcaacaggggcatctctgagttcatcgtgatggctgcagacgccgagccactggagatcattctgcacctgccgctgctgtgtgaagacaagaatgtgccctacgtgtttgtgcgctccaagcaggccctggggagagcctgtggggtctccaggcctgtcatcgcctgttctgtcaccatcaaagaaggctcgcagctgaaacagcagatccaatccattcagcagtccattgaaaggctcttagtctaaacctgtggcctctgccacgtgctccctgccagcttcccccctgaggttgtgtatcatattatctgtgttagcatgtagtattttcagctactctctattgttataaaatgtagtactaaatctgg

SEQ ID NO: 444245 - DNA, 1700 bp, Homo sapiens
tatttcggctgggtataaaaaaaaaaaaaaaaaaaaaaaaaaaaaaaaaaaaaagtgagcgcaaagcctcaggccccggctccctcctgagctgcgccgtgccaggccgcccgccgggatgcagtgggccgtgggccggcggtgggcgtgggccgcgctgctcctggctgtcgcagcggtgctgacccaggtcgtctggctctggctgggtacgcagagcttcgtcttccagcgcgaagagatagcgcagttggcgcggcagtacgctgggctggaccacgagctggccttctctcgtctgatcgtggagctgcggcggctgcacccaggccacgtgctgcccgacgaggagctgcagtgggtgttcgtgaatgcgggtggctggatgggcgccatgtgccttctgcacgcctcgctgtccgagtatgtgctgctcttcggcaccgccttgggctcccgcggccactcggggcgctactgggctgagatctcggataccatcatctctggcaccttccaccagtggagagagggcaccaccaaaagtgaggtcttctacccaggggagacggtagtacacgggcctggtgaggcaacagctgtggagtgggggccaaacacatggatggtggagtacggccggggcgtcatcccatccaccctggccttcgcgctggccgacactgtcttcagcacccaggacttcctcaccctcttctatactcttcgctcctatgctcggggcctccggcttgagctcaccacctacctctttggccaggacccttgaccagccaggcctgaaggaagacctgcggatggacaggagcgggcaggcccgcacatatccacttgctggagcccatgtttacagacagggacatacaccatgcagatcctgagttcctgctgtatgagcagggatatccatgcttatgtatccaaacacagagacccatgggaacaaatgagacacatatagatactgagacctgtgtgtacagtaggaccatgcactcacacccatctggagagggagcccccggtataccaagggagccagttgtgttcagacacacacatcacagcttgactcactaactgaggcctttccatagctccacagcttcccacctcctccccaccaaaccggggttctagagttaaggatgggggagggtattatactgcctcagtctgactcctcaacccagcagcaatttgaggggatgagggggaagaggagctgccttttggaggcccccttcacctgcagctatgatgcccttccccttctcccctgtcctcaccatatgccttatccccattctactcccctgctatgcaagtgcccctgtggcttgtccccaaccccctcagcaacaaagctcagctggggaacgagagtaatttgaagaatgcttgaagtcagcgtcttccattccagaaagacccccattcttcctttgggggtatgatgtggaagctggtttcagcccaggacccaccactgaggagaggatctagacaggtgggcctaattccaaggggcccttcctggcctggagaaggccttttacacacacacaacacatacacacacacacacacacacacatatcacagttttcacacagcccctgctgcattctctgtccatctgtctgtttctattaataaagatttgttgatctgttcca

SEQ ID NO: 444246 - DNA, 2027 bp, Homo sapiens
agggcgagccgtaccacggcggtggcgggggagcgcttcgtgggcagccggcgggctccgaggccgtgagcgcaaagcctcaggccccggctccctcctgagctgcgccgtgccaggccgcccgccgggatgcagtgggccgtgggccggcggtgggcgtgggccgcgctgctcctggctgtcgcagcggtgctgacccaggtcgtctggctctggctgggtacgcagagcttcgtcttccagcgcgaagagatagcgcagttggcgcggcagtacgctgggctggaccacgagctggccttctctcgtctgatcgtggagctgcggcggctgcacccaggccacgtgctgcccgacgaggagctgcagtgggtgttcgtgaatgcgggtggctggatgggcgccatgtgccttctgcacgcctcgctgtccgagtatgtgctgctcttcggcaccgccttgggctcccgcggccactcggggcgctactgggctgagatctcggataccatcatctctggcaccttccaccagtggagagagggcaccaccaaaagtgaggtcttctacccaggggagacggtagtacacgggcctggtgaggcaacagctgtggagtgggggccaaacacatggatggtggagtacggccggggcgtcatcccatccaccctggccttcgcgctggccgacactgtcttcagcacccaggacttcctcaccctcttctatactcttcgctcctatgctcggggcctccggcttgagctcaccacctacctctttggccaggacccttgaccagccaggcctgaaggaagacctgcggatggacaggagcgggcaggcccgcacatatccacttgctggagcccatgtttacagacagggacatacaccatgcagatcctgagttcctgctgtatgagcagggatatccatgcttatgtatccaaacacagagacccatgggaacaaatgagacacatatagatactgagacctgtgtgtacagtaggaccatgcactcacacccatctggagagggagcccccggtataccaagggagccagttgtgttcagacacacacatcacagcttgactcactaactgaggcctttccatagctccacagcttcccacctcctccccaccaaaccggggttctagagttaaggatgggggagggtattatactgcctcagtctgactcctcaacccagcagcaatttgaggggatgagggggaagaggagctgccttttggaggcccccttcacctgcagctatgatgcccttccccttctcccctgtcctcaccatatgccttatccccattctactcccctgctatgcaagtgcccctgtggcttgtccccaaccccctcagcaacaaagctcagctggggaacgagagtaatttgaagaatgcttgaagtcagcgtcttccattccagaaagacccccattcttcctttgggggtatgatgtggaagctggtttcagcccaggacccaccactgaggagaggatctagacaggtgggcctaattccaaggggcccttcctggcctggagaaggccttttacacacacacaacacatacacacacacacacacacacacatatcacagttttcacacagcccctgctgcattctctgtccatctgtctgtttctattaataaagatttgttgatctgttccaaaaaaaaaaaaaaaaaaaaaaaaaaaaacactttttgggccccctgggccctttaggaacgtgttttaagacccttgcggtggggcccggggcccccagttgtgtgttagcgtgaaccctggtgcccatgctctggctccctcaaagagaaccccgggatcacagagaatcatggcttagggtattcccccccgattaaaaaaccccgcgcgggggacaaccggcttcttccgagcaacattcccgagaggcgttccaaggggcaccacggggcgttctcacccacgggattccaaggaaccccatattcaattac

SEQ ID NO: 444247 - DNA, 1387 bp, Homo sapiens
agggcgagccgtaccacggcggtggcgggggagcgcttcgtgggcagccggcgggctccgaggccgtgagcgcaaagcctcaggccccggctccctcctgagctgcgccgtgccaggccgcccgccgggatgcagtgggccgtgggccggcggtgggcgtgggccgcgctgctcctggctgtcgcagcggtgctgacccaggtcgtctggctctggctgggtacgcagagcttcgtcttccagcgcgaagagatagcgcagttggcgcggcagtacgctgggctggaccacgagctggccttctctcgtctgatcgtggagctgcggcggctgcacccaggccacgtgctgcccgacgaggagctgcagtgggtgttcgtgaatgcgggtggctggatgggcgccatgtgccttctgcacgcctcgctgtccgagtatgtgctgctcttcggcaccgccttgggctcccgcggccactcggggcgctactgggctgagatctcggataccatcatctctggcaccttccaccagtggagagagggcaccaccaaaagtgaggtcttctacccaggggagacggtagtacacgggcctggtgaggcaacagctgtggagtgggggccaaacacatggatggtggagtacggccggggcgtcatcccatccaccctggccttcgcgctggccgacactgtcttcagcacccaggacttcctcaccctcttctatactcttcgctcctatgctcggggcctccggcttgagctcaccacctacctctttggccaggacccttgaccagccaggcctgaaggaagacctgcggatggacaggagcgggcaggcccgcacatatccacttgctggagcccatgtttacagacagggacatacaccatgcagatcctgagttcctgctgtatgagcagggatatccatgcttatgtatccaaacacagagacccatgggaacaaatgagacacatatagatactgagacctgtgtgtacagtaggaccatgcactcacacccatctggagagggagcccccggtataccaagggagccagttgtgttcagacacacacatcacagcttgactcactaactgaggcctttccatagctccacagcttcccacctcctccccaccaaaccggggttctagagttaaggatgggggagggtattatactgcctcagtctgactcctcaacccagcagcaatttgaggggatgagggggaagaggagctgccttttggaggcccccttcacctgcagctatgatgcccttccccttctcccctgtcctcaccatatgccttatccccattctactaagcaagcaaagcccgtcggctagtcaagcggatctcagagc

SEQ ID NO: 444248 - DNA, 1826 bp, Homo sapiens
tatttcggctgggtataaaaaaaaaaaaaaaaaaaaaaaaaaaaaaaaaaaaaagtgagcgcaaagcctcaggccccggctccctcctgagctgcgccgtgccaggccgcccgccgggatgcagtgggccgtgggccggcggtgggcgtgggccgcgctgctcctggctgtcgcagcggtgctgacccaggtcgtctggctctggctgggtacgcagagcttcgtcttccagcgcgaagagatagcgcagttggcgcggcagtacgctggtgagcgggcagagggcagggaggggagcggccggcctgggagcggagcctagggttccgaaggcgccatccccggacctaggaccggtgccagccctgactccgccgcccctctgcctccgccagggctggaccacgagctggccttctctcgtctgatcgtggagctgcggcggctgcacccaggccacgtgctgcccgacgaggagctgcagtgggtgttcgtgaatgcgggtggctggatgggcgccatgtgccttctgcacgcctcgctgtccgagtatgtgctgctcttcggcaccgccttgggctcccgcggccactcggggcgctactgggctgagatctcggataccatcatctctggcaccttccaccagtggagagagggcaccaccaaaagtgaggtcttctacccaggggagacggtagtacacgggcctggtgaggcaacagctgtggagtgggggccaaacacatggatggtggagtacggccggggcgtcatcccatccaccctggccttcgcgctggccgacactgtcttcagcacccaggacttcctcaccctcttctatactcttcgctcctatgctcggggcctccggcttgagctcaccacctacctctttggccaggacccttgaccagccaggcctgaaggaagacctgcggatggacaggagcgggcaggcccgcacatatccacttgctggagcccatgtttacagacagggacatacaccatgcagatcctgagttcctgctgtatgagcagggatatccatgcttatgtatccaaacacagagacccatgggaacaaatgagacacatatagatactgagacctgtgtgtacagtaggaccatgcactcacacccatctggagagggagcccccggtataccaagggagccagttgtgttcagacacacacatcacagcttgactcactaactgaggcctttccatagctccacagcttcccacctcctccccaccaaaccggggttctagagttaaggatgggggagggtattatactgcctcagtctgactcctcaacccagcagcaatttgaggggatgagggggaagaggagctgccttttggaggcccccttcacctgcagctatgatgcccttccccttctcccctgtcctcaccatatgccttatccccattctactcccctgctatgcaagtgcccctgtggcttgtccccaaccccctcagcaacaaagctcagctggggaacgagagtaatttgaagaatgcttgaagtcagcgtcttccattccagaaagacccccattcttcctttgggggtatgatgtggaagctggtttcagcccaggacccaccactgaggagaggatctagacaggtgggcctaattccaaggggcccttcctggcctggagaaggccttttacacacacacaacacatacacacacacacacacacacacatatcacagttttcacacagcccctgctgcattctctgtccatctgtctgtttctattaataaagatttgttgatctgttcca

SEQ ID NO: 444249 - DNA, 1294 bp, Homo sapiens
agggcgagccgtaccacggcggtggcgggggagcgcttcgtgggcagccggcgggctccgaggccgtgagcgcaaagcctcaggccccggctccctcctgagctgcgccgtgccaggccgcccgccgggatgcagtgggccgtgggccggcggtgggcgtgggccgcgctgctcctggctgtcgcagcggtgctgacccaggtcgtctggctctggctgggtacgcagagcttcgtcttccagcgcgaagagatagcgcagttggcgcggcagtacgctgggctggaccacgagctggccttctctcgtctgatcgtggagctgcggcggctgcacccaggccacgtgctgcccgacgaggagctgcagtgggtgttcgtgaatgcgggtggctggatgggcgccatgtgccttctgcacgcctcgctgtccgagtatgtgctgctcttcggcaccgccttgggctcccgcggccactcggggcgctactgggctgagatctcggataccatcatctctggcaccttccaccagtggagagagggcaccaccaaaagtgaggtcttctacccaggggagacggtagtacacgggcctggtgaggcaacagctgtggagtgggggccaaacacatggatggtggagtacggccggggcgtcatcccatccaccctggccttcgcgctggccgacactgtcttcagcacccaggacttcctcaccctcttctatactcttcgctcctatgctcggggcctccggcttgagctcaccacctacctctttggccaggacccttgaccagccaggcctgaaggaagacctgcggatggacaggagcgggcaggcccgcacatatccacttgctggagcccatgtttacagacagggacatacaccatgcagatcctgagttcctgctgtatgagcagggatatccatgcttatgtatccaaacacagagacccatgggaacaaatgagacacatatagatactgagacctgtgtgtacagtaggaccatgcactcacacccatctggagagggagcccccggtataccaagggagccagttgtgttcagacacacacatcacagcttgactcactaactgaggcctttccatagctccacagcttcccacctcctccccaccaaaccggggttctagagttaagggaagggattttataacttgccttcaagtcctgaacttcctttaaaacccaagcagagtaaatttgtgagagggaattgaatactctcaaacaattacatctttctcgtgtcctg

SEQ ID NO: 444250 - DNA, 1841 bp, Homo sapiens
agggcgagccgtaccacggcggtggcgggggagcgcttcgtgggcagccggcgggctccgaggccgtgagcgcaaagcctcaggccccggctccctcctgagctgcgccgtgccaggccgcccgccgggatgcagtgggccgtgggccggcggtgggcgtgggccgcgctgctcctggctgtcgcagcggtgctgacccaggtcgtctggctctggctgggtacgcagagcttcgtcttccagcgcgaagagatagcgcagttggcgcggcagtacgctgggctggaccacgagctggccttctctcgtctgatcgtggagctgcggcggctgcacccaggccacgtgctgcccgacgaggagctgcagtgggtgttcgtgaatgcgggtggctggatgggcgccatgtgccttctgcacgcctcgctgtccgagtatgtgctgctcttcggcaccgccttgggctcccgcggccactcgggtcagtgctagcggcgggccagactgggaggctggggttgtaaaggggcccatgccctcctttctgatgtttggctgggccatgcaatggcgcgaataccctgatagtgtcatgtgcgattgtcactcagggcgctactgggctgagatctcggataccatcatctctggcaccttccaccagtggagagagggcaccaccaaaagtgaggtcttctacccaggggagacggtagtacacgggcctggtgaggcaacagctgtggagtgggggccaaacacatggatggtggagtacggccggggcgtcatcccatccaccctggccttcgcgctggccgacactgtcttcagcacccaggacttcctcaccctcttctatactcttcgctcctatgctcggggcctccggcttgagctcaccacctacctctttggccaggacccttgaccagccaggcctgaaggaagacctgcggatggacaggagcgggcaggcccgcacatatccacttgctggagcccatgtttacagacagggacatacaccatgcagatcctgagttcctgctgtatgagcagggatatccatgcttatgtatccaaacacagagacccatgggaacaaatgagacacatatagatactgagacctgtgtgtacagtaggaccatgcactcacacccatctggagagggagcccccggtataccaagggagccagttgtgttcagacacacacatcacagcttgactcactaactgaggcctttccatagctccacagcttcccacctcctccccaccaaaccggggttctagagttaaggatgggggagggtattatactgcctcagtctgactcctcaacccagcagcaatttgaggggatgagggggaagaggagctgccttttggaggcccccttcacctgcagctatgatgcccttccccttctcccctgtcctcaccatatgccttatccccattctactcccctgctatgcaagtgcccctgtggcttgtccccaaccccctcagcaacaaagctcagctggggaacgagagtaatttgaagaatgcttgaagtcagcgtcttccattccagaaagacccccattcttcctttgggggtatgatgtggaagctggtttcagcccaggacccaccactgaggagaggatctagacaggtgggcctaattccaaggggcccttcctggcctggagaaggccttttacacacacacaacacatacacacacacacacacacacacatatcacagttttcacacagcccctgctgcattctctgtccatctgtctgtttctattaataaagatttgttgatctgttcca

SEQ ID NO: 444251 - DNA, 1657 bp, Homo sapiens
  misc_feature (6)..(6): n is a, c, g, or t
ggctangtacgaggccggtggtgaatcggccgagggtgagcgcaaagcctcaggccccggctccctcctgagctgcgccgtgccaggccgcccgccgggatgcagtgggccgtgggccggcggtgggcgtgggccgcgctgctcctggctgtcgcagcggtgctgacccaggtcgtctggctctggctgggtacgcagagcttcgtcttccagcgcgaagagatagcgcagttggcgcggcagtacgctgggctggaccacgagctggccttctctcgtctgatcgtggagctgcggcggctgcacccaggccacgtgctgcccgacgaggagctgcagtgggtgttcgtgaatgcgggtggctggatgggcgccatgtgccttctgcacgcctcgctgtccgatgtcatgtgcgattgtcactcagggcgctactgggctgagatctcggataccatcatctctggcaccttccaccagtggagagagggcaccaccaaaagtgaggtcttctacccaggggagacggtagtacacgggcctggtgaggcaacagctgtggagtgggggccaaacacatggatggtggagtacggccggggcgtcatcccatccaccctggccttcgcgctggccgacactgtcttcagcacccaggacttcctcaccctcttctatactcttcgctcctatgctcggggcctccggcttgagctcaccacctacctctttggccaggacccttgaccagccaggcctgaaggaagacctgcggatggacaggagcgggcaggcccgcacatatccacttgctggagcccatgtttacagacagggacatacaccatgcagatcctgagttcctgctgtatgagcagggatatccatgcttatgtatccaaacacagagacccatgggaacaaatgagacacatatagatactgagacctgtgtgtacagtaggaccatgcactcacacccatctggagagggagcccccggtataccaagggagccagttgtgttcagacacacacatcacagcttgactcactaactgaggcctttccatagctccacagcttcccacctcctccccaccaaaccggggttctagagttaaggatgggggagggtattatactgcctcagtctgactcctcaacccagcagcaatttgaggggatgagggggaagaggagctgccttttggaggcccccttcacctgcagctatgatgcccttccccttctcccctgtcctcaccatatgccttatccccattctactcccctgctatgcaagtgcccctgtggcttgtccccaaccccctcagcaacaaagctcagctggggaacgagagtaatttgaagaatgcttgaagtcagcgtcttccattccagaaagacccccattcttcctttgggggtatgatgtggaagctggtttcagcccaggacccaccactgaggagaggatctagacaggtgggcctaattccaaggggcccttcctggcctggagaaggccttttacacacacacaacacatacacacacacacacacacacacatatcacagttttcacacagcccctgctgcattctctgtccatctgtctgtttctattaataaagatttgttgatctgttcca

SEQ ID NO: 444252 - DNA, 1618 bp, Homo sapiens
agggcgagccgtaccacggcggtggcgggggagcgcttcgtgggcagccggcgggctccgaggccgtgagcgcaaagcctcaggccccggctccctcctgagctgcgccgtgccaggccgcccgccgggatgcagtgggccgtgggccggcggtgggcgtgggccgcgctgctcctggctgtcgcagcggtgctgacccaggtcgtctggctctggctgggtacgcagagcttcgtcttccagcgcgaagagatagcgcagttggcgcggcagtacgctgggctggaccacgagctggccttctctcgtctgatcgtggagctgcggcggctgcacccaggccacgtgctgcccgacgaggagctgcagtgggtgttcgtgaatgcgggtggctggatgggcgccatgtgccttctgcacgcctcgctgtccgagtatgtgctgctcttcggcaccgccttgggctcccgcggccactcgggggagacggtagtacacgggcctggtgaggcaacagctgtggagtgggggccaaacacatggatggtggagtacggccggggcgtcatcccatccaccctggccttcgcgctggccgacactgtcttcagcacccaggacttcctcaccctcttctatactcttcgctcctatgctcggggcctccggcttgagctcaccacctacctctttggccaggacccttgaccagccaggcctgaaggaagacctgcggatggacaggagcgggcaggcccgcacatatccacttgctggagcccatgtttacagacagggacatacaccatgcagatcctgagttcctgctgtatgagcagggatatccatgcttatgtatccaaacacagagacccatgggaacaaatgagacacatatagatactgagacctgtgtgtacagtaggaccatgcactcacacccatctggagagggagcccccggtataccaagggagccagttgtgttcagacacacacatcacagcttgactcactaactgaggcctttccatagctccacagcttcccacctcctccccaccaaaccggggttctagagttaaggatgggggagggtattatactgcctcagtctgactcctcaacccagcagcaatttgaggggatgagggggaagaggagctgccttttggaggcccccttcacctgcagctatgatgcccttccccttctcccctgtcctcaccatatgccttatccccattctactcccctgctatgcaagtgcccctgtggcttgtccccaaccccctcagcaacaaagctcagctggggaacgagagtaatttgaagaatgcttgaagtcagcgtcttccattccagaaagacccccattcttcctttgggggtatgatgtggaagctggtttcagcccaggacccaccactgaggagaggatctagacaggtgggcctaattccaaggggcccttcctggcctggagaaggccttttacacacacacaacacatacacacacacacacacacacacatatcacagttttcacacagcccctgctgcattctctgtccatctgtctgtttctattaataaagatttgttgatctgttcca

SEQ ID NO: 444253 - DNA, 1024 bp, Homo sapiens
  misc_feature (6)..(6): n is a, c, g, or t
ggctangtacgaggccggtggtgaatcggccgaggcctcttctatactcttcgctcctatgctcggggcctccggcttgagctcaccacctacctctttggccaggacccttgaccagccaggcctgaaggaagacctgcggatggacaggagcgggcaggcccgcacatatccacttgctggagcccatgtttacagacagggacatacaccatgcagatcctgagttcctgctgtatgagcagggatatccatgcttatgtatccaaacacagagacccatgggaacaaatgagacacatatagatactgagacctgtgtgtacagtaggaccatgcactcacacccatctggagagggagcccccggtataccaagggagccagttgtgttcagacacacacatcacagcttgactcactaactgaggcctttccatagctccacagcttcccacctcctccccaccaaaccggggttctagagttaaggatgggggagggtattatactgcctcagtctgactcctcaacccagcagcaatttgaggggatgagggggaagaggagctgccttttggaggcccccttcacctgcagctatgatgcccttccccttctcccctgtcctcaccatatgccttatccccattctactcccctgctatgcaagtgcccctgtggcttgtccccaaccccctcagcaacaaagctcagctggggaacgagagtaatttgaagaatgcttgaagtcagcgtcttccattccagaaagacccccattcttcctttgggggtatgatgtggaagctggtttcagcccaggacccaccactgaggagaggatctagacaggtgggcctaattccaaggggcccttcctggcctggagaaggccttttacacacacacaacacatacacacacacacacacacacacatatcacagttttcacacagcccctgctgcattctctgtccatctgtctgtttctattaataaagatttgttgatctgttcca

SEQ ID NO: 444254 - DNA, 1781 bp, Homo sapiens
agggcgagccgtaccacggcggtggcgggggagcgcttcgtgggcagccggcgggctccgaggccgtgagcgcaaagcctcaggccccggctccctcctgagctgcgccgtgccaggccgcccgccgggatgcagtgggccgtgggccggcggtgggcgtgggccgcgctgctcctggctgtcgcagcggtgctgacccaggtcgtctggctctggctgggtacgcagagcttcgtcttccagcgcgaagagatagcgcagttggcgcggcagtacgctggtgagcgggcagagggcagggaggggagcggccggcctgggagcggagcctagggttccgaaggcgccatccccggacctaggaccggtgccagccctgactccgccgcccctctgcctccgccagggctggaccacgagctggccttctctcgtctgatcgtggagctgcggcggctgcacccaggccacgtgctgcccgacgaggagctgcagtgggtgttcgtgaatgcgggtggctggatgggcgccatgtgccttctgcacgcctcgctgtccgagtatgtgctgctcttcggcaccgccttgggctcccgcggccactcgggtcagtgctagcggcgggccagactgggaggctggggttgtaaaggggcccatgccctcctttctgatgtttggctgggccatgcaatggcgcgaataccctgatagtgtcatgtgcgattgtcactcagggcgctactgggctgagatctcggataccatcatctctggcaccttccaccagtggagagagggcaccaccaaaagtgaggtcttctacccagggtgggtaagaaggctctgtcagagaagtgggtcccttcacgcggggggtgcccacaattgcggggagcatggcatggaaaaggagtgtgttgggggggccctcctcatggttcccttcctccaccctcccataagccacaggtgattggttggggcagagctgagggactcttgctttcctctgtcaaggggaaacaaaacataacaacttcctattaaacatgtctgatttttatctgcccaggcacaattttgcccagacagtattccaacaactgttggggagacaatgggtaatcagaaatgctctccatctcaaaaaaaaaaaagaagaagaagaagtggtcagattcaggacgtgttttgaggataagtggtggatttaatgtagggcttgagaaaatgccattgtgtatgactgactggtgtttgaatcctttatcatatcccagggccggtctaggacacataattgtgtgtgcctaggcattcttcccagtttgttgtggctgccctgcccaagcccacatcacctattagcttcacgtccttctctccgcagccaccaaaaccctcaacaggggcatctctgagttcatcgtgatggctgcagacgccgagccactggagatcattctgcacctgccgctgctgtgtgaagacaagaatgtgccctacgtgtttgtgcgctccaagcaggccctggggagagcctgtggggtctccaggcctgtcatcgcctgttctgtcaccatcaaagaaggctcgcagctgaaacagcagatccaatccattcagcagtccattgaaaggctcttagtctaaacctgtggcctctgccacgtgctccctgccagcttcccccctgaggttgtgtatcatattatctgtgttagcatgtagtattttcagctactctctattgttataaaatgtagtactaaatctgg

SEQ ID NO: 444255 - DNA, 779 bp, Homo sapiens
  misc_feature (774)..(774): n is a, c, g, or t
tcttgagacttcacttcagcttcactgacttcttgactctcctcttgagtaaaaggactcagccaactatgaagttttttgtctttgctttagtcttggctctcatgatttccatgattagcgctgattcacatgaaaagagacatcatgggtatagaagaaaattccatgaaaagcatcattcacatcgagaatttccattttatggggactatggatcaaattatctatatgacaattgatatccttagtaatcatggggcatgattatagaggtttgactggcaaattcactttttactcatttattctcattcatcataccgcatcacactaccactgctttttgaagaattatcataaggcaatggagaataaaagaaagaccatgatttagtgaattctgtgtttcatgatacttcccttcctaattatcatttgattagatacttgcaatttaaactgttaagctgttttcactgctgtttctgagtaatagaaattcattcctctccaaaagcaataaatttctagcacaaaaaaaaaaaaaacaaaatggggggggggggccgaaaaattttgaaccacttgtggggcgggcgcgaagggtagtgacagcgcccacggtcccagaggaaccgggcgcaaggggggttccccaaaagccgggggcggtggcaaccgcgtggggtcggtccacgacgacaccccccgcggcgcaccgaaaaataccaacagcaccgacaatcgcacacgcaactacaacacaaaagnggaga

SEQ ID NO: 444256 - DNA, 1427 bp, Homo sapiens
ttaaaaagaacttcagaagccatgcatggtgatgcatgcctgtagttccagctactcagaggctaaggtgggaggattactttcgcccaggactcagcctgggcaacatagggagacctcgtctttacaaaaaattttaaagttagctgggcatggtggcacacaactgtagtcccagctacatgggaggctgaagtaggaagatcacttgagcctgggaggttgaggctacagtgagctgtgaccaaccagatgaatagtactcagggatccttagagatggacgggaagagtggataggggtaggaaggcagaagaggtgcctaattcgaacataaagaacatcatcccctgacacaggaaatggaagaagggattccccaaacggtggatatcaaatctaggatctttgaattataaaaatatgtgctaagtttggtcagattatgtgccagggtctatgagcatatgaattctttccacaaaggagcaagaaatttctaagccataagcgaagacaaaatttgctattttatagccacaccatctgtgtgtgctcagtctccataatttgctacttgtccaatgtggccatctacttacaaatttcggcgcgaatatcggcctggggccacttctgcccagcccagatccttgccggtgatcctagggtcaattctccaccgcacgctctttgagtaacttattcagaagcccttttaccgctctgcttcacacaggcgggctactcctcgttcattatactttacttctaggtcatcttcgacactcccgcagcttcctcccactccctcaatggcccactttggctggtctctccctctcagcaaccttctcctcttcgatccgctctaatgccttctctaactctcttcctcctcaactccgtgtgattctcattccactctcgtctctctcctctctccctctctccttgtctcctcacgtctgctcacctctcctactccgctattctacgttccgacatctactctagtgcatacgtctccgtccacctcactctcctcacgattctcgtccgccctctccttcgtgtttatacctccttctgctcttatcgctcacgtatacacatctctctctctctctccctcgtctcggctaccgatctctctctctctcatctggtctcgcctagcattctctctgctctactctctctctcgttcatctatctcgattctctctctctctcgtcgccgctgctctatctatctcatcctctacactctctcatcctcttctcacacgctctacagatcttctccgctctcatcgatgtcttcatgtgcctcctctctcttcctctccgactcgatacatatacacatgcgcctcatctctctctacttcgcgcactgcgcctgctctacgtcactctcgcc

SEQ ID NO: 444257 - DNA, 8417 bp, Homo sapiens
cgtccaggctgcgccgccgcgccgccgctccgcccccggtcgggtgtgtggctgcgcgcgccgggagagatgctgaggtaaagttcgggagagagggagagaaatccgtcagcgcgagggagcccgagtggccgccattactgagcccggcgcggcggcgggcgctggggaaggggggagggacgggccgccgctggtggcggggagggagggagggagggtgggtgagctggctgcgggagccgtggggctcagggtttcggggcgtgtgtgtcggggagggcggggggaggtggctgaagggacgcgccgctcggtgagcgcgccgaggaagagaggcgagcggagagtggaggaggaggcggcggcggcgggagcggtccccaggaatgtcgctgccgcgccaccgccgggccgctgccgttgaggaggagacggaggagaccgacgttgttagggaagatgatccctatgatcttgaagatgtttctgcacagaaatgagggaaatacaaagaaccaaatacagttctgaaatttgggatctgtattttgagatgattttattttcagaatgagaagcatatctggttacctttatgaatgtagagacatgagaagagagttatgatggcaaaaaacaaagagcctcgtcccccatcctataccatcagtatagttggactctctgggactgaaaaagacaaaggtaactgtggagttggaaagtcttgtttgtgcaatagatttgtacgctcaaaagcagatgaatattatccagagcatacttctgtgcttagcaccattgactttggaggacgagtagtaaacaatgatcactttttgtactggggtgacataatacaaaatagtgaagatggagtagaatgcaaaattcatgtcattgaacaaacagagttcattgatgaccagactttcttgcctcatcggagtacgaatttgcaaccatatataaaacgtgcagctgcatctaaattgcagtcagcagaaaaactaatgtacatttgcactgatcagctaggcttagaacaagactttgaacagaagcaaatgcctgaagggaagctcaacgtagatggatttttattatgcattgatgtaagtcaaggatgcaataggaagtttgatgatcaacttaaatttgtgaataacctttttgtccagttatcaaaatcaaaaaaacctgtaataatagcagcaactaaatgtgatgaatgcgtgggtcattatcttagagaagttcaggcatttgcttcaaataaaaagaaccttcttgtagtggaaacactcagcgcaataaaagtcaacattgaaacatgttttactgcactggtacaaatgttggataaaactcgtagcaagcctaaaattattccctatttggatgcttataaaacacagagacaacttgttgtcacagcaacagataagtttgaaaaacttgtgcagactgtgagagattatcatgcaacttggaaaactgttagtaataaattaaaaaatcatcctgattatgaagaatacatcaacttagagggaacaagaaaggccagaaatacattctcaaaacatatagaacaacttaaacaggaacatataagaaaaaggagagaagagtatataaatactttaccaagagcttttaacactcttttgccaaatctagaagagattgaacatttgaattggtcagaagctttgaagttaatggaaaagagagcagatttccagttatgttttgtggtgctagaaaaaactccttgggatgaaactgaccatatagacaaaattaatgataggcggattccatttgacctcctgagcactttagaagctgaaaaagtctatcagaaccatgtacagcatctgatatccgagaagaggagggtggaaatgaaggaaaaattcaaaaagactttggaaaaaattcaattcatttcaccagggcagccatgggaggaagttatgtgctttgttatggaggatgaagcctacaaatatatcactgaggctgatagcaaagaggtatatggtaggcatcagcgagaaatagttgaaaaagccaaagaagagtttcaagaaatgctttttgagcattctgaacttttttatgatttagatcttaatgcaacacctagttcagataaaatgagtgaaattcatacagttctgagtgaagaacctagatataaagctttacagaaacttgcacctgatagggaatcccttctacttaagcatataggatttgtttatcatcccactaaagaaacatgtcttagtggccaaaattgtacagacattaaagtggagcagttacttgctagtagtcttttacagttggatcatggccgcttaagattatatcacgatagtaccaatatagataaagttaacctttttattttagggaaggatggccttgcccaagaactagcaaatgagataaggacacaatccactgatgatgagtatgccttagatggaaaaatttatgaacttgatcttcggccggttgatgccaaatcgccttactttttgagtcagttatggactgccgcctttaaaccacatgggtgcttctgtgtatttaattccattgagtcattgagttttattggggaatttattgggaaaataagaactgaagcttctcagatcagaaaagataaatacatggctaatcttccatttacattaattctggctaatcagagagattccattagtaagaatctaccaattctcaggcaccaagggcagcagttggcaaacaagttgcaatgtccttttgtagatgtacctgctggtacatatcctcgtaaatttaatgaaacccaaataaagcaagctctcagaggagtattggaatcagttaaacacaatttggatgtggtgagcccaattcctgccaataaggacttatcagaagctgacttgagaattgtcatgtgcgccatgtgtggagatccatttagtgtggatcttattctttcacccttccttgattctcattcttgcagtgctgctcaagctggacagaataattccctaatgcttgataaaatcattggtgaaaaaaggaggcgaatacagatcacaatattatcataccactcttcaattggagtaagaaaagatgaactagttcatgggtatatattagtttactctgcaaaacggaaagcttcgatgggaatgcttcgagcatttctatcagaagttcaagacaccattcctgtacagctggtggcagttactgacagccaagcagatttttttgaaaatgaggctatcaaagagttaatgactgaaggagaacacattgcaactgagatcactgctaaatttacagcactgtattctttatctcagtatcatcggcaaactgaggtctttactctgttttttagtgatgttctagagaaaaaaaatatgatagaaaattcttatttgtctgataatacaagggaatcaacccatcaaagtgaagatgtttttctaccatctcccagagactgttttccctataataactaccctgattcagatgatgacacagaagcaccacctccttatagtccaattggggatgatgtacagttgcttccaacacctagtgaccgttccagatatagattagatttggaaggaaatgagtatcctattcatagtaccccaaactgtcatgaccatgaacgcaaccataaagtgcctccacctattaaacctaaaccagttgtacctaagacaaatgtgaaaaaactcgatccaaaccttttaaagacaattgaagctggtattggtaaaaatccaagaaagcagacttcccgggtgcctttggcacatcctgaagatatggatccttcagataactatgcggaacccattgatacaattttcaaacagaagggctattctgatgagatttatgttgtcccagatgatagtcaaaatcgtattaaaattcgaaactcatttgtaaataacacccaaggagatgaagaaaatgggttttctgatagaacctcaaaaagtcatggggaacggaggccttcaaaatacaaatataaatctaaaaccttgtttagtaaagccaagtcatactatagaagaacacattcagatgccagtgatgatgaggctttcaccacttctaaaacaaaaagaaaaggaagacatcgtggaagtgaagaagatccacttctttctcctgttgaaacttggaaaggtggtattgataatcctgcaatcacttctgaccaggagttagatgataagaagatgaagaagaaaacccacaaagtgaaagaagataaaaagaaaaagaaaactaagaacttcaatccaccaacacgtagaaattgggaaagtaattactttgggatgcccctccaggatctggttacagctgagaagcccataccactatttgttgagaaatgtgtggaatttattgaagatacagggttatgtaccgaaggactctaccgtgtcagcgggaataaaactgaccaagacaatattcaaaagcagtttgatcaagatcataatatcaatctagtgtcaatggaagtaacagtaaatgctgtagctggagcccttaaagctttctttgcagatctgccagatcctttaattccatattctcttcatccagaactattggaagcagcaaaaatcccggataaaacagaacgtcttcatgccttgaaagaaattgttaagaaatttcatcctgtaaactatgatgtattcagatacgtgataacacatctaaacagggttagtcagcaacataaaatcaacctaatgacagcagacaacttatccatctgtttttggccaaccttgatgagacctgattttgaaaatcgagagtttctgtctactactaagattcatcaatctgttgttgaaacattcattcagcagtgtcagtttttcttttacaatggagaaattgtagaaacgacaaacattgtggctcctccaccaccttcaaacccaggacagttggtggaaccaatggtgccacttcagttgccgccaccattgcaacctcagctgatacaaccacaattacaaacggatcctcttggtattatatgagtaggaagtgattgcaaacaggctggatttggacaaaaagcaaatctagacatgcatgtttcagggttcagtagtatacttcatgtttcatacagataattcacattcaaaattacattttctctttgaactagatggtattccttattcacttacattacaaatctaagaccatgtgataagcatgactggagaggtttaatttttataaacaaaaatagctataaagtacaaagctgctgctgcatgcaaccttattgcaatcagtatatcattcctgtggcaatttctgtcaccttatattgtgaataaaatttttctatagaaattaaatgatttaaaaactcacctatatgaaacatttaatgcttttcagcctgctttctggctgattttgttatttgatgtgctaatttgggcaacttaatttacattctggcagtcggtgtagataactaaaagcccagttaagtattttataatttcaggctactgaggccatgcttgggatgttgtttgaaagaaagaaaaaatacacttgacatatttcacatttctgtaccttcatctttacttccaagtaaacccgtggatgatttgatgagggataaatgaacctatttcttttacacacataccaaggacatgcttgtggctaaagtgagttgataatgttgtgcaaaggatagttgtcaccaactcatttctttatggtccataatgaaataaaaattttgtatactgttaattctgtaaacagatgcatgttcaaaagatctatgatggtcttgtaatcttaatctaatatattttagatattttaattttttccctcttggggaacacatttagtatagtgtagaaaatacttccatgacattttcatataaggttatataacttttcatacataaacatgaaatttgttgtagaaaattctttaaaccaaacatttaaatctaggacttcaatttaatttgttccttgaatctatttttatgtggcccttaaaaaatatccaaaaaacccattgctaatatagcaataaaaatactttgggtactgacagactctttggagtgtttatattacaaatttgtattcatattcttttctgtgatgtgttgtactaaaatccaaaatggcttttgcaccatttttaagccaattttttcctttgatgttggtaccagaattactataagtgactgctgcttttgggggtaaacattttgttagtgaagataaaaccagaacactaaattatggataaaattttcagaataggtggcacaggtaaatttcactaggttatattttgtgtagtaaagaaaaaaattatttggtcaatgttatcttaattcatactacaatttaagattatcttatgtgtattatagtaaatagatgattttcagattcaaggctcctaagagtttgatttgctctgttttttcctaaaataaatattgtctctcccaactgttaagttctaggtattgtacttccaattttaacttcagaaccaagatgttggcatgaaccaggctgctgttgaagtacatgtatattataaattatcttatttgtgttatactcttacatgttatcttttctaagaaaacaaagtccctattattcctattgcaaagcacacaggaattaagaaagtacagtaatttttaaaaaaaaatccggtaaatgtagtattcttaacctgttctatattacttatacctattgtctatatagctttaatttatagttgtcagtttaactattggcatgtctggcaaagaaaattaaactttaagagttttataaactgtttctaggttgctaaagaatttatttttctactatatatggtatagacaaagcatcaaactatgtacaggaaaaaagcctgactatttctatttggaagtaggctgaaaagagaattttcaaaactgttcgtgtcttcagttcattctgtcataactttgctattgtaatatgtgaataccagtttatttaagctgttctcttttatactgtattaatttaatgttcatctgcgtttagtaccatttttgttattaaaactggcatttaccgtttttcacattaacccaccttgcaccttcccccaaacttatctccacttttctatgcattctatcattgatttgacacacttcatagtgagtcatttaaatactctacgtttggttcaattaaccagtaggttacagttattgaaaattaaagtacagtttaaagctcagtctgttacactgaattgattgtgtttgtttttgccaagggtttagatatgcttttaaatattagaaacatctaagaacagaataacataattaaacttttttctggtaagttactggaaggtttcactgtttagggacctatcatatgagacttcttaaaggattaaaagaataggatagtctcataattgtgagtaaacatcaaggcattatattttacaatactgaataaaatttcatctacacacatgttgccattgtttcatttaaggttcagtgcttatagttaactacaatattggacctaacaggatctagattagcaatataaagaagcatagtggtactctgtttcacactttcagtagatttattagaagtcaaattctattcaacagacacttattaggatatacaactaatttaagaataaaattccaggcacaatatattttttttaaatggtatttgttagtagtgcttcttccccttaacatttacagtgtaaatactgcaggtaaccgcaatctaagttagccaaaaagcagctttttttcccatactgtatgtaaataatgtagacctgggtttttttgtttatttgggtttgtttttttttttgaggtactggaatctaattaatatctcttaggtatcaacaaaagggaacaattggaatgagaatttaggccttagcttccatggtgatttttagttttttatacagtaataattgtgatgctatttgtcaactggatataaatacacatataattttaaaaagtcaaaagtgcttttgtttctttgtttaatgtaatttttgtgcttcacctacaggatgctgcagtaaattaaatatcagtgaagcttctgatgtataaagaatgctatgaataaaacattaagaagctgtgtaattttaagttatagttgcctctatttttaccatttcattggtaaaaattagctaatttttttcaagtgaaatgaaaaataaaaatataaatttatcaat

SEQ ID NO: 444258 - DNA, 8040 bp, Homo sapiens
cgtccaggctgcgccgccgcgccgccgctccgcccccggtcgggtgtgtggctgcgcgcgccgggagagatgctgaggtaaagttcgggagagagggagagaaatccgtcagcgcgagggagcccgagtggccgccattactgagcccggcgcggcggcgggcgctggggaaggggggagggacgggccgccgctggtggcggggagggagggagggagggtgggtgagctggctgcgggagccgtggggctcagggtttcggggcgtgtgtgtcggggagggcggggggaggtggctgaagggacgcgccgctcggtgagcgcgccgaggaagagaggcgagcggagagtggaggaggaggcggcggcggcgggagcggtccccaggaatgtcgctgccgcgccaccgccgggccgctgccgttgaggaggagacggaggagaccgacgttgttagggaagatgatccctatgatcttgaagatgtttctgcacagaaatgagggaaatacaaagaaccaaatacagttctgaaatttgggatctgtattttgagatgattttattttcagaatgagaagcatatctggttacctttatgaatgtagagacatgagaagagagttatgatggcaaaaaacaaagagcctcgtcccccatcctataccatcagtatagttggactctctgggactgaaaaagacaaaggtaactgtggagttggaaagtcttgtttgtgcaatagatttgtacgctcaaaagcagatgaatattatccagagcatacttctgtgcttagcaccattgactttggaggacgagtagtaaacaatgatcactttttgtactggggtgacataatacaaaatagtgaagatggagtagaatgcaaaattcatgtcattgaacaaacagagttcattgatgaccagactttcttgcctcatcggagtacgaatttgcaaccatatataaaacgtgcagctgcatctaaattgcagtcagcagaaaaactaatgtacatttgcactgatcagctaggcttagaacaagactttgaacagaagcaaatgcctgaagggaagctcaacgtagatggatttttattatgcattgatgtaagtcaaggatgcaataggaagtttgatgatcaacttaaatttgtgaataacctttttgtccagttatcaaaatcaaaaaaacctgtaataatagcagcaactaaatgtgatgaatgcgtgggtcattatcttagagaagttcaggcatttgcttcaaataaaaagaaccttcttgtagtggaaacactcagcgcaataaaagtcaacattgaaacatgttttactgcactggtacaaatgttggataaaactcgtagcaagcctaaaattattccctatttggatgcttataaaacacagagacaacttgttgtcacagcaacagataagtttgaaaaacttgtgcagactgtgagagattatcatgcaacttggaaaactgttagtaataaattaaaaaatcatcctgattatgaagaatacatcaacttagagggaacaagaaaggccagaaatacattctcaaaacatatagaacaacttaaacaggaacatataagaaaaaggagagaagagtatataaatactttaccaagagcttttaacactcttttgccaaatctagaagagattgaacatttgaattggtcagaagctttgaagttaatggaaaagagagcagatttccagttatgttttgtggtgctagaaaaaactccttgggatgaaactgaccatatagacaaaattaatgataggcggattccatttgacctcctgagcactttagaagctgaaaaagtctatcagaaccatgtacagcatctgatatccgagaagaggagggtggaaatgaaggaaaaattcaaaaagactttggaaaaaattcaattcatttcaccagggcagccatgggaggaagttatgtgctttgttatggaggatgaagcctacaaatatatcactgaggctgatagcaaagaggtatatggtaggcatcagcgagaaatagttgaaaaagccaaagaagagtttcaagaaatgctttttgagcattctgaacttttttatgatttagatcttaatgcaacacctagttcagataaaatgagtgaaattcatacagttctgagtgaagaacctagatataaagctttacagaaacttgcacctgatagggaatcccttctacttaagcatataggatttgtttatcatcccactaaagaaacatgtcttagtggccaaaattgtacagacattaaagtggagcagttacttgctagtagtcttttacagttggatcatggccgcttaagattatatcacgatagtaccaatatagataaagttaacctttttattttagggaaggatggccttgcccaagaactagcaaatgagataaggacacaatccactgatgatgagtatgccttagatggaaaaatttatgaacttgatcttcggccggttgatgccaaatcgccttactttttgagtcagttatggactgccgcctttaaaccacatgggtgcttctgtgtatttaattccattgagtcattgagttttattggggaatttattgggaaaataagaactgaagcttctcagatcagaaaagataaatacatggctaatcttccatttacattaattctggctaatcagagagattccattagtaagaatctaccaattctcaggcaccaagggcagcagttggcaaacaagttgcaatgtccttttgtagatgtacctgctggtacatatcctcgtaaatttaatgaaacccaaataaagcaagctctcagaggagtattggaatcagttaaacacaatttggatgtggtgagcccaattcctgccaataaggacttatcagaagctgacttgagaattgtcatgtgcgccatgtgtggagatccatttagtgtggatcttattctttcacccttccttgattctcattcttgcagtgctgctcaagctggacagaataattccctaatgcttgataaaatcattggtgaaaaaaggaggcgaatacagatcacaatattatcataccactcttcaattggagtaagaaaagatgaactagttcatgggtatatattagtttactctgcaaaacggaaagcttcgatgggaatgcttcgagcatttctatcagaagttcaagacaccattcctgtacagctggtggcagttactgacagccaagcagatttttttgaaaatgaggctatcaaagagttaatgactgaaggagaacacattgcaactgagatcactgctaaatttacagcactgtattctttatctcagtatcatcggcaaactgaggtctttactctgttttttagtgatgttctagagaaaaaaaatatgatagaaaattcttatttgtctgataatacaagggaatcaacccatcaaagtgaagatgtttttctaccatctcccagagactgttttccctataataactaccctgattcagatgatgacacagaagcaccacctccttatagtccaattggggatgatgtacagttgcttccaacacctagtgaccgttccagatatagattagatttggaaggaaatgagtatcctattcatagtaccccaaactgtcatgaccatgaacgcaaccataaagtgcctccacctattaaacctaaaccagttgtacctaagacaaatgtgaaaaaactcgatccaaaccttttaaagacaattgaagctggtattggtaaaaatccaagaaagcagacttcccgggtgcctttggcacatcctgaagatatggatccttcagataactatgcggaacccattgatacaattttcaaacagaagggctattctgatgagatttatgttgtcccagatgatagtcaaaatcgtattaaaattcgaaactcatttgtaaataacacccaaggagatgaagaaaatgggttttctgatagaacctcaaaaagtcatggggaacggaggccttcaaaatacaaatataaatctaaaaccttgtttagtaaagccaagtcatactatagaagaacacattcagatgccagtgatgatgaggctttcaccacttctaaaacaaaaagaaaaggaagacatcgtggaagtgaagaagatccacttctttctcctgttgaaacttggaaaggtggtattgataatcctgcaatcacttctgaccaggagttagatgataagaagatgaagaagaaaacccacaaagtgaaagaagataaaaagaaaaagaaaactaagaacttcaatccaccaacacgtagaaattgggaaagtaattactttgggatgcccctccaggatctggttacagctgagaagcccataccactatttgttgagaaatgtgtggaatttattgaagatacagggttatgtaccgaaggactctaccgtgtcagcgggaataaaactgaccaagacaatattcaaaagcagtttgatcaagatcataatatcaatctagtgtcaatggaagtaacagtaaatgctgtagctggagcccttaaagctttctttgcagatctgccagatcctttaattccatattctcttcatccagaactattggaagcagcaaaaatcccggataaaacagaacgtcttcatgccttgaaagaaattgttaagaaatttcatcctgtaaactatgatgtattcagatacgtgataacacatctaaacagggttagtcagcaacataaaatcaacctaatgacagcagacaacttatccatctgtttttggccaaccttgatgagacctgattttgaaaatcgagagtttctgtctactactaagattcatcaatctgttgttgaaacattcattcagcagtgtcagtttttcttttacaatggagaaattgtagaaacgacaaacattgtggctcctccaccaccttcaaacccaggacagttggtggaaccaatggtgccacttcagttgccgccaccattgcaacctcagctgatacaaccacaattacaaacggatcctcttggtattatatgagtaggaagtgattgcaaacaggctggatttggacaaaaagcaaatctagacatgcatgtttcagggttcagtagtatacttcatgtttcatacagataattcacattcaaaattacattttctctttgaactagatggtattccttattcacttacattacaaatctaagaccatgtgataagcatgactggagaggtttaatttttataaacaaaaatagctataaagtacaaagctgctgctgcatgcaaccttattgcaatcagtatatcattcctgtggcaatttctgtcaccttatattgtgaataaaatttttctatagaaattaaatgatttaaaaactcacctatatgaaacatttaatgcttttcagcctgctttctggctgattttgttatttgatgtgctaatttgggcaacttaatttacattctggcagtcggtgtagataactaaaagcccagttaagtattttataatttcaggctactgaggccatgcttgggatgttgtttgaaagaaagaaaaaatacacttgacatatttcacatttctgtaccttcatctttacttccaagtaaacccgtggatgatttgatgagggataaatgaacctatttcttttacacacataccaaggacatgcttgtggctaaagtgagttgataatgttgtgcaaaggatagttgtcaccaactcatttctttatggtccataatgaaataaaaattttgtatactgttaattctgtaaacagatgcatgttcaaaagatctatgatggtcttgtaatcttaatctaatatattttagatattttaattttttccctcttggggaacacatttagtatagtgtagaaaatacttccatgacattttcatataaggttatataacttttcatacataaacatgaaatttgttgtagaaaattctttaaaccaaacatttaaatctaggacttcaatttaatttgttccttgaatctatttttatgtggcccttaaaaaatatccaaaaaacccattgctaatatagcaataaaaatactttgggtactgacagactctttggagtgtttatattacaaatttgtattcatattcttttctgtgatgtgttgtactaaaatccaaaatggcttttgcaccatttttaagccaattttttcctttgatgttggtaccagaattactataagtgactgctgcttttgggggtaaacattttgttagtgaagataaaaccagaacactaaattatggataaaattttcagaataggtggcacaggtaaatttcactaggttatattttgtgtagtaaagaaaaaaattatttggtcaatgttatcttaattcatactacaatttaagattatcttatgtgtattatagtaaatagatgattttcagattcaaggctcctaagagtttgatttgctctgttttttcctaaaataaatattgtctctcccaactgttaagttctaggtattgtacttccaattttaacttcagaaccaagatgttggcatgaaccaggctgctgttgaagtacatgtatattataaattatcttatttgtgttatactcttacatgttatcttttctaagaaaacaaagtccctattattcctattgcaaagcacacaggaattaagaaagtacagtaatttttaaaaaaaaatccggtaaatgtagtattcttaacctgttctatattacttatacctattgtctatatagctttaatttatagttgtcagtttaactattggcatgtctggcaaagaaaattaaactttaagagttttataaactgtttctaggttgctaaagaatttatttttctactatatatggtatagacaaagcatcaaactatgtacaggaaaaaagcctgactatttctatttggaagtaggctgaaaagagaattttcaaaactgttcgtgtcttcagttcattctgtcataactttgctattgtaatatgtgaataccagtttatttaagctgttctcttttatactgtattaatttaatgttcatctgcgtttagtaccatttttgttattaaaactggcatttaccgtttttcacattaacccaccttgcaccttcccccaaacttatctccacttttctatgcattctatcattgatttgacacacttcatagtgagtcatttaaatactctacgtttggttcaattaaccagtaggttacagttattgaaaattaaagtacagtttaaagctcagtctgttacactgaattgattgtgtttgtttttgccaagggtttagatatgcttttaaatattagaaacatctaagaacagaataacataattaaacttttttctggtaagttactggaaggtttcactgtttagggacctatcatatgagacttcttaaaggattaaaagaataggatagtctcataattgtgagtaaacatcaaggcattatattttacaatactgaataaaatttcatctacaaaaaaaaaaaaaaaaaaaaaaaaaaaaaaaaaaaaaaaaaaaaaaaaaaaaaaaaaaaaaaaaaaaaaaaaaaaaaaaaagcagataaaagaaaagacacaacaaaaacaaggcagacaaaaaccaacaaagacggaagagaagagggcgcaggcccaaccacaagaaagtagaagagacaaccaaacgaggagagaggagagagaaaaaaagagagggaaagtgaggaagtgtacgagacgaacaaaagagtgagaggagagggagggcgacagcgagaaggggggaccaggagaaaggcgggaggggagaagaagaggcggggcagaacgcagagaagaagggagggcagcaaggagacgggggaggacagaggacagagagaaaagagaa

SEQ ID NO: 444259 - DNA, 7809 bp, Homo sapiens
cgtccaggctgcgccgccgcgccgccgctccgcccccggtcgggtgtgtggctgcgcgcgccgggagagatgctgagggaagatgatccctatgatcttgaagatgtttctgcacagaaatgagggaaatacaaagaaccaaatacagttctgaaatttgggatctgtattttgagatgattttattttcagaatgagaagcatatctggttacctttatgaatgtagagacatgagaagagagttatgatggcaaaaaacaaagagcctcgtcccccatcctataccatcagtatagttggactctctgggactgaaaaagacaaaggtaactgtggagttggaaagtcttgtttgtgcaatagatttgtacgctcaaaagcagatgaatattatccagagcatacttctgtgcttagcaccattgactttggaggacgagtagtaaacaatgatcactttttgtactggggtgacataatacaaaatagtgaagatggagtagaatgcaaaattcatgtcattgaacaaacagagttcattgatgaccagactttcttgcctcatcggagtacgaatttgcaaccatatataaaacgtgcagctgcatctaaattgcagtcagcagaaaaactaatgtacatttgcactgatcagctaggcttagaacaagactttgaacagaagcaaatgcctgaagggaagctcaacgtagatggatttttattatgcattgatgtaagtcaaggatgcaataggaagtttgatgatcaacttaaatttgtgaataacctttttgtccagttatcaaaatcaaaaaaacctgtaataatagcagcaactaaatgtgatgaatgcgtgggtcattatcttagagaagttcaggcatttgcttcaaataaaaagaaccttcttgtagtggaaacactcagcgcaataaaagtcaacattgaaacatgttttactgcactggtacaaatgttggataaaactcgtagcaagcctaaaattattccctatttggatgcttataaaacacagagacaacttgttgtcacagcaacagataagtttgaaaaacttgtgcagactgtgagagattatcatgcaacttggaaaactgttagtaataaattaaaaaatcatcctgattatgaagaatacatcaacttagagggaacaagaaaggccagaaatacattctcaaaacatatagaacaacttaaacaggaacatataagaaaaaggagagaagagtatataaatactttaccaagagcttttaacactcttttgccaaatctagaagagattgaacatttgaattggtcagaagctttgaagttaatggaaaagagagcagatttccagttatgttttgtggtgctagaaaaaactccttgggatgaaactgaccatatagacaaaattaatgataggcggattccatttgacctcctgagcactttagaagctgaaaaagtctatcagaaccatgtacagcatctgatatccgagaagaggagggtggaaatgaaggaaaaattcaaaaagactttggaaaaaattcaattcatttcaccagggcagccatgggaggaagttatgtgctttgttatggaggatgaagcctacaaatatatcactgaggctgatagcaaagaggtatatggtaggcatcagcgagaaatagttgaaaaagccaaagaagagtttcaagaaatgctttttgagcattctgaacttttttatgatttagatcttaatgcaacacctagttcagataaaatgagtgaaattcatacagttctgagtgaagaacctagatataaagctttacagaaacttgcacctgatagggaatcccttctacttaagcatataggatttgtttatcatcccactaaagaaacatgtcttagtggccaaaattgtacagacattaaagtggagcagttacttgctagtagtcttttacagttggatcatggccgcttaagattatatcacgatagtaccaatatagataaagttaacctttttattttagggaaggatggccttgcccaagaactagcaaatgagataaggacacaatccactgatgatgagtatgccttagatggaaaaatttatgaacttgatcttcggccggttgatgccaaatcgccttactttttgagtcagttatggactgccgcctttaaaccacatgggtgcttctgtgtatttaattccattgagtcattgagttttattggggaatttattgggaaaataagaactgaagcttctcagatcagaaaagataaatacatggctaatcttccatttacattaattctggctaatcagagagattccattagtaagaatctaccaattctcaggcaccaagggcagcagttggcaaacaagttgcaatgtccttttgtagatgtacctgctggtacatatcctcgtaaatttaatgaaacccaaataaagcaagctctcagaggagtattggaatcagttaaacacaatttggatgtggtgagcccaattcctgccaataaggacttatcagaagctgacttgagaattgtcatgtgcgccatgtgtggagatccatttagtgtggatcttattctttcacccttccttgattctcattcttgcagtgctgctcaagctggacagaataattccctaatgcttgataaaatcattggtgaaaaaaggaggcgaatacagatcacaatattatcataccactcttcaattggagtaagaaaagatgaactagttcatgggtatatattagtttactctgcaaaacggaaagcttcgatgggaatgcttcgagcatttctatcagaagttcaagacaccattcctgtacagctggtggcagttactgacagccaagcagatttttttgaaaatgaggctatcaaagagttaatgactgaaggagaacacattgcaactgagatcactgctaaatttacagcactgtattctttatctcagtatcatcggcaaactgaggtctttactctgttttttagtgatgttctagagaaaaaaaatatgatagaaaattcttatttgtctgataatacaagggaatcaacccatcaaagtgaagatgtttttctaccatctcccagagactgttttccctataataactaccctgattcagatgatgacacagaagcaccacctccttatagtccaattggggatgatgtacagttgcttccaacacctagtgaccgttccagatatagattagatttggaaggaaatgagtatcctattcatagtaccccaaactgtcatgaccatgaacgcaaccataaagtgcctccacctattaaacctaaaccagttgtacctaagacaaatgtgaaaaaactcgatccaaaccttttaaagacaattgaagctggtattggtaaaaatccaagaaagcagacttcccgggtgcctttggcacatcctgaagatatggatccttcagataactatgcggaacccattgatacaattttcaaacagaagggctattctgatgagatttatgttgtcccagatgatagtcaaaatcgtattaaaattcgaaactcatttgtaaataacacccaaggagatgaagaaaatgggttttctgatagaacctcaaaaagtcatggggaacggaggccttcaaaatacaaatataaatctaaaaccttgtttagtaaagccaagtcatactatagaagaacacattcagatgccagtgatgatgaggctttcaccacttctaaaacaaaaagaaaaggaagacatcgtggaagtgaagaagatccacttctttctcctgttgaaacttggaaaggtggtattgataatcctgcaatcacttctgaccaggagttagatgataagaagatgaagaagaaaacccacaaagtgaaagaagataaaaagaaaaagaaaactaagaacttcaatccaccaacacgtagaaattgggaaagtaattactttgggatgcccctccaggatctggttacagctgagaagcccataccactatttgttgagaaatgtgtggaatttattgaagatacagggttatgtaccgaaggactctaccgtgtcagcgggaataaaactgaccaagacaatattcaaaagcagtttgatcaagatcataatatcaatctagtgtcaatggaagtaacagtaaatgctgtagctggagcccttaaagctttctttgcagatctgccagatcctttaattccatattctcttcatccagaactattggaagcagcaaaaatcccggataaaacagaacgtcttcatgccttgaaagaaattgttaagaaatttcatcctgtaaactatgatgtattcagatacgtgataacacatctaaacagggttagtcagcaacataaaatcaacctaatgacagcagacaacttatccatctgtttttggccaaccttgatgagacctgattttgaaaatcgagagtttctgtctactactaagattcatcaatctgttgttgaaacattcattcagcagtgtcagtttttcttttacaatggagaaattgtagaaacgacaaacattgtggctcctccaccaccttcaaacccaggacagttggtggaaccaatggtgccacttcagttgccgccaccattgcaacctcagctgatacaaccacaattacaaacggatcctcttggtattatatgagtaggaagtgattgcaaacaggctggatttggacaaaaagcaaatctagacatgcatgtttcagggttcagtagtatacttcatgtttcatacagataattcacattcaaaattacattttctctttgaactagatggtattccttattcacttacattacaaatctaagaccatgtgataagcatgactggagaggtttaatttttataaacaaaaatagctataaagtacaaagctgctgctgcatgcaaccttattgcaatcagtatatcattcctgtggcaatttctgtcaccttatattgtgaataaaatttttctatagaaattaaatgatttaaaaactcacctatatgaaacatttaatgcttttcagcctgctttctggctgattttgttatttgatgtgctaatttgggcaacttaatttacattctggcagtcggtgtagataactaaaagcccagttaagtattttataatttcaggctactgaggccatgcttgggatgttgtttgaaagaaagaaaaaatacacttgacatatttcacatttctgtaccttcatctttacttccaagtaaacccgtggatgatttgatgagggataaatgaacctatttcttttacacacataccaaggacatgcttgtggctaaagtgagttgataatgttgtgcaaaggatagttgtcaccaactcatttctttatggtccataatgaaataaaaattttgtatactgttaattctgtaaacagatgcatgttcaaaagatctatgatggtcttgtaatcttaatctaatatattttagatattttaattttttccctcttggggaacacatttagtatagtgtagaaaatacttccatgacattttcatataaggttatataacttttcatacataaacatgaaatttgttgtagaaaattctttaaaccaaacatttaaatctaggacttcaatttaatttgttccttgaatctatttttatgtggcccttaaaaaatatccaaaaaacccattgctaatatagcaataaaaatactttgggtactgacagactctttggagtgtttatattacaaatttgtattcatattcttttctgtgatgtgttgtactaaaatccaaaatggcttttgcaccatttttaagccaattttttcctttgatgttggtaccagaattactataagtgactgctgcttttgggggtaaacattttgttagtgaagataaaaccagaacactaaattatggataaaattttcagaataggtggcacaggtaaatttcactaggttatattttgtgtagtaaagaaaaaaattatttggtcaatgttatcttaattcatactacaatttaagattatcttatgtgtattatagtaaatagatgattttcagattcaaggctcctaagagtttgatttgctctgttttttcctaaaataaatattgtctctcccaactgttaagttctaggtattgtacttccaattttaacttcagaaccaagatgttggcatgaaccaggctgctgttgaagtacatgtatattataaattatcttatttgtgttatactcttacatgttatcttttctaagaaaacaaagtccctattattcctattgcaaagcacacaggaattaagaaagtacagtaatttttaaaaaaaaatccggtaaatgtagtattcttaacctgttctatattacttatacctattgtctatatagctttaatttatagttgtcagtttaactattggcatgtctggcaaagaaaattaaactttaagagttttataaactgtttctaggttgctaaagaatttatttttctactatatatggtatagacaaagcatcaaactatgtacaggaaaaaagcctgactatttctatttggaagtaggctgaaaagagaattttcaaaactgttcgtgtcttcagttcattctgtcataactttgctattgtaatatgtgaataccagtttatttaagctgttctcttttatactgtattaatttaatgttcatctgcgtttagtaccatttttgttattaaaactggcatttaccgtttttcacattaacccaccttgcaccttcccccaaacttatctccacttttctatgcattctatcattgatttgacacacttcatagtgagtcatttaaatactctacgtttggttcaattaaccagtaggttacagttattgaaaattaaagtacagtttaaagctcagtctgttacactgaattgattgtgtttgtttttgccaagggtttagatatgcttttaaatattagaaacatctaagaacagaataacataattaaacttttttctggtaagttactggaaggtttcactgtttagggacctatcatatgagacttcttaaaggattaaaagaataggatagtctcataattgtgagtaaacatcaaggcattatattttacaatactgaataaaatttcatctacacacatgttgccattgtttcatttaaggttcagtgcttatagttaactacaatattggacctaacaggatctagattagcaatataaagaagcatagtggtactctgtttcacactttcagtagatttattagaagtcaaattctattcaacagacacttattaggatatacaactaatttaagaataaaattccaggcacaatatattttttttaaatggtatttgttagtagtgcttcttccccttaacatttacagtgtaaatactgcaggtaaccgcaatctaagttagccaaaaagcagctttttttcccatactgtatgtaaataatgtagacctgggtttttttgtttatttgggtttgtttttttttttgaggtactggaatctaattaatatctcttaggtatcaacaaaagggaacaattggaatgagaatttaggccttagcttccatggtgatttttagttttttatacagtaataattgtgatgctatttgtcaactggatataaatacacatataattttaaaaagtca

SEQ ID NO: 444260 - DNA, 3996 bp, Homo sapiens
aaagctagttgagagagcatactctggtttttcatctctcacagtagtcaaagaagttacatatacaattagaatttgttgtttctgttgccagaaactcaatacaatttgtcacatcaggaaaggttttttgttgttattgttgttgtttttgagacggaatttcacttcactcttgttgcccaggctggagtgcaatggcgcgatctcggctcaccacaacccccacctcccaggttcaagcgattctcctgcctcagcctcccaagtagctggaattacaggctttgtcactacgcctggctaattttgtatttttagtagagatggggtttctccatgttggtcctgctggtgtcgaactcccaacctcaggtgatccgcctgcctcagcctcccaaagtgctgcgattacaggcgtgagccactgcacctggcccaggaaaagttttttacatacgaattaaagatgcttctttatgcaaatttttaaaccccaggtttgaagtaggataaaaggtaacattaaatctgagatcatttctagctctggaattctgtgattgtaatgagttttgatttctaaatgttttttcctttcataatttcagggttagtcagcaacataaaatcaacctaatgacagcagacaacttatccatctgtttttggccaaccttgatgagacctgattttgaaaatcgagagtttctgtctactactaagattcatcaatctgttgttgaaacattcattcagcagtgtcagtttttcttttacaatggagaaattgtagaaacgacaaacattgtggctcctccaccaccttcaaacccaggacagttggtggaaccaatggtgccacttcagttgccgccaccattgcaacctcagctgatacaaccacaattacaaacggatcctcttggtattatatgagtaggaagtgattgcaaacaggctggatttggacaaaaagcaaatctagacatgcatgtttcagggttcagtagtatacttcatgtttcatacagataattcacattcaaaattacattttctctttgaactagatggtattccttattcacttacattacaaatctaagaccatgtgataagcatgactggagaggtttaatttttataaacaaaaatagctataaagtacaaagctgctgctgcatgcaaccttattgcaatcagtatatcattcctgtggcaatttctgtcaccttatattgtgaataaaatttttctatagaaattaaatgatttaaaaactcacctatatgaaacatttaatgcttttcagcctgctttctggctgattttgttatttgatgtgctaatttgggcaacttaatttacattctggcagtcggtgtagataactaaaagcccagttaagtattttataatttcaggctactgaggccatgcttgggatgttgtttgaaagaaagaaaaaatacacttgacatatttcacatttctgtaccttcatctttacttccaagtaaacccgtggatgatttgatgagggataaatgaacctatttcttttacacacataccaaggacatgcttgtggctaaagtgagttgataatgttgtgcaaaggatagttgtcaccaactcatttctttatggtccataatgaaataaaaattttgtatactgttaattctgtaaacagatgcatgttcaaaagatctatgatggtcttgtaatcttaatctaatatattttagatattttaattttttccctcttggggaacacatttagtatagtgtagaaaatacttccatgacattttcatataaggttatataacttttcatacataaacatgaaatttgttgtagaaaattctttaaaccaaacatttaaatctaggacttcaatttaatttgttccttgaatctatttttatgtggcccttaaaaaatatccaaaaaacccattgctaatatagcaataaaaatactttgggtactgacagactctttggagtgtttatattacaaatttgtattcatattcttttctgtgatgtgttgtactaaaatccaaaatggcttttgcaccatttttaagccaattttttcctttgatgttggtaccagaattactataagtgactgctgcttttgggggtaaacattttgttagtgaagataaaaccagaacactaaattatggataaaattttcagaataggtggcacaggtaaatttcactaggttatattttgtgtagtaaagaaaaaaattatttggtcaatgttatcttaattcatactacaatttaagattatcttatgtgtattatagtaaatagatgattttcagattcaaggctcctaagagtttgatttgctctgttttttcctaaaataaatattgtctctcccaactgttaagttctaggtattgtacttccaattttaacttcagaaccaagatgttggcatgaaccaggctgctgttgaagtacatgtatattataaattatcttatttgtgttatactcttacatgttatcttttctaagaaaacaaagtccctattattcctattgcaaagcacacaggaattaagaaagtacagtaatttttaaaaaaaaatccggtaaatgtagtattcttaacctgttctatattacttatacctattgtctatatagctttaatttatagttgtcagtttaactattggcatgtctggcaaagaaaattaaactttaagagttttataaactgtttctaggttgctaaagaatttatttttctactatatatggtatagacaaagcatcaaactatgtacaggaaaaaagcctgactatttctatttggaagtaggctgaaaagagaattttcaaaactgttcgtgtcttcagttcattctgtcataactttgctattgtaatatgtgaataccagtttatttaagctgttctcttttatactgtattaatttaatgttcatctgcgtttagtaccatttttgttattaaaactggcatttaccgtttttcacattaacccaccttgcaccttcccccaaacttatctccacttttctatgcattctatcattgatttgacacacttcatagtgagtcatttaaatactctacgtttggttcaattaaccagtaggttacagttattgaaaattaaagtacagtttaaagctcagtctgttacactgaattgattgtgtttgtttttgccaagggtttagatatgcttttaaatattagaaacatctaagaacagaataacataattaaacttttttctggtaagttactggaaggtttcactgtttagggacctatcatatgagacttcttaaaggattaaaagaataggatagtctcataattgtgagtaaacatcaaggcattatattttacaatactgaataaaatttcatctacacacatgttgccattgtttcatttaaggttcagtgcttatagttaactacaatattggacctaacaggatctagattagcaatataaagaagcatagtggtactctgtttcacactttcagtagatttattagaagtcaaattctattcaacagacacttattaggatatacaactaatttaagaataaaattccaggcacaatatattttttttaaatggtatttgttagtagtgcttcttccccttaacatttacagtgtaaatactgcaggtaaccgcaatctaagttagccaaaaagcagctttttttcccatactgtatgtaaataatgtagacctgggtttttttgtttatttgggtttgtttttttttttgaggtactggaatctaattaatatctcttaggtatcaacaaaagggaacaattggaatgagaatttaggccttagcttccatggtgatttttagttttttatacagtaataattgtgatgctatttgtcaactggatataaatacacatataattttaaaaagtca

SEQ ID NO: 444261 - DNA, 3913 bp, Homo sapiens
cagcgttattagaaatgcaagagagctggaggctcggggtgtagctgaggttgaaaggtgcacggaaaaaaagaaaactaagaacttcaatccaccaacacgtagaaattgggaaagtaattactttgggatgcccctccaggatctggttacagctgagaagcccataccactatttgttgagaaatgtgtggaatttattgaagatacagggttatgtaccgaaggactctaccgtgtcagcgggaataaaactgaccaagacaatattcaaaagcagtttgatcaagatcataatatcaatctagtgtcaatggaagtaacagtaaatgctgtagctggagcccttaaagctttctttgcagatctgccagatcctttaattccatattctcttcatccagaactattggaagcagcaaaaatcccggataaaacagaacgtcttcatgccttgaaagaaattgttaagaaatttcatcctgtaaactatgatgtattcagatacgtgataacacatctaaacagggttagtcagcaacataaaatcaacctaatgacagcagacaacttatccatctgtttttggccaaccttgatgagacctgattttgaaaatcgagagtttctgtctactactaagattcatcaatctgttgttgaaacattcattcagcagtgtcagtttttcttttacaatggagaaattgtagaaacgacaaacattgtggctcctccaccaccttcaaacccaggacagttggtggaaccaatggtgccacttcagttgccgccaccattgcaacctcagctgatacaaccacaattacaaacggatcctcttggtattatatgagtaggaagtgattgcaaacaggctggatttggacaaaaagcaaatctagacatgcatgtttcagggttcagtagtatacttcatgtttcatacagataattcacattcaaaattacattttctctttgaactagatggtattccttattcacttacattacaaatctaagaccatgtgataagcatgactggagaggtttaatttttataaacaaaaatagctataaagtacaaagctgctgctgcatgcaaccttattgcaatcagtatatcattcctgtggcaatttctgtcaccttatattgtgaataaaatttttctatagaaattaaatgatttaaaaactcacctatatgaaacatttaatgcttttcagcctgctttctggctgattttgttatttgatgtgctaatttgggcaacttaatttacattctggcagtcggtgtagataactaaaagcccagttaagtattttataatttcaggctactgaggccatgcttgggatgttgtttgaaagaaagaaaaaatacacttgacatatttcacatttctgtaccttcatctttacttccaagtaaacccgtggatgatttgatgagggataaatgaacctatttcttttacacacataccaaggacatgcttgtggctaaagtgagttgataatgttgtgcaaaggatagttgtcaccaactcatttctttatggtccataatgaaataaaaattttgtatactgttaattctgtaaacagatgcatgttcaaaagatctatgatggtcttgtaatcttaatctaatatattttagatattttaattttttccctcttggggaacacatttagtatagtgtagaaaatacttccatgacattttcatataaggttatataacttttcatacataaacatgaaatttgttgtagaaaattctttaaaccaaacatttaaatctaggacttcaatttaatttgttccttgaatctatttttatgtggcccttaaaaaatatccaaaaaacccattgctaatatagcaataaaaatactttgggtactgacagactctttggagtgtttatattacaaatttgtattcatattcttttctgtgatgtgttgtactaaaatccaaaatggcttttgcaccatttttaagccaattttttcctttgatgttggtaccagaattactataagtgactgctgcttttgggggtaaacattttgttagtgaagataaaaccagaacactaaattatggataaaattttcagaataggtggcacaggtaaatttcactaggttatattttgtgtagtaaagaaaaaaattatttggtcaatgttatcttaattcatactacaatttaagattatcttatgtgtattatagtaaatagatgattttcagattcaaggctcctaagagtttgatttgctctgttttttcctaaaataaatattgtctctcccaactgttaagttctaggtattgtacttccaattttaacttcagaaccaagatgttggcatgaaccaggctgctgttgaagtacatgtatattataaattatcttatttgtgttatactcttacatgttatcttttctaagaaaacaaagtccctattattcctattgcaaagcacacaggaattaagaaagtacagtaatttttaaaaaaaaatccggtaaatgtagtattcttaacctgttctatattacttatacctattgtctatatagctttaatttatagttgtcagtttaactattggcatgtctggcaaagaaaattaaactttaagagttttataaactgtttctaggttgctaaagaatttatttttctactatatatggtatagacaaagcatcaaactatgtacaggaaaaaagcctgactatttctatttggaagtaggctgaaaagagaattttcaaaactgttcgtgtcttcagttcattctgtcataactttgctattgtaatatgtgaataccagtttatttaagctgttctcttttatactgtattaatttaatgttcatctgcgtttagtaccatttttgttattaaaactggcatttaccgtttttcacattaacccaccttgcaccttcccccaaacttatctccacttttctatgcattctatcattgatttgacacacttcatagtgagtcatttaaatactctacgtttggttcaattaaccagtaggttacagttattgaaaattaaagtacagtttaaagctcagtctgttacactgaattgattgtgtttgtttttgccaagggtttagatatgcttttaaatattagaaacatctaagaacagaataacataattaaacttttttctggtaagttactggaaggtttcactgtttagggacctatcatatgagacttcttaaaggattaaaagaataggatagtctcataattgtgagtaaacatcaaggcattatattttacaatactgaataaaatttcatctacacacatgttgccattgtttcatttaaggttcagtgcttatagttaactacaatattggacctaacaggatctagattagcaatataaagaagcatagtggtactctgtttcacactttcagtagatttattagaagtcaaattctattcaacagacacttattaggatatacaactaatttaagaataaaattccaggcacaatatattttttttaaatggtatttgttagtagtgcttcttccccttaacatttacagtgtaaatactgcaggtaaccgcaatctaagttagccaaaaagcagctttttttcccatactgtatgtaaataatgtagacctgggtttttttgtttatttgggtttgtttttttttttgaggtactggaatctaattaatatctcttaggtatcaacaaaagggaacaattggaatgagaatttaggccttagcttccatggtgatttttagttttttatacagtaataattgtgatgctatttgtcaactggatataaatacacatataattttaaaaagtca

SEQ ID NO: 444262 - DNA, 2368 bp, Homo sapiens
tctatcttctgtcctgaggtcagaataatttgttaaaaatataaatgggggccgggtgcggtggctcacgtctgtaatcccagcactttgggaggcccaggtgggaggattgtttcagaccagcctaggcaacatgactctacaaaaaaattaaaaaaattagccggatgtgatggtacatgcctgtgatcccagctccttgggaggttgaggcgagtggatgaccttgagaccaggagtgtcagaggctggttgagctgagaggagcctctggggtaatgaagatcccctccttgcaggaggagaagagctggagctgatgggagaagatgcgtcttgctcccatcagatagcaataaaaatactttgggtactgacagactctttggagtgtttatattacaaatttgtattcatattcttttctgtgatgtgttgtactaaaatccaaaatggcttttgcaccatttttaagccaattttttcctttgatgttggtaccagaattactataagtgactgctgcttttgggggtaaacattttgttagtgaagataaaaccagaacactaaattatggataaaattttcagaataggtggcacaggtaaatttcactaggttatattttgtgtagtaaagaaaaaaattatttggtcaatgttatcttaattcatactacaatttaagattatcttatgtgtattatagtaaatagatgattttcagattcaaggctcctaagagtttgatttgctctgttttttcctaaaataaatattgtctctcccaactgttaagttctaggtattgtacttccaattttaacttcagaaccaagatgttggcatgaaccaggctgctgttgaagtacatgtatattataaattatcttatttgtgttatactcttacatgttatcttttctaagaaaacaaagtccctattattcctattgcaaagcacacaggaattaagaaagtacagtaatttttaaaaaaaaatccggtaaatgtagtattcttaacctgttctatattacttatacctattgtctatatagctttaatttatagttgtcagtttaactattggcatgtctggcaaagaaaattaaactttaagagttttataaactgtttctaggttgctaaagaatttatttttctactatatatggtatagacaaagcatcaaactatgtacaggaaaaaagcctgactatttctatttggaagtaggctgaaaagagaattttcaaaactgttcgtgtcttcagttcattctgtcataactttgctattgtaatatgtgaataccagtttatttaagctgttctcttttatactgtattaatttaatgttcatctgcgtttagtaccatttttgttattaaaactggcatttaccgtttttcacattaacccaccttgcaccttcccccaaacttatctccacttttctatgcattctatcattgatttgacacacttcatagtgagtcatttaaatactctacgtttggttcaattaaccagtaggttacagttattgaaaattaaagtacagtttaaagctcagtctgttacactgaattgattgtgtttgtttttgccaagggtttagatatgcttttaaatattagaaacatctaagaacagaataacataattaaacttttttctggtaagttactggaaggtttcactgtttagggacctatcatatgagacttcttaaaggattaaaagaataggatagtctcataattgtgagtaaacatcaaggcattatattttacaatactgaataaaatttcatctacacacatgttgccattgtttcatttaaggttcagtgcttatagttaactacaatattggacctaacaggatctagattagcaatataaagaagcatagtggtactctgtttcacactttcagtagatttattagaagtcaaattctattcaacagacacttattaggatatacaactaatttaagaataaaattccaggcacaatatattttttttaaatggtatttgttagtagtgcttcttccccttaacatttacagtgtaaatactgcaggtaaccgcaatctaagttagccaaaaagcagctttttttcccatactgtatgtaaataatgtagacctgggtttttttgtttatttgggtttgtttttttttttgaggtactggaatctaattaatatctcttaggtatcaacaaaagggaacaattggaatgagaatttaggccttagcttccatggtgatttttagttttttatacagtaataattgtgatgctatttgtcaactggatataaatacacatataattttaaaaagtca

SEQ ID NO: 444263 - DNA, 4715 bp, Homo sapiens
cgtccaggctgcgccgccgcgccgccgctccgcccccggtcgggtgtgtggctgcgcgcgccgggagagatgctgaggtaaagttcgggagagagggagagaaatccgtcagcgcgagggagcccgagtggccgccattactgagcccggcgcggcggcgggcgctggggaaggggggagggacgggccgccgctggtggcggggagggagggagggagggtgggtgagctggctgcgggagccgtggggctcagggtttcggggcgtgtgtgtcggggagggcggggggaggtggctgaagggacgcgccgctcggtgagcgcgccgaggaagagaggcgagcggagagtggaggaggaggcggcggcggcgggagcggtccccaggaatgtcgctgccgcgccaccgccgggccgctgccgttgaggaggagacggaggagaccgacgttgttagggaagatgatccctatgatcttgaagatgtttctgcacagaaatgagggaaatacaaagaaccaaatacagttctgaaatttgggatctgtattttgagatgattttattttcagaatgagaagcatatctggttacctttatgaatgtagagacatgagaagagagttatgatggcaaaaaacaaagagcctcgtcccccatcctataccatcagtatagttggactctctgggactgaaaaagacaaaggtaactgtggagttggaaagtcttgtttgtgcaatagatttgtacgctcaaaagcagatgaatattatccagagcatacttctgtgcttagcaccattgactttggaggacgagtagtaaacaatgatcactttttgtactggggtgacataatacaaaatagtgaagatggagtagaatgcaaaattcatgtcattgaacaaacagagttcattgatgaccagactttcttgcctcatcggagtacgaatttgcaaccatatataaaacgtgcagctgcatctaaattgcagtcagcagaaaaactaatgtacatttgcactgatcagctaggcttagaacaagactttgaacagaagcaaatgcctgaagggaagctcaacgtagatggatttttattatgcattgatgtaagtcaaggatgcaataggaagtttgatgatcaacttaaatttgtgaataacctttttgtccagttatcaaaatcaaaaaaacctgtaataatagcagcaactaaatgtgatgaatgcgtgggtcattatcttagagaagttcaggcatttgcttcaaataaaaagaaccttcttgtagtggaaacactcagcgcaataaaagtcaacattgaaacatgttttactgcactggtacaaatgttggataaaactcgtagcaagcctaaaattattccctatttggatgcttataaaacacagagacaacttgttgtcacagcaacagataagtttgaaaaacttgtgcagactgtgagagattatcatgcaacttggaaaactgttagtaataaattaaaaaatcatcctgattatgaagaatacatcaacttagagggaacaagaaaggccagaaatacattctcaaaacatatagaacaacttaaacaggaacatataagaaaaaggagagaagagtatataaatactttaccaagagcttttaacactcttttgccaaatctagaagagattgaacatttgaattggtcagaagctttgaagttaatggaaaagagagcagatttccagttatgttttgtggtgctagaaaaaactccttgggatgaaactgaccatatagacaaaattaatgataggcggattccatttgacctcctgagcactttagaagctgaaaaagtctatcagaaccatgtacagcatctgatatccgagaagaggagggtggaaatgaaggaaaaattcaaaaagactttggaaaaaattcaattcatttcaccagggcagccatgggaggaagttatgtgctttgttatggaggatgaagcctacaaatatatcactgaggctgatagcaaagaggtatatggtaggcatcagcgagaaatagttgaaaaagccaaagaagagtttcaagaaatgctttttgagcattctgaacttttttatgatttagatcttaatgcaacacctagttcagataaaatgagtgaaattcatacagttctgagtgaagaacctagatataaagctttacagaaacttgcacctgatagggaatcccttctacttaagcatataggatttgtttatcatcccactaaagaaacatgtcttagtggccaaaattgtacagacattaaagtggagcagttacttgctagtagtcttttacagttggatcatggccgcttaagattatatcacgatagtaccaatatagataaagttaacctttttattttagggaaggatggccttgcccaagaactagcaaatgagataaggacacaatccactgatgatgagtatgccttagatggaaaaatttatgaacttgatcttcggccggttgatgccaaatcgccttactttttgagtcagttatggactgccgcctttaaaccacatgggtgcttctgtgtatttaattccattgagtcattgagttttattggggaatttattgggaaaataagaactgaagcttctcagatcagaaaagataaatacatggctaatcttccatttacattaattctggctaatcagagagattccattagtaagaatctaccaattctcaggcaccaagggcagcagttggcaaacaagttgcaatgtccttttgtagatgtacctgctggtacatatcctcgtaaatttaatgaaacccaaataaagcaagctctcagaggagtattggaatcagttaaacacaatttggatgtggtgagcccaattcctgccaataaggacttatcagaagctgacttgagaattgtcatgtgcgccatgtgtggagatccatttagtgtggatcttattctttcacccttccttgattctcattcttgcagtgctgctcaagctggacagaataattccctaatgcttgataaaatcattggtgaaaaaaggaggcgaatacagatcacaatattatcataccactcttcaattggagtaagaaaagatgaactagttcatgggtatatattagtttactctgcaaaacggaaagcttcgatgggaatgcttcgagcatttctatcagaagttcaagacaccattcctgtacagctggtggcagttactgacagccaagcagatttttttgaaaatgaggctatcaaagagttaatgactgaaggagaacacattgcaactgagatcactgctaaatttacagcactgtattctttatctcagtatcatcggcaaactgaggtctttactctgttttttagtgatgttctagagaaaaaaaatatgatagaaaattcttatttgtctgataatacaagggaatcaacccatcaaagtgaagatgtttttctaccatctcccagagactgttttccctataataactaccctgattcagatgatgacacagaagcaccacctccttatagtccaattggggatgatgtacagttgcttccaacacctagtgaccgttccagatatagattagatttggaaggaaatgagtatcctattcatagtaccccaaactgtcatgaccatgaacgcaaccataaagtgcctccacctattaaacctaaaccagttgtacctaagacaaatgtgaaaaaactcgatccaaaccttttaaagacaattgaagctggtattggtaaaaatccaagaaagcagacttcccgggtgcctttggcacatcctgaagatatggatccttcagataactatgcggaacccattgatacaattttcaaacagaagggctattctgatgagatttatgttgtcccagatgatagtcaaaatcgtattaaaattcgaaactcatttgtaaataacacccaaggagatgaagaaaatgggttttctgatagaacctcaaaaagtcatggggaacggaggccttcaaaatacaaatataaatctaaaaccttgtttagtaaagccaagtcatactatagaagaacacattcagatgccagtgatgatgaggctttcaccacttctaaaacaaaaagaaaaggaagacatcgtggaagtgaagaagatccacttctttctcctgttgaaacttggaaaggtggtattgataatcctgcaatcacttctgaccaggagttagatgataagaagatgaagaagaaaacccacaaagtgaaagaagataaaaagaaaaagaaaactaagaacttcaatccaccaacacgtagaaattgggaaagtaattactttgggatgcccctccaggatctggttacagctgagaagcccataccactatttgttgagaaatgtgtggaatttattgaagatacaggtaggatagaagaatcattgcaagagatttgattttaaatttcacttttgatacaccaacagtttgtcaaatgtttgtgatttgttaatatagttctcattattaggattatttagtattaactccatctgatcaggtaaccatctgatatttgaaagaagtttttgttgttgaccagtaatgcttttattggacttctcttgaagtaataaatggctaagttgaat

SEQ ID NO: 444264 - DNA, 1021 bp, Homo sapiens
cgtccaggctgcgccgccgcgccgccgctccgcccccggtcgggtgtgtggctgcgcgcgccgggagagatgctgaggtaaagttcgggagagagggagagaaatccgtcagcgcgagggagcccgagtggccgccattactgagcccggcgcggcggcgggcgctggggaaggggggagggacgggccgccgctggtggcggggagggagggagggagggtgggtgagctggctgcgggagccgtggggctcagggtttcggggcgtgtgtgtcggggagggcggggggaggtggctgaagggacgcgccgctcggtgagcgcgccgaggaagagaggcgagcggagagtggaggaggaggcggcggcggcgggagcggtccccaggaatgtcgctgccgcgccaccgccgggccgctgccgttgaggaggagacggaggagaccgacgttgttagggttatgtaccgaaggactctaccgtgtcagcgggaataaaactgaccaagacaatattcaaaagcagtttgatcaagatcataatatcaatctagtgtcaatggaagtaacagtaaatgctgtagctggagcccttaaagctttctttgcagatctgccagatcctttaattccatattctcttcatccagaactattggaagcagcaaaaatcccggataaaacagaacgtcttcatgccttgaaagaaattgttaagaaatttcatcctgtaaactatgatgtattcagatacgtgataacacatctaaacaggtatttttatttttttagggttttttggcaaataaaatgcactacacatttcaaacatgtaaattttataaattggataattatcagatagaaaaggggactcagactaaacatatagttgaattttgtttttctaatttatatctaaaaagatatatgattagttttgtaatgtaattattatataaatagtaagtgtggtaagtatattttcctttttaccacattctctgtaaaatcttagaatt

SEQ ID NO: 444265 - DNA, 252 bp, Homo sapiens
cttcctctctttccactaaagaaaagtatcggggtgggggtggggagccgcgcgggagcgcgcgcgcacttatccacacagaaatactccctctcaccctccctcttcagcgttattagaaatgcaagagagctggaggctcggggtgtagctgaggttgaaaggtgcacggaagtaagggcaaactgttattaggccgtttagtaaaatcccgaaaaagttgtaggggagacgcttatacttctaccatgt

SEQ ID NO: 444266 - DNA, 500 bp, Homo sapiens
ccacaaagtgaaagaagataaaaaggtaaggttaacttaaggtcagtgatgtttataaaaatgcttgttgttgcttttttaaaatactgacatcagtgttagaatttagtctcattcattccatacataataattagtagccctttttaattttctgagtattctgtggggataagtgattttttgttatttttgtgctttattggggtagagtttgatttcatattcttcagcataaaaattcttggtgaatgtgttttttctttttacagaaacccagatatgaagtgattttgttcttaatttttccatttgtaatcatcctatttttctgtttttcccttctgccctaccagttttgcggtattaatttgacatacctgtctcactcaaggatattaataatacaataaaattgtaacagtttacagtcttggatatttattaacttttccaggaagcttctttgcagatggtggtatactacctgaaggtataca

SEQ ID NO: 444267 - DNA, 8189 bp, Homo sapiens
cgtccaggctgcgccgccgcgccgccgctccgcccccggtcgggtgtgtggctgcgcgcgccgggagagatgctgaggtaaagttcgggagagagggagagaaatccgtcagcgcgagggagcccgagtggccgccattactgagcccggcgcggcggcgggcgctggggaaggggggagggacgggccgccgctggtggcggggagggagggagggagggtgggtgagctggctgcgggagccgtggggctcagggtttcggggcgtgtgtgtcggggagggcggggggaggtggctgaagggacgcgccgctcggtgagcgcgccgaggaagagaggcgagcggagagtggaggaggaggcggcggcggcgggagcggtccccaggaatgtcgctgccgcgccaccgccgggccgctgccgttgaggaggagacggaggagaccgacgttgttagggaagatgatccctatgatcttgaagatgtttctgcacagaaatgagggaaatacaaagaaccaaatacagttctgaaatttgggatctgtattttgagatgattttattttcagaatgagaagcatatctggttacctttatgaatgtagagacatgagaagagagttatgatggcaaaaaacaaagagcctcgtcccccatcctataccatcagtatagttggactctctgggactgaaaaagacaaaggtaactgtggagttggaaagtcttgtttgtgcaatagatttgtacgctcaaaagcagatgaatattatccagagcatacttctgtgcttagcaccattgactttggaggacgagtagtaaacaatgatcactttttgtactggggtgacataatacaaaatagtgaagatggagtagaatgcaaaattcatgtcattgaacaaacagagttcattgatgaccagactttcttgcctcatcggagtacgaatttgcaaccatatataaaacgtgcagctgcatctaaattgcagtcagcagaaaaactaatgtacatttgcactgatcagctaggcttagaacaagactttgaacagaagcaaatgcctgaagggaagctcaacgtagatggatttttattatgcattgatgtaagtcaaggatgcaataggaagtttgatgatcaacttaaatttgtgaataacctttttgtccagttatcaaaatcaaaaaaacctgtaataatagcagcaactaaatgtgatgaatgcgtgggtcattatcttagagaagttcaggcatttgcttcaaataaaaagaaccttcttgtagtggaaacactcagcgcaataaaagtcaacattgaaacatgttttactgcactggtacaaatgttggataaaactcgtagcaagcctaaaattattccctatttggatgcttataaaacacagagacaacttgttgtcacagcaacagataagtttgaaaaacttgtgcagactgtgagagattatcatgcaacttggaaaactgttagtaataaattaaaaaatcatcctgattatgaagaatacatcaacttagagggaacaagaaaggccagaaatacattctcaaaacatatagaacaacttaaacaggaacatataagaaaaaggagagaagagtatataaatactttaccaagagcttttaacactcttttgccaaatctagaagagattgaacatttgaattggtcagaagctttgaagttaatggaaaagagagcagatttccagttatgttttgtggtgctagaaaaaactccttgggatgaaactgaccatatagacaaaattaatgataggcggattccatttgacctcctgagcactttagaagctgaaaaagtctatcagaaccatgtacagcatctgatatccgagaagaggagggtggaaatgaaggaaaaattcaaaaagactttggaaaaaattcaattcatttcaccagggcagccatgggaggaagttatgtgctttgttatggaggatgaagcctacaaatatatcactgaggctgatagcaaagaggtatatggtaggcatcagcgagaaatagttgaaaaagccaaagaagagtttcaagaaatgctttttgagcattctgaacttttttatgatttagatcttaatgcaacacctagttcagataaaatgagtgaaattcatacagttctgagtgaagaacctagatataaagctttacagaaacttgcacctgatagggaatcccttctacttaagcatataggatttgtttatcatcccactaaagaaacatgtcttagtggccaaaattgtacagacattaaagtggagcagttacttgctagtagtcttttacagttggatcatggccgcttaagattatatcacgatagtaccaatatagataaagttaacctttttattttagggaaggatggccttgcccaagaactagcaaatgagataaggacacaatccactgatgatgagtatgccttagatggaaaaatttatgaacttgatcttcggccggttgatgccaaatcgccttactttttgagtcagttatggactgccgcctttaaaccacatgggtgcttctgtgtatttaattccattgagtcattgagttttattggggaatttattgggaaaataagaactgaagcttctcagatcagaaaagataaatacatggctaatcttccatttacattaattctggctaatcagagagattccattagtaagaatctaccaattctcaggcaccaagggcagcagttggcaaacaagttgcaatgtccttttgtagatgtacctgctggtacatatcctcgtaaatttaatgaaacccaaataaagcaagctctcagaggagtattggaatcagttaaacacaatttggatgtggtgagcccaattcctgccaataaggacttatcagaagctgacttgagaattgtcatgtgcgccatgtgtggagatccatttagtgtggatcttattctttcacccttccttgattctcattcttgcagtgctgctcaagctggacagaataattccctaatgcttgataaaatcattggtgaaaaaaggaggcgaatacagatcacaatattatcataccactcttcaattggagtaagaaaagatgaactagttcatgggtatatattagtttactctgcaaaacggaaagcttcgatgggaatgcttcgagcatttctatcagaagttcaagacaccattcctgtacagctggtggcagttactgacagccaagcagatttttttgaaaatgaggctatcaaagagttaatgactgaaggagaacacattgcaactgagatcactgctaaatttacagcactgtattctttatctcagtatcatcggcaaactgaggtctttactctgttttttagtgatgttctagagaaaaaaaatatgatagaaaattcttatttgtctgataatacaagggaatcaacccatcaaagtgaagatgtttttctaccatctcccagagactgttttccctataataactaccctgattcagatgatgacacagaagcaccacctccttatagtccaattggggatgatgtacagttgcttccaacacctagtgaccgttccagatatagattagatttggaaggaaatgagtatcctattcatagtaccccaaactgtcatgaccatgaacgcaaccataaagtgcctccacctattaaacctaaaccagttgtacctaagacaaatgtgaaaaaactcgatccaaaccttttaaagacaattgaagctggtattggtaaaaatccaagaaagcagacttcccgggtgcctttggcacatcctgaagatatggatccttcagataactatgcggaacccattgatacaattttcaaacagaagggctattctgatgagatttatgttgtcccagatgatagtcaaaatcgtattaaaattcgaaactcatttgtaaataacacccaaggagatgaagaaaatgggttttctgatagaacctcaaaaagtcatggggaacggaggccttcaaaatacaaatataaatctaaaaccttgtttagtaaagccaagtcatactatagaagaacacattcagatgccagtgatgatgaggctttcaccacttctaaaacaaaaagaaaaggaagacatcgtggaagtgaagaagatccacttctttctcctgttgaaacttggaaaggtggtattgataatcctgcaatcacttctgaccaggagttagatgataagaagatgaagaagaaaacccacaaagtgaaagaagataaaaagaaaaagaaaactaagaacttcaatccaccaacacgtagaaattgggaaagtaattactttgggatgcccctccaggatctggttacagctgagaagcccataccactatttgttgagaaatgtgtggaatttattgaagatacagggttatgtaccgaaggactctaccgtgtcagcgggaataaaactgaccaagacaatattcaaaagcagtttgatcaagatcataatatcaatctagtgtcaatggaagtaacagtaaatgctgtagctggagcccttaaagctttctttgcagatctgccagatcctttaattccatattctcttcatccagaactattggaagcagcaaaaatcccggataaaacagaacgtcttcatgccttgaaagaaattgttaagaaatttcatcctgtaaactatgatgtattcagatacgtgataacacatctaaacagggttagtcagcaacataaaatcaacctaatgacagcagacaacttatccatctgtttttggccaaccttgatgagacctgattttgaaaatcgagagtttctgtctactactaagattcatcaatctgttgttgaaacattcattcagcagtgtcagtttttcttttacaatggagaaattgtagaaacgacaaacattgtggctcctccaccaccttcaaacccaggacagttggtggaaccaatggtgccacttcagttgccgccaccattgcaacctcagctgatacaaccacaattacaaacggatcctcttggtattatatgagtaggaagtgattgcaaacaggctggatttggacaaaaagcaaatctagacatgcatgtttcagggttcagtagtatacttcatgtttcatacagataattcacattcaaaattacattttctctttgaactagatggtattccttattcacttacattacaaatctaagaccatgtgataagcatgactggagaggtttaatttttataaacaaaaatagctataaagtacaaagctgctgctgcatgcaaccttattgcaatcagtatatcattcctgtggcaatttctgtcaccttatattgtgaataaaatttttctatagaaattaaatgatttaaaaactcacctatatgaaacatttaatgcttttcagcctgctttctggctgattttgttatttgatgtgctaatttgggcaacttaatttacattctggcagtcggtgtagataactaaaagcccagttaagtattttataatttcaggctactgaggccatgcttgggatgttgtttgaaagaaagaaaaaatacacttgacatatttcacatttctgtaccttcatctttacttccaagtaaacccgtggatgatttgatgagggataaatgaacctatttcttttacacacataccaaggacatgcttgtggctaaagtgagttgataatgttgtgcaaaggatagttgtcaccaactcatttctttatggtccataatgaaataaaaattttgtatactgttaattctgtaaacagatgcatgttcaaaagatctatgatggtcttgtaatcttaatctaatatattttagatattttaattttttccctcttggggaacacatttagtatagtgtagaaaatacttccatgacattttcatataaggttatataacttttcatacataaacatgaaatttgttgtagaaaattctttaaaccaaacatttaaatctaggacttcaatttaatttgttccttgaatctatttttatgtggcccttaaaaaatatccaaaaaacccattgctaatatagcaataaaaatactttgggtactgacagactctttggagtgtttatattacaaatttgtattcatattcttttctgtgatgtgttgtactaaaatccaaaatggcttttgcaccatttttaagccaattttttcctttgatgttggtaccagaattactataagtgactgctgcttttgggggtaaacattttgttagtgaagataaaaccagaacactaaattatggataaaattttcagaataggtggcacaggtaaatttcactaggttatattttgtgtagtaaagaaaaaaattatttggtcaatgttatcttaattcatactacaatttaagattatcttatgtgtattatagtaaatagatgattttcagattcaaggctcctaagagtttgatttgctctgttttttcctaaaataaatattgtctctcccaactgttaagttctaggtattgtacttccaattttaacttcagaaccaagatgttggcatgaaccaggctgctgttgaagtacatgtatattataaattatcttatttgtgttatactcttacatgttatcttttctaagaaaacaaagtccctattattcctattgcaaagcacacaggaattaagaaagtacagtaatttttaaaaaaaaatccggtaaatgtagtattcttaacctgttctatattacttatacctattgtctatatagctttaatttatagttgtcagtttaactattggcatgtctggcaaagaaaattaaactttaagagttttataaactgtttctaggttgctaaagaatttatttttctactatatatggtatagacaaagcatcaaactatgtacaggaaaaaagcctgactatttctatttggaagtaggctgaaaagagaattttcaaaactgttcgtgtcttcagttcattctgtcataactttgctattgtaatatgtgaataccagtttatttaagctgttctcttttatactgtattaatttaatgttcatctgcgtttagtaccatttttgttattaaaactggcatttaccgtttttcacattaacccaccttgcaccttcccccaaacttatctccacttttctatgcattctatcattgatttgacacacttcatagtgagtcatttaaatactctacgtttggttcaattaaccagtaggttacagttattgaaaattaaagtacagtttaaagctcagtctgttacactgaattgattgtgtttgtttttgccaagggtttagatatgcttttaaatattagaaacatctaagaacagaataacataattaaacttttttctggtaagttactggaaggtttcactgtttagggacctatcatatgagacttcttaaaggattaaaagaataggatagtctcataattgtgagtaaacatcaaggcattatattttacaatactgaataaaatttcatctacacacatgttgccattgtttcatttaaggttcagtgcttatagttaactacaatattggacctaacaggatctagattagcaatataaagaagcatagtggtactctgtttcacactttcagtagatttattagaagtcaaattctattcaacagacacttattaggatatacaactaatttaagaataaaattccaggcacaatatattttttttaaatggtatttgttagtagtgcttcttccccttaacatttacagtgtaaatactgcaggtaaccgcaatctaagttagccaaaaagcagctttttttcccatactgtatgtaaataatgtagacctgggtttttttgtttatttgggtttgtttttttttttgaggtactggaatctaattaatatctcttaggtatcaacaaaagggaacaattggaatgagaatttaggccttagcttccatggtgatttttagttttttatacagtaataattgtgatgctatttgtcaactggatataaatacacatataattttaaaaagtca

SEQ ID NO: 444268 - DNA, 7988 bp, Homo sapiens
cgtccaggctgcgccgccgcgccgccgctccgcccccggtcgggtgtgtggctgcgcgcgccgggagagatgctgaggtaaagttcgggagagagggagagaaatccgtcagcgcgagggagcccgagtggccgccattactgagcccggcgcggcggcgggcgctggggaaggggggagggacgggccgccgctggtggcggggagggagggagggagggtgggtgagctggctgcgggagccgtggggctcagggtttcggggcgtgtgtgtcggggagggcggggggaggtggctgaagggacgcgccgctcggtgagcgcgccgaggaagagaggcgagcggagagtggaggaggaggcggcggcggcgggagcggtccccaggaatgtcgctgccgcgccaccgccgggccgctgccgttgaggaggagacggaggagaccgacgttgttagggaagatgatccctatgatcttgaagatgtttctgcacagaaatgagggaaatacaaagaaccaaatacagttctgaaatttgggatctgtattttgagatgattttattttcagaatgagaagcatatctggttacctttatgaatgtagagacatgagaagagagttatgatggcaaaaaacaaagagcctcgtcccccatcctataccatcagtatagttggactctctgggactgaaaaagacaaaggtaactgtggagttggaaagtcttgtttgtgcaatagatttgtacgctcaaaagcagatgaatattatccagagcatacttctgtgcttagcaccattgactttggaggacgagtagtaaacaatgatcactttttgtactggggtgacataatacaaaatagtgaagatggagtagaatgcaaaattcatgtcattgaacaaacagagttcattgatgaccagactttcttgcctcatcggagtacgaatttgcaaccatatataaaacgtgcagctgcatctaaattgcagtcagcagaaaaactaatgtacatttgcactgatcagctaggcttagaacaagactttgaacagaagcaaatgcctgaagggaagctcaacgtagatggatttttattatgcattgatgtaagtcaaggatgcaataggaagtttgatgatcaacttaaatttgtgaataacctttttgtccagttatcaaaatcaaaaaaacctgtaataatagcagcaactaaatgtgatgaatgcgtgggtcattatcttagagaagttcaggcatttgcttcaaataaaaagaaccttcttgtagtggaaacactcagcgcaataaaagtcaacattgaaacatgttttactgcactggtacaaatgttggataaaactcgtagcaagcctaaaattattccctatttggatgcttataaaacacagagacaacttgttgtcacagcaacagataagtttgaaaaacttgtgcagactgtgagagattatcatgcaacttggaaaactgttagtaataaattaaaaaatcatcctgattatgaagaatacatcaacttagagggaacaagaaaggccagaaatacattctcaaaacatatagaacaacttaaacaggaacatataagaaaaaggagagaagagtatataaatactttaccaagagcttttaacactcttttgccaaatctagaagagattgaacatttgaattggtcagaagctttgaagttaatggaaaagagagcagatttccagttatgttttgtggtgctagaaaaaactccttgggatgaaactgaccatatagacaaaattaatgataggcggattccatttgacctcctgagcactttagaagctgaaaaagtctatcagaaccatgtacagcatctgatatccgagaagaggagggtggaaatgaaggaaaaattcaaaaagactttggaaaaaattcaattcatttcaccagggcagccatgggaggaagttatgtgctttgttatggaggatgaagcctacaaatatatcactgaggctgatagcaaagaggtatatggtaggcatcagcgagaaatagttgaaaaagccaaagaagagtttcaagaaatgctttttgagcattctgaacttttttatgatttagatcttaatgcaacacctagttcagataaaatgagtgaaattcatacagttctgagtgaagaacctagatataaagctttacagaaacttgcacctgatagggaatcccttctacttaagcatataggatttgtttatcatcccactaaagaaacatgtcttagtggccaaaattgtacagacattaaagtggagcagttacttgctagtagtcttttacagttggatcatggccgcttaagattatatcacgatagtaccaatatagataaagttaacctttttattttagggaaggatggccttgcccaagaactagcaaatgagataaggacacaatccactgatgatgagtatgccttagatggaaaaatttatgaacttgatcttcggccggttgatgccaaatcgccttactttttgagtcagttatggactgccgcctttaaaccacatgggtgcttctgtgtatttaattccattgagtcattgagttttattggggaatttattgggaaaataagaactgaagcttctcagatcagaaaagataaatacatggctaatcttccatttacattaattctggctaatcagagagattccattagtaagaatctaccaattctcaggcaccaagggcagcagttggcaaacaagttgcaatgtccttttgtagatgtacctgctggtacatatcctcgtaaatttaatgaaacccaaataaagcaagctctcagaggagtattggaatcagttaaacacaatttggatgtggtgagcccaattcctgccaataaggacttatcagaagctgacttgagaattgtcatgtgcgccatgtgtggagatccatttagtgtggatcttattctttcacccttccttgattctcattcttgcagtgctgctcaagctggacagaataattccctaatgcttgataaaatcattggtgaaaaaaggaggcgaatacagatcacaatattatcataccactcttcaattggagtaagaaaagatgaactagttcatgggtatatattagtttactctgcaaaacggaaagcttcgatgggaatgcttcgagcatttctatcagaagttcaagacaccattcctgtacagctggtggcagttactgacagccaagcagatttttttgaaaatgaggctatcaaagagttaatgactgaaggagaacacattgcaactgagatcactgctaaatttacagcactgtattctttatctcagtatcatcggcaaactgaggtctttactctgttttttagtgatgttctagagaaaaaaaatatgatagaaaattcttatttgtctgataatacaagggaatcaacccatcaaagtgaagatgtttttctaccatctcccagagactgttttccctataataactaccctgattcagatgatgacacagaagcaccacctccttatagtccaattggggatgatgtacagttgcttccaacacctagtgaccgttccagatatagattagatttggaaggaaatgagtatcctattcatagtaccccaaactgtcatgaccatgaacgcaaccataaagtgcctccacctattaaacctaaaccagttgtacctaagacaaatgtgaaaaaactcgatccaaaccttttaaagacaattgaagctggtattggtaaaaatccaagaaagcagacttcccgggtgcctttggcacatcctgaagatatggatccttcagataactatgcggaacccattgatacaattttcaaacagaagggctattctgatgagatttatgttgtcccagatgatagtcaaaatcgtattaaaattcgaaactcatttgtaaataacacccaaggagatgaagaaaatgggttttctgatagaacctcaaaaagtcatggggaacggaggccttcaaaatacaaatataaatctaaaaccttgtttagtaaagccaagtcatactatagaagaacacattcagatgccagtgatgatgaggctttcaccacttctaaaacaaaaagaaaaggaagacatcgtggaagtgaagaagatccacttctttctcctgttgaaacttggaaaggtggtattgataatcctgcaatcacttctgaccaggagttagatgataagaagatgaagaagaaaacccacaaagtgaaagaagataaaaagaaaaagaaaactaagaacttcaatccaccaacacgtagaaattgggaaagtaattactttgggatgcccctccaggatctggttacagctgagaagcccataccactatttgttgagaaatgtgtggaatttattgaagatacagggttatgtaccgaaggactctaccgtgtcagcgggaataaaactgaccaagacaatattcaaaagcagtttgatcaagatcataatatcaatctagtgtcaatggaagtaacagtaaatgctgtagctggagcccttaaagctttctttgcagatctgccagatcctttaattccatattctcttcatccagaactattggaagcagcaaaaatcccggataaaacagaacgtcttcatgccttgaaagaaattgttaagaaatttcatcctgtaaactatgatgtattcagatacgtgataacacatctaaacagggttagtcagcaacataaaatcaacctaatgacagcagacaacttatccatctgtttttggccaaccttgatgagacctgattttgaaaatcgagagtttctgtctactactaagattcatcaatctgttgttgaaacattcattcagcagtgtcagtttttcttttacaatggagaaattgtagaaacgacaaacattgtggctcctccaccaccttcaaacccaggacagttggtggaaccaatggtgccacttcagttgccgccaccattgcaacctcagctgatacaaccacaattacaaacggatcctcttggtattatatgagtaggaagtgattgcaaacaggctggatttggacaaaaagcaaatctagacatgcatgtttcagggttcagtagtatacttcatgtttcatacagataattcacattcaaaattacattttctctttgaactagatggtattccttattcacttacattacaaatctaagaccatgtgataagcatgactggagaggtttaatttttataaacaaaaatagctataaagtacaaagctgctgctgcatgcaaccttattgcaatcagtatatcattcctgtggcaatttctgtcaccttatattgtgaataaaatttttctatagaaattaaatgatttaaaaactcacctatatgaaacatttaatgcttttcagcctgctttctggctgattttgttatttgatgtgctaatttgggcaacttaatttacattctggcagtcggtgtagataactaaaagcccagttaagtattttataatttcaggctactgaggccatgcttgggatgttgtttgaaagaaagaaaaaatacacttgacatatttcacatttctgtaccttcatctttacttccaagtaaacccgtggatgatttgatgagggataaatgaacctatttcttttacacacataccaaggacatgcttgtggctaaagtgagttgataatgttgtgcaaaggatagttgtcaccaactcatttctttatggtccataatgaaataaaaattttgtatactgttaattctgtaaacagatgcatgttcaaaagatctatgatggtcttgtaatcttaatctaatatattttagatattttaattttttccctcttggggaacacatttagtatagtgtagaaaatacttccatgacattttcatataaggttatataacttttcatacataaacatgaaatttgttgtagaaaattctttaaaccaaacatttaaatctaggacttcaatttaatttgttccttgaatctatttttatgtggcccttaaaaaatatccaaaaaacccattgctaatatagcaataaaaatactttgggtactgacagactctttggagtgtttatattacaaatttgtattcatattcttttctgtgatgtgttgtactaaaatccaaaatggcttttgcaccatttttaagccaattttttcctttgatgttggtaccagaattactataagtgactgctgcttttgggggtaaacattttgttagtgaagataaaaccagaacactaaattatggataaaattttcagaataggtggcacaggtaaatttcactaggttatattttgtgtagtaaagaaaaaaattatttggtcaatgttatcttaattcatactacaatttaagattatcttatgtgtattatagtaaatagatgattttcagattcaaggctcctaagagtttgatttgctctgttttttcctaaaataaatattgtctctcccaactgttaagttctaggtattgtacttccaattttaacttcagaaccaagatgttggcatgaaccaggctgctgttgaagtacatgtatattataaattatcttatttgtgttatactcttacatgttatcttttctaagaaaacaaagtccctattattcctattgcaaagcacacaggaattaagaaagtacagtaatttttaaaaaaaaatccggtaaatgtagtattcttaacctgttctatattacttatacctattgtctatatagctttaatttatagttgtcagtttaactattggcatgtctggcaaagaaaattaaactttaagagttttataaactgtttctaggttgctaaagaatttatttttctactatatatggtatagacaaagcatcaaactatgtacaggaaaaaagcctgactatttctatttggaagtaggctgaaaagagaattttcaaaactgttcgtgtcttcagttcattctgtcataactttgctattgtaatatgtgaataccagtttatttaagctgttctcttttatactgtattaatttaatgttcatctgcgtttagtaccatttttgttattaaaactggcatttaccgtttttcacattaacccaccttgcaccttcccccaaacttatctccacttttctatgcattctatcattgatttgacacacttcatagtgagtcatttaaatactctacgtttggttcaattaaccagtaggttacagttattgaaaattaaagtacagtttaaagctcagtctgttacactgaattgattgtgtttgtttttgccaagggtttagatatgcttttaaatattagaaacatctaagaacagaataacataattaaacttttttctggtaagttactggaaggtttcactgtttagggacctatcatatgagacttcttaaaggattaaaagaataggatagtctcataattgtgagtaaacatcaaggcattatattttacaatactgaataaaattccaggcacaatatattttttttaaatggtatttgttagtagtgcttcttccccttaacatttacagtgtaaatactgcaggtaaccgcaatctaagttagccaaaaagcagctttttttcccatactgtatgtaaataatgtagacctgggtttttttgtttatttgggtttgtttttttttttgaggtactggaatctaattaatatctcttaggtatcaacaaaagggaacaattggaatgagaatttaggccttagcttccatggtgatttttagttttttatacagtaataattgtgatgctatttgtcaactggatataaatacacatataattttaaaaagtca

SEQ ID NO: 444269 - DNA, 8044 bp, Homo sapiens
cgtccaggctgcgccgccgcgccgccgctccgcccccggtcgggtgtgtggctgcgcgcgccgggagagatgctgaggtaaagttcgggagagagggagagaaatccgtcagcgcgagggagcccgagtggccgccattactgagcccggcgcggcggcgggcgctggggaaggggggagggacgggccgccgctggtggcggggagggagggagggagggtgggtgagctggctgcgggagccgtggggctcagggtttcggggcgtgtgtgtcggggagggcggggggaggtggctgaagggacgcgccgctcggtgagcgcgccgaggaagagaggcgagcggagagtggaggaggaggcggcggcggcgggagcggtccccaggaatgtcgctgccgcgccaccgccgggccgctgccgttgaggaggagacggaggagaccgacgttgttagggaagatgatccctatgatcttgaagatgtttctgcacagaaatgagggaaatacaaagaaccaaatacagttctgaaatttgggatctgtattttgagatgattttattttcagaatgagaagcatatctggttacctttatgaatgtagagacatgagaagagagttatgatggcaaaaaacaaagagcctcgtcccccatcctataccatcagtatagttggactctctgggactgaaaaagacaaaggtaactgtggagttggaaagtcttgtttgtgcaatagatttgtacgctcaaaagcagatgaatattatccagagcatacttctgtgcttagcaccattgactttggaggacgagtagtaaacaatgatcactttttgtactggggtgacataatacaaaatagtgaagatggagtagaatgcaaaattcatgtcattgaacaaacagagttcattgatgaccagactttcttgcctcatcggagtacgaatttgcaaccatatataaaacgtgcagctgcatctaaattgcagtcagcagaaaaactaatgtacatttgcactgatcagctaggcttagaacaagactttgaacagaagcaaatgcctgaagggaagctcaacgtagatggatttttattatgcattgatgtaagtcaaggatgcaataggaagtttgatgatcaacttaaatttgtgaataacctttttgtccagttatcaaaatcaaaaaaacctgtaataatagcagcaactaaatgtgatgaatgcgtgggtcattatcttagagaagttcaggcatttgcttcaaataaaaagaaccttcttgtagtggaaacactcagcgcaataaaagtcaacattgaaacatgttttactgcactggtacaaatgttggataaaactcgtagcaagcctaaaattattccctatttggatgcttataaaacacagagacaacttgttgtcacagcaacagataagtttgaaaaacttgtgcagactgtgagagattatcatgcaacttggaaaactgttagtaataaattaaaaaatcatcctgattatgaagaatacatcaacttagagggaacaagaaaggccagaaatacattctcaaaacatatagaacaacttaaacaggaacatataagaaaaaggagagaagagtatataaatactttaccaagagcttttaacactcttttgccaaatctagaagagattgaacatttgaattggtcagaagctttgaagttaatggaaaagagagcagatttccagttatgttttgtggtgctagaaaaaactccttgggatgaaactgaccatatagacaaaattaatgataggcggattccatttgacctcctgagcactttagaagctgaaaaagtctatcagaaccatgtacagcatctgatatccgagaagaggagggtggaaatgaaggaaaaattcaaaaagactttggaaaaaattcaattcatttcaccagggcagccatgggaggaagttatgtgctttgttatggaggatgaagcctacaaatatatcactgaggctgatagcaaagaggtatatggtaggcatcagcgagaaatagttgaaaaagccaaagaagagtttcaagaaatgctttttgagcattctgaacttttttatgatttagatcttaatgcaacacctagttcagataaaatgagtgaaattcatacagttctgagtgaagaacctagatataaagctttacagaaacttgcacctgatagggaatcccttctacttaagcatataggatttgtttatcatcccactaaagaaacatgtcttagtggccaaaattgtacagacattaaagtggagcagttacttgctagtagtcttttacagttggatcatggccgcttaagattatatcacgatagtaccaatatagataaagttaacctttttattttagggaaggatggccttgcccaagaactagcaaatgagataaggacacaatccactgatgatgagtatgccttagatggaaaaatttatgaacttgatcttcggccggttgatgccaaatcgccttactttttgagtcagttatggactgccgcctttaaaccacatgggtgcttctgtgtatttaattccattgagtcattgagttttattggggaatttattgggaaaataagaactgaagcttctcagatcagaaaagataaatacatggctaatcttccatttacattaattctggctaatcagagagattccattagtaagaatctaccaattctcaggcaccaagggcagcagttggcaaacaagttgcaatgtccttttgtagatgtacctgctggtacatatcctcgtaaatttaatgaaacccaaataaagcaagctctcagaggagtattggaatcagttaaacacaatttggatgtggtgagcccaattcctgccaataaggacttatcagaagctgacttgagaattgtcatgtgcgccatgtgtggagatccatttagtgtggatcttattctttcacccttccttgattctcattcttgcagtgctgctcaagctggacagaataattccctaatgcttgataaaatcattggtgaaaaaaggaggcgaatacagatcacaatattatcataccactcttcaattggagtaagaaaagatgaactagttcatgggtatatattagtttactctgcaaaacggaaagcttcgatgggaatgcttcgagcatttctatcagaagttcaagacaccattcctgtacagctggtggcagttactgacagccaagcagatttttttgaaaatgaggctatcaaagagttaatgactgaaggagaacacattgcaactgagatcactgctaaatttacagcactgtattctttatctcagtatcatcggcaaactgaggtctttactctgttttttagtgatgttctagagaaaaaaaatatgatagaaaattcttatttgtctgataatacaagggaatcaacccatcaaagtgaagatgtttttctaccatctcccagagactgttttccctataataactaccctgattcagatgatgacacagaagcaccacctccttatagtccaattggggatgatgtacagttgcttccaacacctagtgaccgttccagatatagattagatttggaaggaaatgagtatcctattcatagtaccccaaactgtcatgaccatgaacgcaaccataaagtgcctccacctattaaacctaaaccagttgtacctaagacaaatgtgaaaaaactcgatccaaaccttttaaagacaattgaagctggtattggtaaaaatccaagaaagcagacttcccgggtgcctttggcacatcctgaagatatggatccttcagataactatgcggaacccattgatacaattttcaaacagaagggctattctgatgagatttatgttgtcccagatgatagtcaaaatcgtattaaaattcgaaactcatttgtaaataacacccaaggagatgaagaaaatgggttttctgatagaacctcaaaaagtcatggggaacggaggccttcaaaatacaaatataaatctaaaaccttgtttagtaaagccaagtcatactatagaagaacacattcagatgccagtgatgatgaggctttcaccacttctaaaacaaaaagaaaaggaagacatcgtggaagtgaagaagatccacttctttctcctgttgaaacttggaaaggtggtattgataatcctgcaatcacttctgaccaggagttagatgataagaagatgaagaagaaaacccacaaagtgaaagaagataaaaagggttatgtaccgaaggactctaccgtgtcagcgggaataaaactgaccaagacaatattcaaaagcagtttgatcaagatcataatatcaatctagtgtcaatggaagtaacagtaaatgctgtagctggagcccttaaagctttctttgcagatctgccagatcctttaattccatattctcttcatccagaactattggaagcagcaaaaatcccggataaaacagaacgtcttcatgccttgaaagaaattgttaagaaatttcatcctgtaaactatgatgtattcagatacgtgataacacatctaaacagggttagtcagcaacataaaatcaacctaatgacagcagacaacttatccatctgtttttggccaaccttgatgagacctgattttgaaaatcgagagtttctgtctactactaagattcatcaatctgttgttgaaacattcattcagcagtgtcagtttttcttttacaatggagaaattgtagaaacgacaaacattgtggctcctccaccaccttcaaacccaggacagttggtggaaccaatggtgccacttcagttgccgccaccattgcaacctcagctgatacaaccacaattacaaacggatcctcttggtattatatgagtaggaagtgattgcaaacaggctggatttggacaaaaagcaaatctagacatgcatgtttcagggttcagtagtatacttcatgtttcatacagataattcacattcaaaattacattttctctttgaactagatggtattccttattcacttacattacaaatctaagaccatgtgataagcatgactggagaggtttaatttttataaacaaaaatagctataaagtacaaagctgctgctgcatgcaaccttattgcaatcagtatatcattcctgtggcaatttctgtcaccttatattgtgaataaaatttttctatagaaattaaatgatttaaaaactcacctatatgaaacatttaatgcttttcagcctgctttctggctgattttgttatttgatgtgctaatttgggcaacttaatttacattctggcagtcggtgtagataactaaaagcccagttaagtattttataatttcaggctactgaggccatgcttgggatgttgtttgaaagaaagaaaaaatacacttgacatatttcacatttctgtaccttcatctttacttccaagtaaacccgtggatgatttgatgagggataaatgaacctatttcttttacacacataccaaggacatgcttgtggctaaagtgagttgataatgttgtgcaaaggatagttgtcaccaactcatttctttatggtccataatgaaataaaaattttgtatactgttaattctgtaaacagatgcatgttcaaaagatctatgatggtcttgtaatcttaatctaatatattttagatattttaattttttccctcttggggaacacatttagtatagtgtagaaaatacttccatgacattttcatataaggttatataacttttcatacataaacatgaaatttgttgtagaaaattctttaaaccaaacatttaaatctaggacttcaatttaatttgttccttgaatctatttttatgtggcccttaaaaaatatccaaaaaacccattgctaatatagcaataaaaatactttgggtactgacagactctttggagtgtttatattacaaatttgtattcatattcttttctgtgatgtgttgtactaaaatccaaaatggcttttgcaccatttttaagccaattttttcctttgatgttggtaccagaattactataagtgactgctgcttttgggggtaaacattttgttagtgaagataaaaccagaacactaaattatggataaaattttcagaataggtggcacaggtaaatttcactaggttatattttgtgtagtaaagaaaaaaattatttggtcaatgttatcttaattcatactacaatttaagattatcttatgtgtattatagtaaatagatgattttcagattcaaggctcctaagagtttgatttgctctgttttttcctaaaataaatattgtctctcccaactgttaagttctaggtattgtacttccaattttaacttcagaaccaagatgttggcatgaaccaggctgctgttgaagtacatgtatattataaattatcttatttgtgttatactcttacatgttatcttttctaagaaaacaaagtccctattattcctattgcaaagcacacaggaattaagaaagtacagtaatttttaaaaaaaaatccggtaaatgtagtattcttaacctgttctatattacttatacctattgtctatatagctttaatttatagttgtcagtttaactattggcatgtctggcaaagaaaattaaactttaagagttttataaactgtttctaggttgctaaagaatttatttttctactatatatggtatagacaaagcatcaaactatgtacaggaaaaaagcctgactatttctatttggaagtaggctgaaaagagaattttcaaaactgttcgtgtcttcagttcattctgtcataactttgctattgtaatatgtgaataccagtttatttaagctgttctcttttatactgtattaatttaatgttcatctgcgtttagtaccatttttgttattaaaactggcatttaccgtttttcacattaacccaccttgcaccttcccccaaacttatctccacttttctatgcattctatcattgatttgacacacttcatagtgagtcatttaaatactctacgtttggttcaattaaccagtaggttacagttattgaaaattaaagtacagtttaaagctcagtctgttacactgaattgattgtgtttgtttttgccaagggtttagatatgcttttaaatattagaaacatctaagaacagaataacataattaaacttttttctggtaagttactggaaggtttcactgtttagggacctatcatatgagacttcttaaaggattaaaagaataggatagtctcataattgtgagtaaacatcaaggcattatattttacaatactgaataaaatttcatctacacacatgttgccattgtttcatttaaggttcagtgcttatagttaactacaatattggacctaacaggatctagattagcaatataaagaagcatagtggtactctgtttcacactttcagtagatttattagaagtcaaattctattcaacagacacttattaggatatacaactaatttaagaataaaattccaggcacaatatattttttttaaatggtatttgttagtagtgcttcttccccttaacatttacagtgtaaatactgcaggtaaccgcaatctaagttagccaaaaagcagctttttttcccatactgtatgtaaataatgtagacctgggtttttttgtttatttgggtttgtttttttttttgaggtactggaatctaattaatatctcttaggtatcaacaaaagggaacaattggaatgagaatttaggccttagcttccatggtgatttttagttttttatacagtaataattgtgatgctatttgtcaactggatataaatacacatataattttaaaaagtca

SEQ ID NO: 444270 - DNA, 5052 bp, Homo sapiens
cgtccaggctgcgccgccgcgccgccgctccgcccccggtcgggtgtgtggctgcgcgcgccgggagagatgctgaggtaaagttcgggagagagggagagaaatccgtcagcgcgagggagcccgagtggccgccattactgagcccggcgcggcggcgggcgctggggaaggggggagggacgggccgccgctggtggcggggagggagggagggagggtgggtgagctggctgcgggagccgtggggctcagggtttcggggcgtgtgtgtcggggagggcggggggaggtggctgaagggacgcgccgctcggtgagcgcgccgaggaagagaggcgagcggagagtggaggaggaggcggcggcggcgggagcggtccccaggaatgtcgctgccgcgccaccgccgggccgctgccgttgaggaggagacggaggagaccgacgttgttagggaagatgatccctatgatcttgaagatgtttctgcacagaaatgagggaaatacaaagaaccaaatacagttctgaaatttgggatctgtattttgagatgattttattttcagaatgagaagcatatctggttacctttatgaatgtagagacatgagaagagagttatgatggcaaaaaacaaagagcctcgtcccccatcctataccatcagtatagttggactctctgggactgaaaaagacaaaggtaactgtggagttggaaagtcttgtttgtgcaatagatttgtacgctcaaaagcagatgaatattatccagagcatacttctgtgcttagcaccattgactttggaggacgagtagtaaacaatgatcactttttgtactggggtgacataatacaaaatagtgaagatggagtagaatgcaaaattcatgtcattgaacaaacagagttcattgatgaccagactttcttgcctcatcggagtacgaatttgcaaccatatataaaacgtgcagctgcatctaaattgcagtcagcagaaaaactaatgtacatttgcactgatcagctaggcttagaacaagactttgaacagaagcaaatgcctgaagggaagctcaacgtagatggatttttattatgcattgatgtaagtcaaggatgcaataggaagtttgatgatcaacttaaatttgtgaataacctttttgtccagttatcaaaatcaaaaaaacctgtaataatagcagcaactaaatgtgatgaatgcgtgggtcattatcttagagaagttcaggcatttgcttcaaataaaaagaaccttcttgtagtggaaacactcagcgcaataaaagtcaacattgaaacatgttttactgcactggtacaaatgttggataaaactcgtagcaagcctaaaattattccctatttggatgcttataaaacacagagacaacttgttgtcacagcaacagataagtttgaaaaacttgtgcagactgtgagagattatcatgcaacttggaaaactgttagtaataaattaaaaaatcatcctgattatgaagaatacatcaacttagagggaacaagaaaggccagaaatacattctcaaaacatatagaacaacttaaacaggaacatataagaaaaaggagagaagagtatataaatactttaccaagagcttttaacactcttttgccaaatctagaagagattgaacatttgaattggtcagaagctttgaagttaatggaaaagagagcagatttccagttatgttttgtggtgctagaaaaaactccttgggatgaaactgaccatatagacaaaattaatgataggcggattccatttgacctcctgagcactttagaagctgaaaaagtctatcagaaccatgtacagcatctgatatccgagaagaggagggtggaaatgaaggaaaaattcaaaaagactttggaaaaaattcaattcatttcaccagggcagccatgggaggaagttatgtgctttgttatggaggatgaagcctacaaatatatcactgaggctgatagcaaagaggtatatggtaggcatcagcgagaaatagttgaaaaagccaaagaagagtttcaagaaatgctttttgagcattctgaacttttttatgatttagatcttaatgcaacacctagttcagataaaatgagtgaaattcatacagttctgagtgaagaacctagatataaagctttacagaaacttgcacctgatagggaatcccttctacttaagcatataggatttgtttatcatcccactaaagaaacatgtcttagtggccaaaattgtacagacattaaagtggagcagttacttgctagtagtcttttacagttggatcatggccgcttaagattatatcacgatagtaccaatatagataaagttaacctttttattttagggaaggatggccttgcccaagaactagcaaatgagataaggacacaatccactgatgatgagtatgccttagatggaaaaatttatgaacttgatcttcggccggttgatgccaaatcgccttactttttgagtcagttatggactgccgcctttaaaccacatgggtgcttctgtgtatttaattccattgagtcattgagttttattggggaatttattgggaaaataagaactgaagcttctcagatcagaaaagataaatacatggctaatcttccatttacattaattctggctaatcagagagattccattagtaagaatctaccaattctcaggcaccaagggcagcagttggcaaacaagttgcaatgtccttttgtagatgtacctgctggtacatatcctcgtaaatttaatgaaacccaaataaagcaagctctcagaggagtattggaatcagttaaacacaatttggatgtggtgagcccaattcctgccaataaggacttatcagaagctgacttgagaattgtcatgtgcgccatgtgtggagatccatttagtgtggatcttattctttcacccttccttgattctcattcttgcagtgctgctcaagctggacagaataattccctaatgcttgataaaatcattggtgaaaaaaggaggcgaatacagatcacaatattatcataccactcttcaattggagtaagaaaagatgaactagttcatgggtatatattagtttactctgcaaaacggaaagcttcgatgggaatgcttcgagcatttctatcagaagttcaagacaccattcctgtacagctggtggcagttactgacagccaagcagatttttttgaaaatgaggctatcaaagagttaatgactgaaggagaacacattgcaactgagatcactgctaaatttacagcactgtattctttatctcagtatcatcggcaaactgaggtctttactctgttttttagtgatgttctagagaaaaaaaatatgatagaaaattcttatttgtctgataatacaagggaatcaacccatcaaagtgaagatgtttttctaccatctcccagagactgttttccctataataactaccctgattcagatgatgacacagaagcaccacctccttatagtccaattggggatgatgtacagttgcttccaacacctagtgaccgttccagatatagattagatttggaaggaaatgagtatcctattcatagtaccccaaactgtcatgaccatgaacgcaaccataaagtgcctccacctattaaacctaaaccagttgtacctaagacaaatgtgaaaaaactcgatccaaaccttttaaagacaattgaagctggtattggtaaaaatccaagaaagcagacttcccgggtgcctttggcacatcctgaagatatggatccttcagataactatgcggaacccattgatacaattttcaaacagaagggctattctgatgagatttatgttgtcccagatgatagtcaaaatcgtattaaaattcgaaactcatttgtaaataacacccaaggagatgaagaaaatgggttttctgatagaacctcaaaaagtcatggggaacggaggccttcaaaatacaaatataaatctaaaaccttgtttagtaaagccaagtcatactatagaagaacacattcagatgccagtgatgatgaggctttcaccacttctaaaacaaaaagaaaaggaagacatcgtggaagtgaagaagatccacttctttctcctgttgaaacttggaaaggtggtattgataatcctgcaatcacttctgaccaggagttagatgataagaagatgaagaagaaaacccacaaagtgaaagaagataaaaagaaaaagaaaactaagaacttcaatccaccaacacgtagaaattgggaaagtaattactttgggatgcccctccaggatctggttacagctgagaagcccataccactatttgttgagaaatgtgtggaatttattgaagatacagggttatgtaccgaaggactctaccgtgtcagcgggaataaaactgaccaagacaatattcaaaagcagtttgatcaagatcataatatcaatctagtgtcaatggaagtaacagtaaatgctgtagctggagcccttaaagctttctttgcagatctgccagatcctttaattccatattctcttcatccagaactattggaagcagcaaaaatcccggataaaacagaacgtcttcatgccttgaaagaaattgttaagaaatttcatcctgtaaactatgatgtattcagatacgtgataacacatctaaacaggtatttttatttttttagggttttttggcaaataaaatgcactacacatttcaaacatgtaaattttataaattggataattatcagatagaaaaggggactcagactaaacatatagttgaattttgtttttctaatttatatctaaaaagatatatgattagttttgtaatgtaattattatataaatagtaagtgtggtaagtatattttcctttttaccacattctctgtaaaatcttagaatt

SEQ ID NO: 444271 - DNA, 4723 bp, Homo sapiens
cgtccaggctgcgccgccgcgccgccgctccgcccccggtcgggtgtgtggctgcgcgcgccgggagagatgctgaggtaaagttcgggagagagggagagaaatccgtcagcgcgagggagcccgagtggccgccattactgagcccggcgcggcggcgggcgctggggaaggggggagggacgggccgccgctggtggcggggagggagggagggagggtgggtgagctggctgcgggagccgtggggctcagggtttcggggcgtgtgtgtcggggagggcggggggaggtggctgaagggacgcgccgctcggtgagcgcgccgaggaagagaggcgagcggagagtggaggaggaggcggcggcggcgggagcggtccccaggaatgtcgctgccgcgccaccgccgggccgctgccgttgaggaggagacggaggagaccgacgttgttagggaagatgatccctatgatcttgaagatgtttctgcacagaaatgagggaaatacaaagaaccaaatacagttctgaaatttgggatctgtattttgagatgattttattttcagaatgagaagcatatctggttacctttatgaatgtagagacatgagaagagagttatgatggcaaaaaacaaagagcctcgtcccccatcctataccatcagtatagttggactctctgggactgaaaaagacaaaggtaactgtggagttggaaagtcttgtttgtgcaatagatttgtacgctcaaaagcagatgaatattatccagagcatacttctgtgcttagcaccattgactttggaggacgagtagtaaacaatgatcactttttgtactggggtgacataatacaaaatagtgaagatggagtagaatgcaaaattcatgtcattgaacaaacagagttcattgatgaccagactttcttgcctcatcggagtacgaatttgcaaccatatataaaacgtgcagctgcatctaaattgcagtcagcagaaaaactaatgtacatttgcactgatcagctaggcttagaacaagactttgaacagaagcaaatgcctgaagggaagctcaacgtagatggatttttattatgcattgatgtaagtcaaggatgcaataggaagtttgatgatcaacttaaatttgtgaataacctttttgtccagttatcaaaatcaaaaaaacctgtaataatagcagcaactaaatgtgatgaatgcgtgggtcattatcttagagaagttcaggcatttgcttcaaataaaaagaaccttcttgtagtggaaacactcagcgcaataaaagtcaacattgaaacatgttttactgcactggtacaaatgttggataaaactcgtagcaagcctaaaattattccctatttggatgcttataaaacacagagacaacttgttgtcacagcaacagataagtttgaaaaacttgtgcagactgtgagagattatcatgcaacttggaaaactgttagtaataaattaaaaaatcatcctgattatgaagaatacatcaacttagagggaacaagaaaggccagaaatacattctcaaaacatatagaacaacttaaacaggaacatataagaaaaaggagagaagagtatataaatactttaccaagagcttttaacactcttttgccaaatctagaagagattgaacatttgaattggtcagaagctttgaagttaatggaaaagagagcagatttccagttatgttttgtggtgctagaaaaaactccttgggatgaaactgaccatatagacaaaattaatgataggcggattccatttgacctcctgagcactttagaagctgaaaaagtctatcagaaccatgtacagcatctgatatccgagaagaggagggtggaaatgaaggaaaaattcaaaaagactttggaaaaaattcaattcatttcaccagggcagccatgggaggaagttatgtgctttgttatggaggatgaagcctacaaatatatcactgaggctgatagcaaagaggtatatggtaggcatcagcgagaaatagttgaaaaagccaaagaagagtttcaagaaatgctttttgagcattctgaacttttttatgatttagatcttaatgcaacacctagttcagataaaatgagtgaaattcatacagttctgagtgaagaacctagatataaagctttacagaaacttgcacctgatagggaatcccttctacttaagcatataggatttgtttatcatcccactaaagaaacatgtcttagtggccaaaattgtacagacattaaagtggagcagttacttgctagtagtcttttacagttggatcatggccgcttaagattatatcacgatagtaccaatatagataaagttaacctttttattttagggaaggatggccttgcccaagaactagcaaatgagataaggacacaatccactgatgatgagtatgccttagatggaaaaatttatgaacttgatcttcggccggttgatgccaaatcgccttactttttgagtcagttatggactgccgcctttaaaccacatgggtgcttctgtgtatttaattccattgagtcattgagttttattggggaatttattgggaaaataagaactgaagcttctcagatcagaaaagataaatacatggctaatcttccatttacattaattctggctaatcagagagattccattagtaagaatctaccaattctcaggcaccaagggcagcagttggcaaacaagttgcaatgtccttttgtagatgtacctgctggtacatatcctcgtaaatttaatgaaacccaaataaagcaagctctcagaggagtattggaatcagttaaacacaatttggatgtggtgagcccaattcctgccaataaggacttatcagaagctgacttgagaattgtcatgtgcgccatgtgtggagatccatttagtgtggatcttattctttcacccttccttgattctcattcttgcagtgctgctcaagctggacagaataattccctaatgcttgataaaatcattggtgaaaaaaggaggcgaatacagatcacaatattatcataccactcttcaattggagtaagaaaagatgaactagttcatgggtatatattagtttactctgcaaaacggaaagcttcgatgggaatgcttcgagcatttctatcagaagttcaagacaccattcctgtacagctggtggcagttactgacagccaagcagatttttttgaaaatgaggctatcaaagagttaatgactgaaggagaacacattgcaactgagatcactgctaaatttacagcactgtattctttatctcagtatcatcggcaaactgaggtctttactctgttttttagtgatgttctagagaaaaaaaatatgatagaaaattcttatttgtctgataatacaagggaatcaacccatcaaagtgaagatgtttttctaccatctcccagagactgttttccctataataactaccctgattcagatgatgacacagaagcaccacctccttatagtccaattggggatgatgtacagttgcttccaacacctagtgaccgttccagatatagattagatttggaaggaaatgagtatcctattcatagtaccccaaactgtcatgaccatgaacgcaaccataaagtgcctccacctattaaacctaaaccagttgtacctaagacaaatgtgaaaaaactcgatccaaaccttttaaagacaattgaagctggtattggtaaaaatccaagaaagcagacttcccgggtgcctttggcacatcctgaagatatggatccttcagataactatgcggaacccattgatacaattttcaaacagaagggctattctgatgagatttatgttgtcccagatgatagtcaaaatcgtattaaaattcgaaactcatttgtaaataacacccaaggagatgaagaaaatgggttttctgatagaacctcaaaaagtcatggggaacggaggccttcaaaatacaaatataaatctaaaaccttgtttagtaaagccaagtcatactatagaagaacacattcagatgccagtgatgatgaggctttcaccacttctaaaacaaaaagaaaaggaagacatcgtggaagtgaagaagatccacttctttctcctgttgaaacttggaaaggtggtattgataatcctgcaatcacttctgaccaggagttagatgataagaagatgaagaagaaaacccacaaagtgaaagaagataaaaaggtaaggttaacttaaggtcagtgatgtttataaaaatgcttgttgttgcttttttaaaatactgacatcagtgttagaatttagtctcattcattccatacataataattagtagccctttttaattttctgagtattctgtggggataagtgattttttgttatttttgtgctttattggggtagagtttgatttcatattcttcagcataaaaattcttggtgaatgcgtccacggacgcattcacccgtgtctgttcactgaccaaagtccacaatttgtcaaggttgacagttgggcagaagctctggttcctctttaagtggtaatgcttcataccaactttcccaaagtagcctgaatggtcgtcgaattgcac

SEQ ID NO: 444272 - DNA, 443 bp, Homo sapiens
ctcccctacctgcacccccaactcccacccctgtccgtctagctcatgcagactgagatatttttttttcccctctaagcattagccgccctgaattaacgttttcacgggcagccccctcaatgtgtgctttctggtagtgactttgttctaaagctcactttgctcccccagcggctacaaaggaccaattcccaaatccccatcagcctccctcccagctgtcactccctcagaagactctggagcaaagggccaggtttgagactggagaccagaggttaggggtggactgcggttctcaagatcagggtctgaaactcccctgggtcttctctcatctgtgcagatggtccactctgcttcattagctcttcagcacttcactctgttcttcttcatcctaggggtactttccttgtttttttctccggcaagttctt

SEQ ID NO: 444273 - DNA, 1023 bp, Homo sapiens
  misc_feature (6)..(6): n is a, c, g, or t
  misc_feature (8)..(10): n is a, c, g, or t
  misc_feature (13)..(15): n is a, c, g, or t
  misc_feature (26)..(28): n is a, c, g, or t
  misc_feature (31)..(31): n is a, c, g, or t
  misc_feature (55)..(56): n is a, c, g, or t
  misc_feature (59)..(59): n is a, c, g, or t
aggcanannnatnnnaaaaatcaaannnaanaaaaaagacataaagacatacatnnacnaaaaaaaattagaaaaacatgtctgacacaagcgagagtggtgcaggtctaactcgcttccaggctgaagcttcagaaaaggacagtagctcgatgatgcagactctgttgacagtgacccagaatgtggaggtcccagagacaccgaaggcctcaaaggcactggaggtctcagaggatgtgaaggtctcaaaagcctctggggtctcaaaggccacagaggtctcaaagaccccagaggctcgggaggcacctgccacccaggcctcatctactactcagctgactgatacccaggttctggcagctgaaaacaagagtctagcagctgacaccaagaaacagaatgctgacccgcaggctgtgacaatgcctgccactgagaccaaaaaggtcagccatgtggctgatacaaaggtcaatacaaaggctcaggagactgaggctgcaccctctcaggccccagcagatgaacctgagcctgagagtgcagctgcccagtctcaggagaatcaggatactcggcccaaggtcaaagccaagaaagcccgaaaggtgaagcatctggatggggaagaggatggcagcagtgatcagagtcaggcttctggaaccacaggtggccgaagggtctcaaaggccctaatggcctcaatggcccgcagggcttcaaggggtcccatagccttttgggcccgcagggcatcaaggactcggttggctgcttgggcccggagagccttgctctccctgagatcacctaaagcccgtaggggcaaggctcgccgtagagctgccaagctccagtcatcccaagagcctgaagcaccaccacctcgggatgtggcccttttgcaagggagggcaatgattagaggaagaccatagggaaagacagaacgagataccaacaagacgccggaaatgctgaaaggcgaatattaaagaatacagtgaagtgaca

SEQ ID NO: 444274 - DNA, 2199 bp, Homo sapiens
acagtggcataaacatgggctttggcgtcagacagccctgagcggggccccattgccccacccccgaggaaggcgagggggggtggcagggggctgcggaaaggggctgggctgggttgggctgtctgcagctctagtccaggaggctgagacttcgagagggacttagagaaggcagacgcatcccgaactcgctggaggacaaggctcagctcttgccaggccaaattgagacatgtctgacacaagcgagagtggtgcaggtctaactcgcttccaggctgaagcttcagaaaaggacagtagctcgatgatgcagactctgttgacagtgacccagaatgtggaggtcccagagacaccgaaggcctcaaaggcactggaggtctcagaggatgtgaaggtctcaaaagcctctggggtctcaaaggccacagaggtctcaaagaccccagaggctcgggaggcacctgccacccaggcctcatctactactcagctgactgatacccaggttctggcagctgaaaacaagagtctagcagctgacaccaagaaacagaatgctgacccgcaggctgtgacaatgcctgccactgagaccaaaaaggtcagccatgtggctgatacaaaggtcaatacaaaggctcaggagactgaggctgcaccctctcaggccccagcagatgaacctgagcctgagagtgcagctgcccagtctcaggagaatcaggatactcggcccaaggtcaaagccaagaaagcccgaaaggtgaagcatctggatggggaagaggatggcagcagtgatcagagtcaggcttctggaaccacaggtggccgaagggtctcaaaggccctaatggcctcaatggcccgcagggcttcaaggggtcccatagccttttgggcccgcagggcatcaaggactcggttggctgcttgggcccggagagccttgctctccctgagatcacctaaagcccgtaggggcaaggctcgccgtagagctgccaagctccagtcatcccaagagcctgaagcaccaccacctcgggatgtggcccttttgcaagggagggcaaatgatttggtgaagtaccttttggctaaagaccagacgaagattcccatcaagcgctcggacatgctgaaggacatcatcaaagaatacactgatgtgtaccccgaaatcattgaacgagcaggctattccttggagaaggtatttgggattcaattgaaggaaattgataagaatgaccacttgtacattcttctcagcaccttagagcccactgatgcaggcatactgggaacgactaaggactcacccaagctgggtctgctcatggtgcttcttagcatcatcttcatgaatggaaatcggtccagtgaggctgtcatctgggaggtgctgcgcaagttggggctgcgccctgggatacatcattcactctttggggacgtgaagaagctcatcactgatgagtttgtgaagcagaagtacctggactatgccagagtccccaatagcaatccccctgaatatgagttcttctggggcctgcgctcttactatgagaccagcaagatgaaagtcctcaagtttgcctgcaaggtacaaaagaaggatcccaaggaatgggcagctcagtaccgagaggcgatggaagcggatttgaaggctgcagctgaggctgcagctgaagccaaggctagggccgagattagagctcgaatgggcattgggctcggctcggagaatgctgccgggccctgcaactgggacgaagctgatatcggaccctgggccaaagcccggatccaggcgggagcagaagctaaagccaaagcccaagagagtggcagtgccagcactggtgccagtaccagtaccaataacagtgccagtgccagtgccagcaccagtggtggcttcagtgctggtgccagcctgaccgccactctcacatttgggctcttcgctggccttggtggagctggtgccagcaccagtggcagctctggtgcctgtggtttctcctacaagtgagattttagatattgttaatcctgccagtctttctcttcaagccagggtgcatcctcagaaacctactcaacacagcactctaggcagccactatcaatcaattgaagttgacactctgcattaaatctatttgccatttctga

SEQ ID NO: 444275 - DNA, 2089 bp, Homo sapiens
agaaagtttcccccacggggcattaatcccgtccagaacccggagccgcccgatcgtagagaaggcagacgcatcccgaactcgctggaggacaaggctcagctcttgccaggccaaattgagacatgtctgacacaagcgagagtggtgcaggtctaactcgcttccaggctgaagcttcagaaaaggacagtagctcgatgatgcagactctgttgacagtgacccagaatgtggaggtcccagagacaccgaaggcctcaaaggcactggaggtctcagaggatgtgaaggtctcaaaagcctctggggtctcaaaggccacagaggtctcaaagaccccagaggctcgggaggcacctgccacccaggcctcatctactactcagctgactgatacccaggttctggcagctgaaaacaagagtctagcagctgacaccaagaaacagaatgctgacccgcaggctgtgacaatgcctgccactgagaccaaaaaggtcagccatgtggctgatacaaaggtcaatacaaaggctcaggagactgaggctgcaccctctcaggccccagcagatgaacctgagcctgagagtgcagctgcccagtctcaggagaatcaggatactcggcccaaggtcaaagccaagaaagcccgaaaggtgaagcatctggatggggaagaggatggcagcagtgatcagagtcaggcttctggaaccacaggtggccgaagggtctcaaaggccctaatggcctcaatggcccgcagggcttcaaggggtcccatagccttttgggcccgcagggcatcaaggactcggttggctgcttgggcccggagagccttgctctccctgagatcacctaaagcccgtaggggcaaggctcgccgtagagctgccaagctccagtcatcccaagagcctgaagcaccaccacctcgggatgtggcccttttgcaagggagggcaaatgatttggtgaagtaccttttggctaaagaccagacgaagattcccatcaagcgctcggacatgctgaaggacatcatcaaagaatacactgatgtgtaccccgaaatcattgaacgagcaggctattccttggagaaggtatttgggattcaattgaaggaaattgataagaatgaccacttgtacattcttctcagcaccttagagcccactgatgcaggcatactgggaacgactaaggactcacccaagctgggtctgctcatggtgcttcttagcatcatcttcatgaatggaaatcggtccagtgaggctgtcatctgggaggtgctgcgcaagttggggctgcgccctgggatacatcattcactctttggggacgtgaagaagctcatcactgatgagtttgtgaagcagaagtacctggactatgccagagtccccaatagcaatccccctgaatatgagttcttctggggcctgcgctcttactatgagaccagcaagatgaaagtcctcaagtttgcctgcaaggtacaaaagaaggatcccaaggaatgggcagctcagtaccgagaggcgatggaagcggatttgaaggctgcagctgaggctgcagctgaagccaaggctagggccgagattagagctcgaatgggcattgggctcggctcggagaatgctgccgggccctgcaactgggacgaagctgatatcggaccctgggccaaagcccggatccaggcgggagcagaagctaaagccaaagcccaagagagtggcagtgccagcactggtgccagtaccagtaccaataacagtgccagtgccagtgccagcaccagtggtggcttcagtgctggtgccagcctgaccgccactctcacatttgggctcttcgctggccttggtggagctggtgccagcaccagtggcagctctggtgcctgtggtttctcctacaagtgagattttagatattgttaatcctgccagtctttctcttcaagccagggtgcatcctcagaaacctactcaacacagcactctaggcagccactatcaatcaattgaagttgacactctgcattaaatctatttgccatttctga

SEQ ID NO: 444276 - DNA, 2319 bp, Homo sapiens
acagtggcataaacatgggctttggcgtcagacagccctgagcggggccccattgccccacccccgaggaaggcgagggggggtggcagggggctgcggaaaggggctgggctgggttgggctgtctgcagctctagtccaggaggctgagacttcgagagggacttagagaaggcagacgcatcccgaactcgctggaggacaaggctcagctcttgccaggccaaattgagacatgtctgacacaagcgagagtggtgcaggtctaactcgcttccaggctgaagcttcagaaaaggacagtagctcgatgatgcagactctgttgacagtgacccagaatgtggaggtcccagagacaccgaaggcctcaaaggcactggaggtctcagaggatgtgaaggtctcaaaagcctctggggtctcaaaggccacagaggtctcaaagaccccagaggctcgggaggcacctgccacccaggcctcatctactactcagctgactgatacccaggttctggcagctgaaaacaagagtctagcagctgacaccaagaaacagaatgctgacccgcaggctgtgacaatgcctgccactgagaccaaaaaggtcagccatgtggctgatacaaaggtcaatacaaaggctcaggagactgaggctgcaccctctcaggccccagcagatgaacctgagcctgagagtgcagctgcccagtctcaggagaatcaggatactcggcccaaggtcaaagccaagaaagcccgaaaggtgaagcatctggatggggaagaggatggcagcagtgatcagagtcaggcttctggaaccacaggtggccgaagggtctcaaaggccctaatggcctcaatggcccgcagggcttcaaggggtcccatagccttttgggcccgcagggcatcaaggactcggttggctgcttgggcccggagagccttgctctccctgagatcacctaaagcccgtaggggcaaggctcgccgtagagctgccaagctccagtcatcccaagagcctgaagcaccaccacctcgggatgtggcccttttgcaagggagggtaagaactctgtcgtttttattctgccttttctactgccttggctgtccttttctttgccatcgtctcaagttttctgcaaacttgttttggtctttccatctttttctactctgccaggcaaatgatttggtgaagtaccttttggctaaagaccagacgaagattcccatcaagcgctcggacatgctgaaggacatcatcaaagaatacactgatgtgtaccccgaaatcattgaacgagcaggctattccttggagaaggtatttgggattcaattgaaggaaattgataagaatgaccacttgtacattcttctcagcaccttagagcccactgatgcaggcatactgggaacgactaaggactcacccaagctgggtctgctcatggtgcttcttagcatcatcttcatgaatggaaatcggtccagtgaggctgtcatctgggaggtgctgcgcaagttggggctgcgccctgggatacatcattcactctttggggacgtgaagaagctcatcactgatgagtttgtgaagcagaagtacctggactatgccagagtccccaatagcaatccccctgaatatgagttcttctggggcctgcgctcttactatgagaccagcaagatgaaagtcctcaagtttgcctgcaaggtacaaaagaaggatcccaaggaatgggcagctcagtaccgagaggcgatggaagcggatttgaaggctgcagctgaggctgcagctgaagccaaggctagggccgagattagagctcgaatgggcattgggctcggctcggagaatgctgccgggccctgcaactgggacgaagctgatatcggaccctgggccaaagcccggatccaggcgggagcagaagctaaagccaaagcccaagagagtggcagtgccagcactggtgccagtaccagtaccaataacagtgccagtgccagtgccagcaccagtggtggcttcagtgctggtgccagcctgaccgccactctcacatttgggctcttcgctggccttggtggagctggtgccagcaccagtggcagctctggtgcctgtggtttctcctacaagtgagattttagatattgttaatcctgccagtctttctcttcaagccagggtgcatcctcagaaacctactcaacacagcactctaggcagccactatcaatcaattgaagttgacactctgcattaaatctatttgccatttctga

SEQ ID NO: 444277 - DNA, 2579 bp, Homo sapiens
acagtggcataaacatgggctttggcgtcagacagccctgagcggggccccattgccccacccccgaggaaggcgagggggggtggcagggggctgcggaaaggggctgggctgggttgggctgtctgcagctctagtccaggaggctgagacttcgagagggacttagagaaggcagacgcatcccgaactcgctggaggacaaggctcagctcttgccaggccaaattgagacatgtctgacacaagcgagagtggtgcaggtctaactcgcttccaggctgaagcttcagaaaaggacagtagctcgatgatgcagactctgttgacagtgacccagaatgtggaggtcccagagacaccgaaggcctcaaaggcactggaggtctcagaggatgtgaaggtctcaaaagcctctggggtctcaaaggccacagaggtctcaaagaccccagaggctcgggaggcacctgccacccaggcctcatctactactcagctgactgatacccaggttctggcagctgaaaacaagagtctagcagctgacaccaagaaacagaatgctgacccgcaggctgtgacaatgcctgccactgagaccaaaaaggtcagccatgtggctgatacaaaggtcaatacaaaggctcaggagactgaggctgcaccctctcaggccccagcagatgaacctgagcctgagagtgcagctgcccagtctcaggagaatcaggatactcggcccaaggtcaaagccaagaaagcccgaaaggtgaagcatctggatggggaagaggatggcagcagtgatcagagtcaggcttctggaaccacaggtggccgaagggtctcaaaggccctaatggcctcaatggcccgcagggcttcaaggggtcccatagccttttgggcccgcagggcatcaaggactcggttggctgcttgggcccggagagccttgctctccctgagatcacctaaagcccgtaggggcaaggctcgccgtagagctgccaagctccagtcatcccaagagcctgaagcaccaccacctcgggatgtggcccttttgcaagggagggtaagaactctgtcgtttttattctgccttttctactgccttggctgtccttttctttgccatcgtctcaagttttctgcaaacttgttttggtctttccatctttttctactctgccaggcaaatgatttggtgaagtaccttttggctaaagaccagacgaagattcccatcaagcgctcgggtaaagtcctaccaatcctccctctgccctgagctctgccctccattgcccttacaccattgtgctggggatatcccctgctcttatgcttatgtctctgtcctcccaaagttctgatttggcagtgctagcatctctgttgataagcacagaaccgggttatgccacccttggtgtggttggcaaagagtctatagcttgggcatcagggccacctggcatctcttcagtcaggtgctcacaacactctccccttgcagacatgctgaaggacatcatcaaagaatacactgatgtgtaccccgaaatcattgaacgagcaggctattccttggagaaggtatttgggattcaattgaaggaaattgataagaatgaccacttgtacattcttctcagcaccttagagcccactgatgcaggcatactgggaacgactaaggactcacccaagctgggtctgctcatggtgcttcttagcatcatcttcatgaatggaaatcggtccagtgaggctgtcatctgggaggtgctgcgcaagttggggctgcgccctgggatacatcattcactctttggggacgtgaagaagctcatcactgatgagtttgtgaagcagaagtacctggactatgccagagtccccaatagcaatccccctgaatatgagttcttctggggcctgcgctcttactatgagaccagcaagatgaaagtcctcaagtttgcctgcaaggtacaaaagaaggatcccaaggaatgggcagctcagtaccgagaggcgatggaagcggatttgaaggctgcagctgaggctgcagctgaagccaaggctagggccgagattagagctcgaatgggcattgggctcggctcggagaatgctgccgggccctgcaactgggacgaagctgatatcggaccctgggccaaagcccggatccaggcgggagcagaagctaaagccaaagcccaagagagtggcagtgccagcactggtgccagtaccagtaccaataacagtgccagtgccagtgccagcaccagtggtggcttcagtgctggtgccagcctgaccgccactctcacatttgggctcttcgctggccttggtggagctggtgccagcaccagtggcagctctggtgcctgtggtttctcctacaagtgagattttagatattgttaatcctgccagtctttctcttcaagccagggtgcatcctcagaaacctactcaacacagcactctaggcagccactatcaatcaattgaagttgacactctgcattaaatctatttgccatttctga

SEQ ID NO: 444278 - DNA, 2417 bp, Homo sapiens
agaaagtttcccccacggggcattaatcccgtccagaacccggagccgcccgatcgtagagaaggcagacgcatcccgaactcgctggaggacaaggctcagctcttgccaggccaaattgagacatgtctgacacaagcgagagtggtgcaggtctaactcgcttccaggctgaagcttcagaaaaggacagtagctcgatgatgcagactctgttgacagtgacccagaatgtggaggtcccagagacaccgaaggcctcaaaggcactggaggtctcagaggatgtgaaggtctcaaaagcctctggggtctcaaaggccacagaggtctcaaagaccccagaggctcgggaggcacctgccacccaggcctcatctactactcagctgactgatacccaggttctggcagctgaaaacaagagtctagcagctgacaccaagaaacagaatgctgacccgcaggctgtgacaatgcctgccactgagaccaaaaaggtcagccatgtggctgatacaaaggtcaatacaaaggctcaggagactgaggctgcaccctctcaggccccagcagatgaacctgagcctgagagtgcagctgcccagtctcaggagaatcaggatactcggcccaaggtcaaagccaagaaagcccgaaaggtgaagcatctggatggggaagaggatggcagcagtgatcagagtcaggcttctggaaccacaggtggccgaagggtctcaaaggccctaatggcctcaatggcccgcagggcttcaaggggtcccatagccttttgggcccgcagggcatcaaggactcggttggctgcttgggcccggagagccttgctctccctgagatcacctaaagcccgtaggggcaaggctcgccgtagagctgccaagctccagtcatcccaagagcctgaagcaccaccacctcgggatgtggcccttttgcaagggagggcaaatgatttggtgaagtaccttttggctaaagaccagacgaagattcccatcaagcgctcggacatgctgaaggacatcatcaaagaatacactgatgtgtaccccgaaatcattgaacgagcaggctattccttggagaaggtatttgggattcaattgaaggaaattgataagaatgaccacttgtacattcttctcagcaccttagagcccactgatgcaggcatactgggaacgactaaggactcacccaagctgggtctgctcatggtgcttcttagcatcatcttcatgaatggaaatcggtccagtgaggctgtcatctgggaggtgctgcgcaagttggggctgcgccctgggtatgattgggctctctcagcgcttgctgtccgtgttgtcctttggcaagagaggacggtcctaggattgcatcagtctggtggtctggtggagcgggtggggtgctggactgggtagagggcccagggttctgacctgggtggatgatgggtgaatggtcctgaactctctggctccctctctcagtgtctcttgggcttctatggagcttccctcttgtgctggaaacctcttttccatcttggaaatgcctctgcccacatctgggaagtgccatagccttgagtgaatttatttgtttatttatttttctttttcttctctcaggatacatcattcactctttggggacgtgaagaagctcatcactgatgagtttgtgaagcagaagtacctggactatgccagagtccccaatagcaatccccctgaatatgagttcttctggggcctgcgctcttactatgagaccagcaagatgaaagtcctcaagtttgcctgcaaggtacaaaagaaggatcccaaggaatgggcagctcagtaccgagaggcgatggaagcggatttgaaggctgcagctgaggctgcagctgaagccaaggctagggccgagattagagctcgaatgggcattgggctcggctcggagaatgctgccgggccctgcaactgggacgaagctgatatcggaccctgggccaaagcccggatccaggcgggagcagaagctaaagccaaagcccaagagagtggcagtgccagcactggtgccagtaccagtaccaataacagtgccagtgccagtgccagcaccagtggtggcttcagtgctggtgccagcctgaccgccactctcacatttgggctcttcgctggccttggtggagctggtgccagcaccagtggcagctctggtgcctgtggtttctcctacaagtgagattttagatattgttaatcctgccagtctttctcttcaagccagggtgcatcctcagaaacctactcaacacagcactctaggcagccactatcaatcaattgaagttgacactctgcattaaatctatttgccatttctga

SEQ ID NO: 444279 - DNA, 1840 bp, Homo sapiens
  misc_feature (4)..(4): n is a, c, g, or t
  misc_feature (25)..(25): n is a, c, g, or t
aacnaaataggtcaggtacgaggcngggtgttgaggatgtgaaggtctcaaaagcctctggggtctcaaaggccacagaggtctcaaagaccccagaggctcgggaggcacctgccacccaggcctcatctactactcagctgactgatacccaggttctggcagctgaaaacaagagtctagcagctgacaccaagaaacagaatgctgacccgcaggctgtgacaatgcctgccactgagaccaaaaaggtcagccatgtggctgatacaaaggtcaatacaaaggctcaggagactgaggctgcaccctctcaggccccagcagatgaacctgagcctgagagtgcagctgcccagtctcaggagaatcaggatactcggcccaaggtcaaagccaagaaagcccgaaaggtgaagcatctggatggggaagaggatggcagcagtgatcagagtcaggcttctggaaccacaggtggccgaagggtctcaaaggccctaatggcctcaatggcccgcagggcttcaaggggtcccatagccttttgggcccgcagggcatcaaggactcggttggctgcttgggcccggagagccttgctctccctgagatcacctaaagcccgtaggggcaaggctcgccgtagagctgccaagctccagtcatcccaagagcctgaagcaccaccacctcgggatgtggcccttttgcaagggagggcaaatgatttggtgaagtaccttttggctaaagaccagacgaagattcccatcaagcgctcggacatgctgaaggacatcatcaaagaatacactgatgtgtaccccgaaatcattgaacgagcaggctattccttggagaaggtatttgggattcaattgaaggaaattgataagaatgaccacttgtacattcttctcagcaccttagagcccactgatgcaggcatactgggaacgactaaggactcacccaagctgggtctgctcatggtgcttcttagcatcatcttcatgaatggaaatcggtccagtgaggctgtcatctgggaggtgctgcgcaagttggggctgcgccctgggatacatcattcactctttggggacgtgaagaagctcatcactgatgagtttgtgaagcagaagtacctggactatgccagagtccccaatagcaatccccctgaatatgagttcttctggggcctgcgctcttactatgagaccagcaagatgaaagtcctcaagtttgcctgcaaggtacaaaagaaggatcccaaggaatgggcagctcagtaccgagaggcgatggaagcggatttgaaggctgcagctgaggctgcagctgaagccaaggctagggccgagattagagctcgaatgggcattgggctcggctcggagaatgctgccgggccctgcaactgggacgaagctgatatcggaccctgggccaaagcccggatccaggcgggagcagaagctaaagccaaagcccaagagagtggcagtgccagcactggtgccagtaccagtaccaataacagtgccagtgccagtgccagcaccagtggtggcttcagtgctggtgccagcctgaccgccactctcacatttgggctcttcgctggccttggtggagctggtgccagcaccagtggcagctctggtgcctgtggtttctcctacaagtgagattttagatattgttaatcctgccagtctttctcttcaagccagggtgcatcctcagaaacctactcaacacagcactctaggcagccactatcaatcaattgaagttgacactctgcattaaatctatttgccatttctga

SEQ ID NO: 444280 - DNA, 2100 bp, Homo sapiens
  misc_feature (2068)..(2068): n is a, c, g, or t
agaaagtttcccccacggggcattaatcccgtccagaacccggagccgcccgatcgtagagaaggcagacgcatcccgaactcgctggaggacaaggctcagctcttgccaggccaaattgagacatgtctgacacaagcgagagtggtgcaggtctaactcgcttccaggctgaagcttcagaaaaggacagtagctcgatgatgcagactctgttgacagtgacccagaatgtggaggtcccagagacaccgaaggcctcaaaggcactggaggtctcagaggatgtgaaggtctcaaaagcctctggggtctcaaaggccacagaggtctcaaagaccccagaggctcgggaggcacctgccacccaggcctcatctactactcagctgactgatacccaggttctggcagctgaaaacaagagtctagcagctgacaccaagaaacagaatgctgacccgcaggctgtgacaatgcctgccactgagaccaaaaaggtcagccatgtggctgatacaaaggtcaatacaaaggctcaggagactgaggctgcaccctctcaggccccagcagatgaacctgagcctgagagtgcagctgcccagtctcaggagaatcaggatactcggcccaaggtcaaagccaagaaagcccgaaaggtgaagcatctggatggggaagaggatggcagcagtgatcagagtcaggcttctggaaccacaggtggccgaagggtctcaaaggccctaatggcctcaatggcccgcagggcttcaaggggtcccatagccttttgggcccgcagggcatcaaggactcggttggctgcttgggcccggagagccttgctctccctgagatcacctaaagcccgtaggggcaaggctcgccgtagagctgccaagctccagtcatcccaagagcctgaagcaccaccacctcgggatgtggcccttttgcaagggagggcaaatgatttggtgaagtaccttttggctaaagaccagacgaagattcccatcaagcgctcggacatgctgaaggacatcatcaaagaatacactgatgtgtaccccgaaatcattgaacgagcaggctattccttggagaaggtatttgggattcaattgaaggaaattgataagaatgaccacttgtacattcttctcagcaccttagagcccactgatgcaggcatactgggaacgactaaggactcacccaagctgggtctgctcatggtgcttcttagcatcatcttcatgaatggaaatcggtccagtgaggctgtcatctgggaggtgctgcgcaagttggggctgcgccctgggatacatcattcactctttggggacgtgaagaagctcatcactgatgagtttgtgaagcagaagtacctggactatgccagagtccccaatagcaatccccctgaatatgagttcttctggggcctgcgctcttactatgagaccagcaagatgaaagtcctcaagtttgcctgcaaggtacaaaagaaggatcccaaggaatgggcagctcagtaccgagaggcgatggaagcggatttgaaggctgcagctgaggctgcagctgaagccaaggctagggccgagattagagctcgaatgggcattgggctcggctcggagaatgctgccgggccctgcaactgggacgaagctgatatcggaccctgggccaaagcccggatccaggcgggagcagaagctaaagccaaagcccaagagagtggcagtgccagcactggtgccagtaccagtaccaataacagtgccagtgccagtgccagcaccagtggtggcttcagtgctggtgccagcctgaccgccactctcacatttgggctcttcgctggccttggtggagctggtgccagcaccagtggcagctctggtgcctgtggtttctcctacaagtgagattttagatattgttaatcctgccagtctttctcttcaagccagggtgcatcctcagaaacctactcaacacagcactctaggcagccactatcaattccatatacaggaccacgttgggncagcctctgccatatatatttttgtccgtttt

SEQ ID NO: 444281 - DNA, 1981 bp, Homo sapiens
agaaagtttcccccacggggcattaatcccgtccagaacccggagccgcccgatcgtagagaaggcagacgcatcccgaactcgctggaggacaaggctcagctcttgccaggccaaattgagacatgtctgacacaagcgagagtggtgcaggtctaactcgcttccaggctgaagcttcagaaaaggacagtagctcgatgatgcagactctgttgacagtgacccagaccccagaggctcgggaggcacctgccacccaggcctcatctactactcagctgactgatacccaggttctggcagctgaaaacaagagtctagcagctgacaccaagaaacagaatgctgacccgcaggctgtgacaatgcctgccactgagaccaaaaaggtcagccatgtggctgatacaaaggtcaatacaaaggctcaggagactgaggctgcaccctctcaggccccagcagatgaacctgagcctgagagtgcagctgcccagtctcaggagaatcaggatactcggcccaaggtcaaagccaagaaagcccgaaaggtgaagcatctggatggggaagaggatggcagcagtgatcagagtcaggcttctggaaccacaggtggccgaagggtctcaaaggccctaatggcctcaatggcccgcagggcttcaaggggtcccatagccttttgggcccgcagggcatcaaggactcggttggctgcttgggcccggagagccttgctctccctgagatcacctaaagcccgtaggggcaaggctcgccgtagagctgccaagctccagtcatcccaagagcctgaagcaccaccacctcgggatgtggcccttttgcaagggagggcaaatgatttggtgaagtaccttttggctaaagaccagacgaagattcccatcaagcgctcggacatgctgaaggacatcatcaaagaatacactgatgtgtaccccgaaatcattgaacgagcaggctattccttggagaaggtatttgggattcaattgaaggaaattgataagaatgaccacttgtacattcttctcagcaccttagagcccactgatgcaggcatactgggaacgactaaggactcacccaagctgggtctgctcatggtgcttcttagcatcatcttcatgaatggaaatcggtccagtgaggctgtcatctgggaggtgctgcgcaagttggggctgcgccctgggatacatcattcactctttggggacgtgaagaagctcatcactgatgagtttgtgaagcagaagtacctggactatgccagagtccccaatagcaatccccctgaatatgagttcttctggggcctgcgctcttactatgagaccagcaagatgaaagtcctcaagtttgcctgcaaggtacaaaagaaggatcccaaggaatgggcagctcagtaccgagaggcgatggaagcggatttgaaggctgcagctgaggctgcagctgaagccaaggctagggccgagattagagctcgaatgggcattgggctcggctcggagaatgctgccgggccctgcaactgggacgaagctgatatcggaccctgggccaaagcccggatccaggcgggagcagaagctaaagccaaagcccaagagagtggcagtgccagcactggtgccagtaccagtaccaataacagtgccagtgccagtgccagcaccagtggtggcttcagtgctggtgccagcctgaccgccactctcacatttgggctcttcgctggccttggtggagctggtgccagcaccagtggcagctctggtgcctgtggtttctcctacaagtgagattttagatattgttaatcctgccagtctttctcttcaagccagggtgcatcctcagaaacctactcaacacagcactctaggcagccactatcaatcaattgaagttgacactctgcattaaatctatttgccatttctga

SEQ ID NO: 444282 - DNA, 1921 bp, Homo sapiens
agaaagtttcccccacggggcattaatcccgtccagaacccggagccgcccgatcgtagagaaggcagacgcatcccgaactcgctggaggacaaggctcagctcttgccaggccaaattgagacatgtctgacacaagcgagagtggtgcaggtctaactcgcttccagaccccagaggctcgggaggcacctgccacccaggcctcatctactactcagctgactgatacccaggttctggcagctgaaaacaagagtctagcagctgacaccaagaaacagaatgctgacccgcaggctgtgacaatgcctgccactgagaccaaaaaggtcagccatgtggctgatacaaaggtcaatacaaaggctcaggagactgaggctgcaccctctcaggccccagcagatgaacctgagcctgagagtgcagctgcccagtctcaggagaatcaggatactcggcccaaggtcaaagccaagaaagcccgaaaggtgaagcatctggatggggaagaggatggcagcagtgatcagagtcaggcttctggaaccacaggtggccgaagggtctcaaaggccctaatggcctcaatggcccgcagggcttcaaggggtcccatagccttttgggcccgcagggcatcaaggactcggttggctgcttgggcccggagagccttgctctccctgagatcacctaaagcccgtaggggcaaggctcgccgtagagctgccaagctccagtcatcccaagagcctgaagcaccaccacctcgggatgtggcccttttgcaagggagggcaaatgatttggtgaagtaccttttggctaaagaccagacgaagattcccatcaagcgctcggacatgctgaaggacatcatcaaagaatacactgatgtgtaccccgaaatcattgaacgagcaggctattccttggagaaggtatttgggattcaattgaaggaaattgataagaatgaccacttgtacattcttctcagcaccttagagcccactgatgcaggcatactgggaacgactaaggactcacccaagctgggtctgctcatggtgcttcttagcatcatcttcatgaatggaaatcggtccagtgaggctgtcatctgggaggtgctgcgcaagttggggctgcgccctgggatacatcattcactctttggggacgtgaagaagctcatcactgatgagtttgtgaagcagaagtacctggactatgccagagtccccaatagcaatccccctgaatatgagttcttctggggcctgcgctcttactatgagaccagcaagatgaaagtcctcaagtttgcctgcaaggtacaaaagaaggatcccaaggaatgggcagctcagtaccgagaggcgatggaagcggatttgaaggctgcagctgaggctgcagctgaagccaaggctagggccgagattagagctcgaatgggcattgggctcggctcggagaatgctgccgggccctgcaactgggacgaagctgatatcggaccctgggccaaagcccggatccaggcgggagcagaagctaaagccaaagcccaagagagtggcagtgccagcactggtgccagtaccagtaccaataacagtgccagtgccagtgccagcaccagtggtggcttcagtgctggtgccagcctgaccgccactctcacatttgggctcttcgctggccttggtggagctggtgccagcaccagtggcagctctggtgcctgtggtttctcctacaagtgagattttagatattgttaatcctgccagtctttctcttcaagccagggtgcatcctcagaaacctactcaacacagcactctaggcagccactatcaatcaattgaagttgacactctgcattaaatctatttgccatttctga

SEQ ID NO: 444283 - DNA, 2283 bp, Homo sapiens
agaaagtttcccccacggggcattaatcccgtccagaacccggagccgcccgatcgtagagaaggcagacgcatcccgaactcgctggaggacaaggctcagctcttgccaggccaaattgagacatgtctgacacaagcgagagtggtgcaggtctaactcgcttccaggctgaagcttcagaaaaggacagtagctcgatgatgcagactctgttgacagtgacccagaatgtggaggtcccagagacaccgaaggcctcaaaggcactggaggtctcagaggatgtgaaggtctcaaaagcctctggggtctcaaaggccacagaggtctcaaagaccccagaggctcgggaggcacctgccacccaggcctcatctactactcagctgactgatacccaggttctggcagctgaaaacaagagtctagcagctgacaccaagaaacagaatgctgacccgcaggctgtgacaatgcctgccactgagaccaaaaaggtcagccatgtggctgatacaaaggtcaatacaaaggctcaggagactgaggctgcaccctctcaggccccagcagatgaacctgagcctgagagtgcagctgcccagtctcaggagaatcaggatactcggcccaaggtcaaagccaagaaagcccgaaaggtgaagcatctggatggggaagaggatggcagcagtgatcagagtcaggcttctggaaccacaggtggccgaagggtctcaaaggccctaatggcctcaatggcccgcagggcttcaaggggtcccatagccttttgggcccgcagggcatcaaggactcggttggctgcttgggcccggagagccttgctctccctgagatcacctaaagcccgtaggggcaaggctcgccgtagagctgccaagctccagtcatcccaagagcctgaagcaccaccacctcgggatgtggcccttttgcaagggagggcaaatgatttggtgaagtaccttttggctaaagaccagacgaagattcccatcaagcgctcggacatgctgaaggacatcatcaaagaatacactgatgtgtaccccgaaatcattgaacgagcaggctattccttggagaaggtatttgggattcaattgaaggaaattgataagaatgaccacttgtacattcttctcagcaccttagagcccactgatgcaggcatactgggaacgactaaggactcacccaagctgggtctgctcatggtgcttcttagcatcatcttcatgaatggaaatcggtccagtgaggctgtcatctgggaggtgctgcgcaagttggggctgcgccctgggatacatcattcactctttggggacgtgaagaagctcatcactgatgagtttgtgaagcagaagtacctggactatgccagagtccccaatagcaatccccctgaatatgagttcttctggggcctgcgctcttactatgagaccagcaagatgaaagtcctcaagtttgcctgcaaggtacaaaagaaggatcccaaggaatgggcagctcagtaccgagaggcgatggaagcggatttgaaggctgcagctgaggctgcagctgaagccaaggctagggccgagattagagctcgaatgggcattgggctcggctcggagaatgctgccgggccctgcaactgggacgaagctgatatcggaccctgggccaaagcccggatccaggcgggagcagaagctaaagccaaagcccaagagagtggcagtgccagcactggtgccagtaccagtaccaataacagtgccagtgccagtgccagcaccagtggtggcttcagtgctggtgccagcctgaccgccactctcacatttgggctcttcgctggccttggtggagctggtgccagcaccagtggcagctctggtgcctgtggtttctcctacaagtgagattttagatattgttaatcctgccagtctttctcttcaagccagggtgcatcctcagaaacctactcaacacagcacttcgtgggcagcgctgcccacgaagtgacttgtactgcctccagaaagggagccaagttacaccaaagcttgaggtccgcctgtgcccaacacacttcctggcacacagaagacccatcaaaactctttctttcccctccttcaactcccagtatttattaaaaagctagttgtcatctgcgtggctctgccgcctggtgatgggggatggagacctctccatacagagctccacctcccatccccacttcgtgggcag

SEQ ID NO: 444284 - DNA, 2015 bp, Homo sapiens
agaaagtttcccccacggggcattaatcccgtccagaacccggagccgcccgatcgtagagaaggcagacgcatcccgaactcgctggaggacaaggctcagctcttgccaggccaaattgagacatgtctgacacaagcgagagtggtgcaggtctaactcgcttccaggctgaagcttcagaaaaggacagtagctcgatgatgcagactctgttgacagtgacccagaatgtggaggtcccagagacaccgaaggcctcaaaggcactggaggtctcagaggatgtgaaggtctcaaaagcctctggggtctcaaaggccacagaggtctcaaagaccccagaggctcgggaggcacctgccacccaggcctcatctactactcagctgactgatacccaggttctggcagctgaaaacaagagtctagcagctgacaccaagaaacagaatgctgacccgcaggctgtgacaatgcctgccactgagaccaaaaaggtcagccatgtggctgatacaaaggtcaatacaaaggctcaggagactgaggctgcaccctctcaggccccagcagatgaacctgagcctgagagtgcagctgcccagtctcaggagaatcaggatactcggcccaaggtcaaagccaagaaagcccgaaaggtgaagcatctggatggggaagaggatggcagcagtgatcagagtcaggcttctggaaccacaggtggccgaagggtctcaaaggccctaatggcctcaatggcccgcagggcttcaaggggtcccatagccttttgggcccgcagggcatcaaggactcggttggctgcttgggcccggagagccttgctctccctgagatcacctaaagcccgtaggggcaaggctcgccgtagagctgccaagctccagtcatcccaagagcctgaagcaccaccacctcgggatgtggcccttttgcaagggagggcaaatgatttggtgaagtaccttttggctaaagaccagacgaagattcccatcaagcgctcggacatgctgaaggacatcatcaaagaatacactgatgtgtaccccgaaatcattgaacgagcaggctattccttggagaaggtatttgggattcaattgaaggaaattgataagaatgaccacttgtacattcttctcagcaccttagagcccactgatgcaggcatactgggaacgactaaggactcacccaagctgggtctgctcatggtgcttcttagcatcatcttcatgaatggaaatcggtccagtgaggctgtcatctgggaggtgctgcgcaagttggggctgcgccctgggatacatcattcactctttggggacgtgaagaagctcatcactgatgagtttgtgaagcagaagtacctggactatgccagagtccccaatagcaatccccctgaatatgagttcttctggggcctgcgctcttactatgagaccagcaagatgaaagtcctcaagtttgcctgcaaggtacaaaagaaggatcccaaggaatgggcagctcagtaccgagaggcgatggaagcggatttgaaggctgcagctgaggctgcagctgaagccaaggctagggccgagattagagctcgaatgggcattgggctcggctcggagaatgctgccgggccctgcaactgggacgaagctgatatcggaccctgggccaaagcccggatccaggcgggagcagaagctaaagccaaagcccaagagagtggcagtgcgtgccagcctgaccgccactctcacatttgggctcttcgctggccttggtggagctggtgccagcaccagtggcagctctggtgcctgtggtttctcctacaagtgagattttagatattgttaatcctgccagtctttctcttcaagccagggtgcatcctcagaaacctactcaacacagcactctaggcagccactatcaatcaattgaagttgacactctgcattaaatctatttgccatttctga

SEQ ID NO: 444285 - DNA, 1988 bp, Homo sapiens
agaaagtttcccccacggggcattaatcccgtccagaacccggagccgcccgatcgtagagaaggcagacgcatcccgaactcgctggaggacaaggctcagctcttgccaggccaaattgagacatgtctgacacaagcgagagtggtgcaggtctaactcgcttccaggctgaagcttcagaaaaggacagtagctcgatgatgcagactctgttgacagtgacccagaatgtggaggtcccagagacaccgaaggcctcaaaggcactggaggtctcagaggatgtgaaggtctcaaaagcctctggggtctcaaaggccacagaggtctcaaagaccccagaggctcgggaggcacctgccacccaggcctcatctactactcagctgactgatacccaggttctggcagctgaaaacaagagtctagcagctgacaccaagaaacagaatgctgacccgcaggctgtgacaatgcctgccactgagaccaaaaaggtcagccatgtggctgatacaaaggtcaatacaaaggctcaggagactgaggctgcaccctctcaggccccagcagatgaacctgagcctgagagtgcagctgcccagtctcaggagaatcaggatactcggcccaaggtcaaagccaagaaagcccgaaaggtgaagcatctggatggggaagaggatggcagcagtgatcagagtcaggcttctggaaccacaggtggccgaagggtctcaaaggccctaatggcctcaatggcccgcagggcttcaaggggtcccatagccttttgggcccgcagggcatcaaggactcggttggctgcttgggcccggagagccttgctctccctgagatcacctaaagcccgtaggggcaaggctcgccgtagagctgccaagctccagtcatcccaagagcctgaagcaccaccacctcgggatgtggcccttttgcaagggagggcaaatgatttggtgaagtaccttttggctaaagaccagacgaagattcccatcaagcgctcggacatgctgaaggacatcatcaaagaatacactgatgtgtaccccgaaatcattgaacgagcaggctattccttggagaaggtatttgggattcaattgaaggaaattgataagaatgaccacttgtacattcttctcagcaccttagagcccactgatgcaggcatactgggaacgactaaggactcacccaagctgggtctgctcatggtgcttcttagcatcatcttcatgaatggaaatcggtccagtgaggctgtcatctgggaggtgctgcgcaagttggggctgcgccctgggatacatcattcactctttggggacgtgaagaagctcatcactgatgagtttgtgaagcagaagtacctggactatgccagagtccccaatagcaatccccctgaatatgagttcttctggggcctgcgctcttactatgagaccagcaagatgaaagtcctcaagtttgcctgcaaggtacaaaagaaggatcccaaggaatgggcagctcagtaccgagaggcgatggaagcggatttgaaggctgcagctgaggctgcagctgaagccaaggctagggccgagattagagctcgaatgggcattgggctcggctcggagaatgctgccgggccctgcaactgggacgaagctgatatcggaccctgggccaaagcccggatccaggcgggagcagaagctaaagccaaagcccaagagagtggcagtgccagcactggtgccagtaccagtaccaataacagtgccaaccagtggcagctctggtgcctgtggtttctcctacaagtgagattttagatattgttaatcctgccagtctttctcttcaagccagggtgcatcctcagaaacctactcaacacagcactctaggcagccactatcaatcaattgaagttgacactctgcattaaatctatttgccatttctga

SEQ ID NO: 444286 - DNA, 1238 bp, Homo sapiens
gtttctacctcaaaccccttatttatgaagtagagagatctgccctgtgtatccagttatgagccatcccaagagcctgaagcaccaccacctcgggatgtggcccttttgcaagggagggcaaatgatttggtgaagtaccttttggctaaagaccagacgaagattcccatcaagcgctcggacatgctgaaggacatcatcaaagaatacactgatgtgtaccccgaaatcattgaacgagcaggctattccttggagaaggtatttgggattcaattgaaggaaattgataagaatgaccacttgtacattcttctcagcaccttagagcccactgatgcaggcatactgggaacgactaaggactcacccaagctgggtctgctcatggtgcttcttagcatcatcttcatgaatggaaatcggtccagtgaggctgtcatctgggaggtgctgcgcaagttggggctgcgccctgggatacatcattcactctttggggacgtgaagaagctcatcactgatgagtttgtgaagcagaagtacctggactatgccagagtccccaatagcaatccccctgaatatgagttcttctggggcctgcgctcttactatgagaccagcaagatgaaagtcctcaagtttgcctgcaaggtacaaaagaaggatcccaaggaatgggcagctcagtaccgagaggcgatggaagcggatttgaaggctgcagctgaggctgcagctgaagccaaggctagggccgagattagagctcgaatgggcattgggctcggctcggagaatgctgccgggccctgcaactgggacgaagctgatatcggaccctgggccaaagcccggatccaggcgggagcagaagctaaagccaaagcccaagagagtggcagtgccagcactggtgccagtaccagtaccaataacagtgccagtgccagtgccagcaccagtggtggcttcagtgctggtgccagcctgaccgccactctcacatttgggctcttcgctggccttggtggagctggtgccagcaccagtggcagctctggtgcctgtggtttctcctacaagtgagattttagatattgttaatcctgccagtctttctcttcaagccagggtgcatcctcagaaacctactcaacacagcactctaggcagccactatcaatcaattgaagttgacactctgcattaaatctatttgccatttctga

SEQ ID NO: 444287 - DNA, 1572 bp, Homo sapiens
  misc_feature (1525)..(1525): n is a, c, g, or t
  misc_feature (1533)..(1533): n is a, c, g, or t
agaaagtttcccccacggggcattaatcccgtccagaacccggagccgcccgatcgtagagaaggcagacgcatcccgaactcgctggaggacaaggctcagctcttgccaggccaaattgagacatgtctgacacaagcgagagtggtgcaggtctaactcgcttccaggctgaagcttcagaaaaggacagtagctcgatgatgcagactctgttgacagtgacccagaatgtggaggtcccagagacaccgaaggcctcaaaggcactggaggtctcagaggatgtgaaggtctcaaaagcctctggggtctcaaaggccacagaggtctcaaagaccccagaggctcgggaggcacctgccacccaggcctcatctactactcagctgactgatacccaggttctggcagctgaaaacaagagtctagcagctgacaccaagaaacagaatgctgacccgcaggctgtgacaatgcctgccactgagaccaaaaaggtcagccatgtggctgatacaaaggtcaatacaaaggctcaggagactgaggctgcaccctctcaggccccagcagatgaacctgagcctgagagtgcagctgcccagtctcaggagaatcaggatactcggcccaaggtcaaagccaagaaagcccgaaaggtgaagcatctggatggggaagaggatggcagcagtgatcagagtcaggcttctggaaccacaggtggccgaagggtctcaaaggccctaatggcctcaatggcccgcagggcttcaaggggtcccatagccttttgggcccgcagggcatcaaggactcggttggctgcttgggcccggagagccttgctctccctgagatcacctaaagcccgtaggggcaaggctcgccgtagagctgccaagctccagtcatcccaagagcctgaagcaccaccacctcgggatgtggcccttttgcaagggagggcaaatgatttggtgaagtaccttttggctaaagaccagacgaagattcccatcaagcgctcggacatgctgaaggacatcatcaaagaatacactgatgtgtaccccgaaatcattgaacgagcaggctattccttggagaaggtatttgggattcaattgaaggaaattgataagaatgaccacttgtacattcttctcagcaccttagagcccactgatgcaggcatactgggaacgactaaggactcacccaagctgggtctgctcatggtgcttcttagcatcatcttcatgaatggaaatcggtccagtgaggctgtcatctgggaggtgctgcgcaagttggggctgcgccctgggatacatcattcactctttggggacgtgaagaagctcatcactgatgagtttgtgaagcagaagtacctggactatgccagagtccccaatagcaatccccctgaatatgagttcttctggggcctgcgctcttactatgagaccagcaagatgaaagtcctcaagtttgcctgcaaggtacaaagaagatnccaggaangggcagatcagtcccagtcggcgagagggtcctctggtc

SEQ ID NO: 444288 - DNA, 1730 bp, Homo sapiens
agaaagtttcccccacggggcattaatcccgtccagaacccggagccgcccgatcgtagagaaggcagacgcatcccgaactcgctggaggacaaggctcagctcttgccaggccaaattgagacatgtctgacacaagcgagagtggtgcaggtctaactcgcttccaggctgaagcttcagaaaaggacagtagctcgatgatgcagactctgttgacagtgacccagaatgtggaggtcccagagacaccgaaggcctcaaaggcactggaggtctcagaggatgtgaaggtctcaaaagcctctggggtctcaaaggccacagaggtctcaaagaccccagaggctcgggaggcacctgccacccaggcctcatctactactcagctgactgatacccaggttctggcagctgaaaacaagagtctagcagctgacaccaagaaacagaatgctgacccgcaggctgtgacaatgcctgccactgagaccaaaaaggtcagccatgtggctgatacaaaggtcaatacaaaggctcaggagactgaggctgcaccctctcaggccccagcagatgaacctgagcctgagagtgcagctgcccagtctcaggagaatcaggatactcggcccaaggtcaaagccaagaaagcccgaaaggtgaagcatctggatggggaagaggatggcagcagtgatcagagtcaggcttctggaaccacaggtggccgaagggtctcaaaggccctaatggcctcaatggcccgcagggcttcaaggggtcccatagccttttgggcccgcagggcatcaaggactcggttggctgcttgggcccggagagccttgctctccctgagatcacctaaagcccgtaggggcaaggctcgccgtagagctgccaagctccagtcatcccaagagcctgaagcaccaccacctcgggatgtggcccttttgcaagggagggcaaatgatttggtgaagtaccttttggctaaagaccagacgaagattcccatcaagcgctcggacatgctgaaggacatcatcaaagaatacactgatgtgtaccccgaaatcattgaacgagcaggctattccttggagaaggtatttgggattcaattgaaggaaattgataagaatgaccacttgtacattcttctcagcaccttagagcccactgatgcaggcatactgggaacgactaaggactcacccaagctgggtctgctcatggtgcttcttagcatcatcttcatgaatggaaatcggtccagtgaggctgtcatctgggaggtgctgcgcaagttggggctgcgccctggatacatcattcactctttgggcgacagtgacagaaagctcatcactgactgaactcgctgaaagcccgaaagtaccgtgcaccacgcccagaagtacccaacagcaaaccccccgacaaacgcagaacactgggggccaggcccccaaccatggacaccgccagaatacacgccccaagatgcccgcaacgctccaccacggcccccaggacgggcacccacacccaagcgccgcaccgcccacaccgaacacaccaagacccccccgccgcaaccccaggcctcgccccccacacacgccaccagccacccaccacccacaccccccaaccccacccacccaccccccccgcccaaccccccccaccacccccccacccccccacccccccacacc

SEQ ID NO: 444289 - DNA, 1333 bp, Homo sapiens
agaaagtttcccccacggggcattaatcccgtccagaacccggagccgcccgatcgtagagaaggcagacgcatcccgaactcgctggaggacaaggctcagctcttgccaggccaaattgagacatgtctgacacaagcgagagtggtgcaggtctaactcgcttccaggctgaagcttcagaaaaggacagtagctcgatgatgcagactctgttgacagtgacccagaatgtggaggtcccagagacaccgaaggcctcaaaggcactggaggtctcagaggatgtgaaggtctcaaaagcctctggggtctcaaaggccacagaggtctcaaagaccccagaggctcgggaggcacctgccacccaggcctcatctactactcagctgactgatacccaggttctggcagctgaaaacaagagtctagcagctgacaccaagaaacagaatgctgacccgcaggctgtgacaatgcctgccactgagaccaaaaaggtcagccatgtggctgatacaaaggtcaatacaaaggctcaggagactgaggctgcaccctctcaggccccagcagatgaacctgagcctgagagtgcagctgcccagtctcaggagaatcaggatactcggcccaaggtcaaagccaagaaagcccgaaaggtgaagcatctggatggggaagaggatggcagcagtgatcagagtcaggcttctggaaccacaggtggccgaagggtctcaaaggccctaatggcctcaatggcccgcagggcttcaaggggtcccatagccttttgggcccgcagggcatcaaggactcggttggctgcttgggcccggagagccttgctctccctgagatcacctaaagcccgtaggggcaaggctcgccgtagagctgccaagctccagtcatcccaagagcctgaagcaccaccacctcgggatgtggcccttttgcaagggagggcaaatgatttggtgaagtaccttttggctaaagaccagacgaagattcccatcaagcgctcggacatgctgaaggacatcatcaaagaatacactgatgtgtaccccgaaatcattgaacgagcaggctattccttggagaaggtatttgggattcaattgaaggaaattgataagaatgaccacttgtacattcttctcagcaccttagagcccactgatgcaggcatactgggaacgactaaggactcacccaagctgggtctgctcatggtgcttcttagcatcatcttcatgaatggaaatcggtccagtgaggctgtcatctgggaggtgggaggagaggaagggtaccgagctcg

SEQ ID NO: 444290 - DNA, 1071 bp, Homo sapiens
agaaagtttcccccacggggcattaatcccgtccagaacccggagccgcccgatcgtagagaaggcagacgcatcccgaactcgctggaggacaaggctcagctcttgccaggccaaattgagacatgtctgacacaagcgagagtggtgcaggtctaactcgcttccaggctgaagcttcagaaaaggacagtagctcgatgatgcagactctgttgacagtgacccagaatgtggaggtcccagagacaccgaaggcctcaaaggcactggaggtctcagaggatgtgaaggtctcaaaagcctctggggtctcaaaggccacagaggtctcaaagaccccagaggctcgggaggcacctgccacccaggcctcatctactactcagctgactgatacccaggttctggcagctgaaaacaagagtctagcagctgacaccaagaaacagaatgctgacccgcaggctgtgacaatgcctgccactgagaccaaaaaggtcagccatgtggctgatacaaaggtcaatacaaaggctcaggagactgaggctgcaccctctcaggccccagcagatgaacctgagcctgagagtgcagctgcccagtctcaggagaatcaggatactcggcccaaggtcaaagccaagaaagcccgaaaggtgaagcatctggatggggaagaggatggcagcagtgatcagagtcaggcttctggaaccacaggtggccgaagggtctcaaaggccctaatggcctcaatggcccgcagggcttcaaggggtcccatagccttttgggcccgcagggcatcaaggactcggttggctgcttgggcccggagagccttgctctccctgagatcacctaaagcccgtaggggcaaggctcgccgtagagctgccaagctccagtcatcccaagagcctgaagcaccaccacctcgggatgtggcccttttgcaagggagggcaatgattagaggaagaccatagggaaagacagaacgagataccaacaagacgccggaaatgctgaaaggcgaatattaaagaatacagtgaagtgaca

SEQ ID NO: 444291 - DNA, 1496 bp, Homo sapiens
  misc_feature (4)..(4): n is a, c, g, or t
  misc_feature (25)..(25): n is a, c, g, or t
  misc_feature (857)..(857): n is a, c, g, or t
aacnaaataggtcaggtacgaggcngggtgttgaggatgtgaaggtctcaaaagcctctggggtctcaaaggccacagaggtctcaaagaccccagaggctcgggaggcacctgccacccaggcctcatctactactcagctgactgatacccaggttctggcagctgaaaacaagagtctagcagctgacaccaagaaacagaatgctgacccgcaggctgtgacaatgcctgccactgagaccaaaaaggtcagccatgtggctgatacaaaggtcaatacaaaggctcaggagactgaggctgcaccctctcaggccccagcagatgaacctgagcctgagagtgcagctgcccagtctcaggagaatcaggatactcggcccaaggtcaaagccaagaaagcccgaaaggtgaagcatctggatggggaagaggatggcagcagtgatcagagtcaggcttctggaaccacaggtggccgaagggtctcaaaggccctaatggcctcaatggcccgcagggcttcaaggggtcccatagccttttgggcccgcagggcatcaaggactcggttggctgcttgggcccggagagccttgctctccctgagatcacctaaagcccgtaggggcaaggctcgccgtagagctgccaagctccagtcatcccaagagcctgaagcaccaccacctcgggatgtggcccttttgcaagggagggcaaatgatttggtgaagtaccttttggctaaagaccagacgaagattcccatcaagcgctcggacatgctgaaggacatcatcaaagaatacactgatgtgtaccccgaaatcattgaacgagcaggctattcnttggagaaggtatttgggattcaattgaaggaaattgataagaatgaccacttgtacattcttctcagcaccttagagcccactgatgcaggcatactgggaacgactaaggactcacccaagctgggtctgctcatggtgcttcttagcatcatcttcatgaatggaaatcggtccagtgaggctgtcatctgggactcagaaacctactcaacacagcactctaggcagccactatcaatcaattgaagttgacactctgcattaaatctatttgccatttctgaaaaaaaaacaaaaaaaaaaaaaaaaaaaaaaaacatgtgtgtgcgggcgcgccctgggcctctggaaaaagctcttccaaaaaccacattcgcgtgtgggcgcgccgccggggcccccagttgggttaggtgtgaaccggggccccatagcgtggtccccaagggaagatcccggggtccaggagacaaaggcggctggggatcctcacacccatttaaaacaagccgccgggggcgacacaggacgcgttccggagaacaacttccagagagggggacgtccagagacgccatcacgcgggttcctacacagacgggagccccacggggacgcccggatatcaaataaggc

SEQ ID NO: 444292 - DNA, 441 bp, Homo sapiens
agaaagtttcccccacggggcattaatcccgtccagaacccggagccgcccgatcgtagagaaggcagacgcatcccgaactcgctggaggacaaggtgaggggcgttgatattggggttttatggaggtcagacagtggttccagacccctcgaacccatagccaggcagatgagcaattcttactgcaccactgcagctgaagcagaggtgacctggagtggggtgtaggcaatgaggacgactgagaaagtagtaggctgtacagactgggagcagagactagcggagggaggaggggagaaaaacggggaaccaggaatgttgggagggggacgaggaatacaaggagggaggggaacactgagggggagtgaagatccagagaagagaatcggggatgcagagagggattaaggaatactgaggggcagggtgtgc

SEQ ID NO: 444293 - DNA, 387 bp, Homo sapiens
cctgatatgtcattgccctgttacagatgagaaaaccgaggcccagaaaggttggtaggtgacatgtccaaagtcatggggctaggaagtgtcagagcagggatggaatattaggtgcataattactggtaatactgtattattactattatctttttatactaagcatgtagcatagtgcctagcataaaggtagatgcttaatcctcttatgctccttctgatggttatttacatagtaatactgtattattactatggcttaatccctctatgctccttctgatggttatttttgtttcaggtacaaaagaaggatcccaaggaatgggcagctcagtaccgagaggcgatggaagcggatttgaaggctgcagctgaggctgc

SEQ ID NO: 444294 - DNA, 355 bp, Homo sapiens
ctggtgcctgtggtttctcctacaagtgagattttaggtatctgccttggtttcagtggggacatctggggcttatggggctgggatgaggagctggatgattctaggaaggcccaagttggagaatgatgtggagagtgtgccaagacactgcttttggcattttattcctttctgtttgctggatgtcaattgacccttttattttctcttacttgtgttttcagatattgttaatcctgccagtctttctcttcaagccagggtgcatcctcagaaacctactcaacacagcactctaggcagccactatcaatcaattgaagttgacactctgcattaaatctatttgcca

SEQ ID NO: 444295 - DNA, 2084 bp, Homo sapiens
accacttccggcctagagaggggagggcagtctccgagtttcggaggggcttggagtgagtggacgcactcgggaattgtaggaggacgaggctcagctcttgccaggccaaattgagacatgtctgacacaagcgagagtggtgcaggtctaactcgcttccaggctgaagcttcagaaaaggacagtagctcgatgatgcagactctgttgacagtgacccagaatgtggaggtcccagagacaccgaaggcctcaaaggcactggaggtctcagaggatgtgaaggtctcaaaagcctctggggtctcaaaggccacagaggtctcaaagaccccagaggctcgggaggcacctgccacccaggcctcatctactactcagctgactgatacccaggttctggcagctgaaaacaagagtctagcagctgacaccaagaaacagaatgctgacccgcaggctgtgacaatgcctgccactgagaccaaaaaggtcagccatgtggctgatacaaaggtcaatacaaaggctcaggagactgaggctgcaccctctcaggccccagcagatgaacctgagcctgagagtgcagctgcccagtctcaggagaatcaggatactcggcccaaggtcaaagccaagaaagcccgaaaggtgaagcatctggatggggaagaggatggcagcagtgatcagagtcaggcttctggaaccacaggtggccgaagggtctcaaaggccctaatggcctcaatggcccgcagggcttcaaggggtcccatagccttttgggcccgcagggcatcaaggactcggttggctgcttgggcccggagagccttgctctccctgagatcacctaaagcccgtaggggcaaggctcgccgtagagctgccaagctccagtcatcccaagagcctgaagcaccaccacctcgggatgtggcccttttgcaagggagggcaaatgatttggtgaagtaccttttggctaaagaccagacgaagattcccatcaagcgctcggacatgctgaaggacatcatcaaagaatacactgatgtgtaccccgaaatcattgaacgagcaggctattccttggagaaggtatttgggattcaattgaaggaaattgataagaatgaccacttgtacattcttctcagcaccttagagcccactgatgcaggcatactgggaacgactaaggactcacccaagctgggtctgctcatggtgcttcttagcatcatcttcatgaatggaaatcggtccagtgaggctgtcatctgggaggtgctgcgcaagttggggctgcgccctgggatacatcattcactctttggggacgtgaagaagctcatcactgatgagtttgtgaagcagaagtacctggactatgccagagtccccaatagcaatccccctgaatatgagttcttctggggcctgcgctcttactatgagaccagcaagatgaaagtcctcaagtttgcctgcaaggtacaaaagaaggatcccaaggaatgggcagctcagtaccgagaggcgatggaagcggatttgaaggctgcagctgaggctgcagctgaagccaaggctagggccgagattagagctcgaatgggcattgggctcggctcggagaatgctgccgggccctgcaactgggacgaagctgatatcggaccctgggccaaagcccggatccaggcgggagcagaagctaaagccaaagcccaagagagtggcagtgccagcactggtgccagtaccagtaccaataacagtgccagtgccagtgccagcaccagtggtggcttcagtgctggtgccagcctgaccgccactctcacatttgggctcttcgctggccttggtggagctggtgccagcaccagtggcagctctggtgcctgtggtttctcctacaagtgagattttagatattgttaatcctgccagtctttctcttcaagccagggtgcatcctcagaaacctactcaacacagcactctaggcagccactatcaatcaattgaagttgacactctgcattaaatctatttgccatttctga

SEQ ID NO: 444296 - DNA, 951 bp, Homo sapiens
acagtggcataaacatgggctttggcgtcagacagccctgagcggggccccattgccccacccccgaggaaggcgagggggggtggcagggggctgcggaaaggggctgggctgggttgggctgtctgcagctctagtccaggaggctgagacttcgagagggacttagagaaggcagacgcatcccgaactcgctggaggacaaggctcagctcttgccaggccaaattgagacatgtctgacacaagcgagagtggtgcaggtctaactcgcttccaggtgaagcatctggatggggaagaggatggcagcagtgatcagagtcaggcttctggaaccacaggtggccgaagggtctcaaaggccctaatggcctcaatggcccgcagggcttcaaggggtcccatagccttttgggcccgcagggcatcaaggactcggttggctgcttgggcccggagagccttgctctccctgagatcacctaaagcccgtaggggcaaggctcgccgtagagctgccaagctccagtcatcccaagagcctgaagcaccaccacctcgggatgtggcccttttgcaagggagggcaaatgatttggtgaagtaccttttggctaaagaccagacgaagattcccatcaagcgctcggacatgctgaaggacatcatcaaagaatacactgatgtgtaccccgaaatcattgaacgagcaggctattccttggagaaggtatttgggattcaattgaaggaaattgataagaatgaccacttgtacattcttctcagcaccttagagcccactgatgcaggcatactgggaacgactaaggactcacccaagctgggtctgctcatggtgcttcttagcatcatcttcatgaatggaaatcggtccagtgaggctgtcatctgggaggtgggaggagaggaagggtaccgagctcg

SEQ ID NO: 444297 - DNA, 2290 bp, Homo sapiens
  misc_feature (127)..(127): n is a, c, g, or t
gtcacggaggttgacaactcagtgagttagctttattgggaggggtgatctagacaccctgtacgccgcgttctatttgacctgggttaatcgtgtgaccgcgtggcttggcacgaaagtgaccaancctgggcttagtatagcttagttaaactttcgtttattgctaaaggttaatcactgctgtttcccgtgggggtgtggctaggctaagcgttttgagctgcatgactgcgtgcttgatgcttgtcccttttgatcgtggtgatttagagggtgaactcgctggaggacaaggctcagctcttgccaggccaaattgagacatgtctgacacaagcgagagtggtgcaggtctaactcgcttccaggctgaagcttcagaaaaggacagtagctcgatgatgcagactctgttgacagtgacccagaatgtggaggtcccagagacaccgaaggcctcaaaggcactggaggtctcagaggatgtgaaggtctcaaaagcctctggggtctcaaaggccacagaggtctcaaagaccccagaggctcgggaggcacctgccacccaggcctcatctactactcagctgactgatacccaggttctggcagctgaaaacaagagtctagcagctgacaccaagaaacagaatgctgacccgcaggctgtgacaatgcctgccactgagaccaaaaaggtcagccatgtggctgatacaaaggtcaatacaaaggctcaggagactgaggctgcaccctctcaggccccagcagatgaacctgagcctgagagtgcagctgcccagtctcaggagaatcaggatactcggcccaaggtcaaagccaagaaagcccgaaaggtgaagcatctggatggggaagaggatggcagcagtgatcagagtcaggcttctggaaccacaggtggccgaagggtctcaaaggccctaatggcctcaatggcccgcagggcttcaaggggtcccatagccttttgggcccgcagggcatcaaggactcggttggctgcttgggcccggagagccttgctctccctgagatcacctaaagcccgtaggggcaaggctcgccgtagagctgccaagctccagtcatcccaagagcctgaagcaccaccacctcgggatgtggcccttttgcaagggagggcaaatgatttggtgaagtaccttttggctaaagaccagacgaagattcccatcaagcgctcggacatgctgaaggacatcatcaaagaatacactgatgtgtaccccgaaatcattgaacgagcaggctattccttggagaaggtatttgggattcaattgaaggaaattgataagaatgaccacttgtacattcttctcagcaccttagagcccactgatgcaggcatactgggaacgactaaggactcacccaagctgggtctgctcatggtgcttcttagcatcatcttcatgaatggaaatcggtccagtgaggctgtcatctgggaggtgctgcgcaagttggggctgcgccctgggatacatcattcactctttggggacgtgaagaagctcatcactgatgagtttgtgaagcagaagtacctggactatgccagagtccccaatagcaatccccctgaatatgagttcttctggggcctgcgctcttactatgagaccagcaagatgaaagtcctcaagtttgcctgcaaggtacaaaagaaggatcccaaggaatgggcagctcagtaccgagaggcgatggaagcggatttgaaggctgcagctgaggctgcagctgaagccaaggctagggccgagattagagctcgaatgggcattgggctcggctcggagaatgctgccgggccctgcaactgggacgaagctgatatcggaccctgggccaaagcccggatccaggcgggagcagaagctaaagccaaagcccaagagagtggcagtgccagcactggtgccagtaccagtaccaataacagtgccagtgccagtgccagcaccagtggtggcttcagtgctggtgccagcctgaccgccactctcacatttgggctcttcgctggccttggtggagctggtgccagcaccagtggcagctctggtgcctgtggtttctcctacaagtgagattttagatattgttaatcctgccagtctttctcttcaagccagggtgcatcctcagaaacctactcaacacagcactctaggcagccactatcaatcaattgaagttgacactctgcattaaatctatttgccatttctga

SEQ ID NO: 444298 - DNA, 2441 bp, Homo sapiens
agaaagtttcccccacggggcattaatcccgtccagaacccggagccgcccgatcgtagagaaggcagacgcatcccgaactcgctggaggacaaggctcagctcttgccaggccaaattgagacatgtctgacacaagcgagagtggtgcaggtctaactcgcttccaggctgaagcttcagaaaaggacagtagctcgatgatgcagactctgttgacagtgacccagaatgtggaggtcccagagacaccgaaggcctcaaaggcactggaggtctcagaggatgtgaaggtctcaaaagcctctggggtctcaaaggccacagaggtctcaaagaccccagaggctcgggaggcacctgccacccaggcctcatctactactcagctgactgatacccaggttctggcagctgaaaacaagagtctagcagctgacaccaagaaacagaatgctgacccgcaggctgtgacaatgcctgccactgagaccaaaaaggtcagccatgtggctgatacaaaggtcaatacaaaggctcaggagactgaggctgcaccctctcaggccccagcagatgaacctgagcctgagagtgcagctgcccagtctcaggagaatcaggatactcggcccaaggtcaaagccaagaaagcccgaaaggtgaagcatctggatggggaagaggatggcagcagtgatcagagtcaggcttctggaaccacaggtggccgaagggtctcaaaggccctaatggcctcaatggcccgcagggcttcaaggggtcccatagccttttgggcccgcagggcatcaaggactcggttggctgcttgggcccggagagccttgctctccctgagatcacctaaagcccgtaggggcaaggctcgccgtagagctgccaagctccagtcatcccaagagcctgaagcaccaccacctcgggatgtggcccttttgcaagggagggcaaatgatttggtgaagtaccttttggctaaagaccagacgaagattcccatcaagcgctcggacatgctgaaggacatcatcaaagaatacactgatgtgtaccccgaaatcattgaacgagcaggctattccttggagaaggtatttgggattcaattgaaggaaattgataagaatgaccacttgtacattcttctcagcaccttagagcccactgatgcaggcatactgggaacgactaaggactcacccaagctgggtctgctcatggtgcttcttagcatcatcttcatgaatggaaatcggtccagtgaggctgtcatctgggaggtgctgcgcaagttggggctgcgccctgggatacatcattcactctttggggacgtgaagaagctcatcactgatgagtttgtgaagcagaagtacctggactatgccagagtccccaatagcaatccccctgaatatgagttcttctggggcctgcgctcttactatgagaccagcaagatgaaagtcctcaagtttgcctgcaaggtacaaaagaaggatcccaaggaatgggcagctcagtaccgagaggcgatggaagcggatttgaaggctgcagctgaggctgcagctgaagccaaggctagggccgagattagagctcgaatgggcattgggctcggctcggagaatgctgccgggccctgcaactgggacgaagctgatatcggaccctgggccaaagcccggatccaggcgggagcagaagctaaagccaaagcccaagagagtggcagtgccagcactggtgccagtaccagtaccaataacagtgccagtgccagtgccagcaccagtggtggcttcagtgctggtgccagcctgaccgccactctcacatttgggctcttcgctggccttggtggagctggtgccagcaccagtggcagctctggtgcctgtggtttctcctacaagtgagattttagatattgttaatcctgccagtctttctcttcaagccagggtgcatcctcagaaacctactcaacacagcactctaggcagccactatcaatcaattgaagttgacactctgcattaaatctatttgccatttctgaaaaaaaaacaaaaaaaaaaaaaaaaaaaaaaaacatgtgtgtgcgggcgcgccctgggcctctggaaaaagctcttccaaaaaccacattcgcgtgtgggcgcgccgccggggcccccagttgggttaggtgtgaaccggggccccatagcgtggtccccaagggaagatcccggggtccaggagacaaaggcggctggggatcctcacacccatttaaaacaagccgccgggggcgacacaggacgcgttccggagaacaacttccagagagggggacgtccagagacgccatcacgcgggttcctacacagacgggagccccacggggacgcccggatatcaaataaggc

SEQ ID NO: 444299 - DNA, 2134 bp, Homo sapiens
agaaagtttcccccacggggcattaatcccgtccagaacccggagccgcccgatcgtagagaaggcagacgcatcccgaactcgctggaggacaaggctcagctcttgccaggccaaattgagacatgtctgacacaagcgagagtggtgcaggtctaactcgcttccaggctgaagcttcagaaaaggacagtagctcgatgatgcagactctgttgacagtgacccagaatgtggaggtcccagagacaccgaaggcctcaaaggcactggaggtctcagaggatgtgaaggtctcaaaagcctctggggtctcaaaggccacagaggtctcaaagaccccagaggctcgggaggcacctgccacccaggcctcatctactactcagctgactgatacccaggttctggcagctgaaaacaagagtctagcagctgacaccaagaaacagaatgctgacccgcaggctgtgacaatgcctgccactgagaccaaaaaggtcagccatgtggctgatacaaaggtcaatacaaaggctcaggagactgaggctgcaccctctcaggccccagcagatgaacctgagcctgagagtgcagctgcccagtctcaggagaatcaggatactcggcccaaggtcaaagccaagaaagcccgaaaggtgaagcatctggatggggaagaggatggcagcagtgatcagagtcaggcttctggaaccacaggtggccgaagggtctcaaaggccctaatggcctcaatggcccgcagggcttcaaggggtcccatagccttttgggcccgcagggcatcaaggactcggttggctgcttgggcccggagagccttgctctccctgagatcacctaaagcccgtaggggcaaggctcgccgtagagctgccaagctccagtcatcccaagagcctgaagcaccaccacctcgggatgtggcccttttgcaagggagggcaaatgatttggtgaagtaccttttggctaaagaccagacgaagattcccatcaagcgctcggacatgctgaaggacatcatcaaagaatacactgatgtgtaccccgaaatcattgaacgagcaggctattccttggagaaggtatttgggattcaattgaaggaaattgataagaatgaccacttgtacattcttctcagcaccttagagcccactgatgcaggcatactgggaacgactaaggactcacccaagctgggtctgctcatggtgcttcttagcatcatcttcatgaatggaaatcggtccagtgaggctgtcatctgggaggtgctgcgcaagttggggctgcgccctgggtatgattgggctctctcagcgcttgctgtccgtgttgtcctttggatacatcattcactctttggggacgtgaagaagctcatcactgatgagtttgtgaagcagaagtacctggactatgccagagtccccaatagcaatccccctgaatatgagttcttctggggcctgcgctcttactatgagaccagcaagatgaaagtcctcaagtttgcctgcaaggtacaaaagaaggatcccaaggaatgggcagctcagtaccgagaggcgatggaagcggatttgaaggctgcagctgaggctgcagctgaagccaaggctagggccgagattagagctcgaatgggcattgggctcggctcggagaatgctgccgggccctgcaactgggacgaagctgatatcggaccctgggccaaagcccggatccaggcgggagcagaagctaaagccaaagcccaagagagtggcagtgccagcactggtgccagtaccagtaccaataacagtgccagtgccagtgccagcaccagtggtggcttcagtgctggtgccagcctgaccgccactctcacatttgggctcttcgctggccttggtggagctggtgccagcaccagtggcagctctggtgcctgtggtttctcctacaagtgagattttagatattgttaatcctgccagtctttctcttcaagccagggtgcatcctcagaaacctactcaacacagcactctaggcagccactatcaatcaattgaagttgacactctgcattaaatctatttgccatttctga

SEQ ID NO: 444300 - DNA, 2279 bp, Homo sapiens
agaaagtttcccccacggggcattaatcccgtccagaacccggagccgcccgatcgtagagaaggcagacgcatcccgaactcgctggaggacaaggctcagctcttgccaggccaaattgagacatgtctgacacaagcgagagtggtgcaggtctaactcgcttccaggctgaagcttcagaaaaggacagtagctcgatgatgcagactctgttgacagtgacccagaatgtggaggtcccagagacaccgaaggcctcaaaggcactggaggtctcagaggatgtgaaggtctcaaaagcctctggggtctcaaaggccacagaggtctcaaagaccccagaggctcgggaggcacctgccacccaggcctcatctactactcagctgactgatacccaggttctggcagctgaaaacaagagtctagcagctgacaccaagaaacagaatgctgacccgcaggctgtgacaatgcctgccactgagaccaaaaaggtcagccatgtggctgatacaaaggtcaatacaaaggctcaggagactgaggctgcaccctctcaggccccagcagatgaacctgagcctgagagtgcagctgcccagtctcaggagaatcaggatactcggcccaaggtcaaagccaagaaagcccgaaaggtgaagcatctggatggggaagaggatggcagcagtgatcagagtcaggcttctggaaccacaggtggccgaagggtctcaaaggccctaatggcctcaatggcccgcagggcttcaaggggtcccatagccttttgggcccgcagggcatcaaggactcggttggctgcttgggcccggagagccttgctctccctgagatcacctaaagcccgtaggggcaaggctcgccgtagagctgccaagctccagtcatcccaagagcctgaagcaccaccacctcgggatgtggcccttttgcaagggagggcaaatgatttggtgaagtaccttttggctaaagaccagacgaagattcccatcaagcgctcggacatgctgaaggacatcatcaaagaatacactgatgtgtaccccgaaatcattgaacgagcaggctattccttggagaaggtatttgggattcaattgaaggaaattgataagaatgaccacttgtacattcttctcagcaccttagagcccactgatgcaggcatactgggaacgactaaggactcacccaagctgggtctgctcatggtgcttcttagcatcatcttcatgaatggaaatcggtccagtgaggctgtcatctgggaggtgctgcgcaagttggggctgcgccctgggatacatcattcactctttggggacgtgaagaagctcatcactgatgagtttgtgaagcagaagtacctggactatgccagagtccccaatagcaatccccctgaatatgagttcttctggggcctgcgctcttactatgagaccagcaagatgaaagtcctcaagtttgcctgcaaggtacaaaagaaggatcccaaggaatgggcagctcagtaccgagaggcgatggaagcggatttgaaggctgcagctgaggctgcagctgaagccaaggctagggccgagattagagctcgaatgggcattgggctcggctcggagaatgctgccgggccctgcaactgggacgaagctgatatcggaccctgggccaaagcccggatccaggcgggagcagaagctaaagccaaagcccaagagagtggcagtgccagcactggtgccagtaccagtaccaataacagtgccagtgccagtgccagcaccagtggtggcttcagtgctggtgccagcctgaccgccactctcacatttgggctcttcgctggccttggtggagctggtgccagcaccagtggcagctctggtgcctgtggtttctcctacaagtgagattttaggtatctgccttggtttcagtggggacatctggggcttatggggctgggatgaggagctggatgattctaggaaggcccaagttggagaatgatgtggagagtgtgccaagacactgcttttggcattttattcctttctgtttgctggatgtcaattgacccttttattttctcttacttgtgttttcagatattgttaatcctgccagtctttctcttcaagccagggtgcatcctcagaaacctactcaacacagcactctaggcagccactatcaatcaattgaagttgacactctgcattaaatctatttgccatttctga

SEQ ID NO: 444301 - DNA, 2032 bp, Homo sapiens
agaaagtttcccccacggggcattaatcccgtccagaacccggagccgcccgatcgtagagaaggcagacgcatcccgaactcgctggaggacaaggctcagctcttgccaggccaaattgagacatgtctgacacaagcgagagtggtgcaggtctaactcgcttccaggctgaagcttcagaaaaggacagtagctcgatgatgcagactctgttgacagtgacccagaatgtggaggtcccagagacaccgaaggcctcaaaggcactggaggtctcaaccccagaggctcgggaggcacctgccacccaggcctcatctactactcagctgactgatacccaggttctggcagctgaaaacaagagtctagcagctgacaccaagaaacagaatgctgacccgcaggctgtgacaatgcctgccactgagaccaaaaaggtcagccatgtggctgatacaaaggtcaatacaaaggctcaggagactgaggctgcaccctctcaggccccagcagatgaacctgagcctgagagtgcagctgcccagtctcaggagaatcaggatactcggcccaaggtcaaagccaagaaagcccgaaaggtgaagcatctggatggggaagaggatggcagcagtgatcagagtcaggcttctggaaccacaggtggccgaagggtctcaaaggccctaatggcctcaatggcccgcagggcttcaaggggtcccatagccttttgggcccgcagggcatcaaggactcggttggctgcttgggcccggagagccttgctctccctgagatcacctaaagcccgtaggggcaaggctcgccgtagagctgccaagctccagtcatcccaagagcctgaagcaccaccacctcgggatgtggcccttttgcaagggagggcaaatgatttggtgaagtaccttttggctaaagaccagacgaagattcccatcaagcgctcggacatgctgaaggacatcatcaaagaatacactgatgtgtaccccgaaatcattgaacgagcaggctattccttggagaaggtatttgggattcaattgaaggaaattgataagaatgaccacttgtacattcttctcagcaccttagagcccactgatgcaggcatactgggaacgactaaggactcacccaagctgggtctgctcatggtgcttcttagcatcatcttcatgaatggaaatcggtccagtgaggctgtcatctgggaggtgctgcgcaagttggggctgcgccctgggatacatcattcactctttggggacgtgaagaagctcatcactgatgagtttgtgaagcagaagtacctggactatgccagagtccccaatagcaatccccctgaatatgagttcttctggggcctgcgctcttactatgagaccagcaagatgaaagtcctcaagtttgcctgcaaggtacaaaagaaggatcccaaggaatgggcagctcagtaccgagaggcgatggaagcggatttgaaggctgcagctgaggctgcagctgaagccaaggctagggccgagattagagctcgaatgggcattgggctcggctcggagaatgctgccgggccctgcaactgggacgaagctgatatcggaccctgggccaaagcccggatccaggcgggagcagaagctaaagccaaagcccaagagagtggcagtgccagcactggtgccagtaccagtaccaataacagtgccagtgccagtgccagcaccagtggtggcttcagtgctggtgccagcctgaccgccactctcacatttgggctcttcgctggccttggtggagctggtgccagcaccagtggcagctctggtgcctgtggtttctcctacaagtgagattttagatattgttaatcctgccagtctttctcttcaagccagggtgcatcctcagaaacctactcaacacagcactctaggcagccactatcaatcaattgaagttgacactctgcattaaatctatttgccatttctga

SEQ ID NO: 444302 - DNA, 2677 bp, Homo sapiens
agaaagtttcccccacggggcattaatcccgtccagaacccggagccgcccgatcgtagagaaggcagacgcatcccgaactcgctggaggacaaggctcagctcttgccaggccaaattgagacatgtctgacacaagcgagagtggtgcaggtctaactcgcttccaggctgaagcttcagaaaaggacagtagctcgatgatgcagactctgttgacagtgacccagaatgtggaggtcccagagacaccgaaggcctcaaaggcactggaggtctcagaggatgtgaaggtctcaaaagcctctggggtctcaaaggccacagaggtctcaaagaccccagaggctcgggaggcacctgccacccaggcctcatctactactcagctgactgatacccaggttctggcagctgaaaacaagagtctagcagctgacaccaagaaacagaatgctgacccgcaggctgtgacaatgcctgccactgagaccaaaaaggtcagccatgtggctgatacaaaggtcaatacaaaggctcaggagactgaggctgcaccctctcaggccccagcagatgaacctgagcctgagagtgcagctgcccagtctcaggagaatcaggatactcggcccaaggtcaaagccaagaaagcccgaaaggtgaagcatctggatggggaagaggatggcagcagtgatcagagtcaggcttctggaaccacaggtggccgaagggtctcaaaggccctaatggcctcaatggcccgcagggcttcaaggggtcccatagccttttgggcccgcagggcatcaaggactcggttggctgcttgggcccggagagccttgctctccctgagatcacctaaagcccgtaggggcaaggctcgccgtagagctgccaagctccagtcatcccaagagcctgaagcaccaccacctcgggatgtggcccttttgcaagggagggcaaatgatttggtgaagtaccttttggctaaagaccagacgaagattcccatcaagcgctcgggtaaagtcctaccaatcctccctctgccctgagctctgccctccattgcccttacaccattgtgctggggatatcccctgctcttatgcttatgtctctgtcctcccaaagttctgatttggcagtgctagcatctctgttgataagcacagaaccgggttatgccacccttggtgtggttggcaaagagtctatagcttgggcatcagggccacctggcatctcttcagtcaggtgctcacaacactctccccttgcagacatgctgaaggacatcatcaaagaatacactgatgtgtaccccgaaatcattgaacgagcaggctattccttggagaaggtatttgggattcaattgaaggaaattgataagaatgaccacttgtacattcttctcagcaccttagagcccactgatgcaggcatactgggaacgactaaggactcacccaagctgggtctgctcatggtgcttcttagcatcatcttcatgaatggaaatcggtccagtgaggctgtcatctgggaggtgctgcgcaagttggggctgcgccctgggtatgattgggctctctcagcgcttgctgtccgtgttgtcctttggcaagagaggacggtcctaggattgcatcagtctggtggtctggtggagcgggtggggtgctggactgggtagagggcccagggttctgacctgggtggatgatgggtgaatggtcctgaactctctggctccctctctcagtgtctcttgggcttctatggagcttccctcttgtgctggaaacctcttttccatcttggaaatgcctctgcccacatctgggaagtgccatagccttgagtgaatttatttgtttatttatttttctttttcttctctcaggatacatcattcactctttggggacgtgaagaagctcatcactgatgagtttgtgaagcagaagtacctggactatgccagagtccccaatagcaatccccctgaatatgagttcttctggggcctgcgctcttactatgagaccagcaagatgaaagtcctcaagtttgcctgcaaggtacaaaagaaggatcccaaggaatgggcagctcagtaccgagaggcgatggaagcggatttgaaggctgcagctgaggctgcagctgaagccaaggctagggccgagattagagctcgaatgggcattgggctcggctcggagaatgctgccgggccctgcaactgggacgaagctgatatcggaccctgggccaaagcccggatccaggcgggagcagaagctaaagccaaagcccaagagagtggcagtgccagcactggtgccagtaccagtaccaataacagtgccagtgccagtgccagcaccagtggtggcttcagtgctggtgccagcctgaccgccactctcacatttgggctcttcgctggccttggtggagctggtgccagcaccagtggcagctctggtgcctgtggtttctcctacaagtgagattttagatattgttaatcctgccagtctttctcttcaagccagggtgcatcctcagaaacctactcaacacagcactctaggcagccactatcaatcaattgaagttgacactctgcattaaatctatttgccatttctga

SEQ ID NO: 444303 - DNA, 1693 bp, Homo sapiens
agaaagtttcccccacggggcattaatcccgtccagaacccggagccgcccgatcgtagagaaggcagacgcatcccgaactcgctggaggacaaggctcagctcttgccaggccaaattgagacatgtctgacacaagcgagagtggtgcaggtctaactcgcttccaggccccagcagatgaacctgagcctgagagtgcagctgcccagtctcaggagaatcaggatactcggcccaaggtcaaagccaagaaagcccgaaaggtgaagcatctggatggggaagaggatggcagcagtgatcagagtcaggcttctggaaccacaggtggccgaagggtctcaaaggccctaatggcctcaatggcccgcagggcttcaaggggtcccatagccttttgggcccgcagggcatcaaggactcggttggctgcttgggcccggagagccttgctctccctgagatcacctaaagcccgtaggggcaaggctcgccgtagagctgccaagctccagtcatcccaagagcctgaagcaccaccacctcgggatgtggcccttttgcaagggagggcaaatgatttggtgaagtaccttttggctaaagaccagacgaagattcccatcaagcgctcggacatgctgaaggacatcatcaaagaatacactgatgtgtaccccgaaatcattgaacgagcaggctattccttggagaaggtatttgggattcaattgaaggaaattgataagaatgaccacttgtacattcttctcagcaccttagagcccactgatgcaggcatactgggaacgactaaggactcacccaagctgggtctgctcatggtgcttcttagcatcatcttcatgaatggaaatcggtccagtgaggctgtcatctgggaggtgctgcgcaagttggggctgcgccctgggatacatcattcactctttggggacgtgaagaagctcatcactgatgagtttgtgaagcagaagtacctggactatgccagagtccccaatagcaatccccctgaatatgagttcttctggggcctgcgctcttactatgagaccagcaagatgaaagtcctcaagtttgcctgcaaggtacaaaagaaggatcccaaggaatgggcagctcagtaccgagaggcgatggaagcggatttgaaggctgcagctgaggctgcagctgaagccaaggctagggccgagattagagctcgaatgggcattgggctcggctcggagaatgctgccgggccctgcaactgggacgaagctgatatcggaccctgggccaaagcccggatccaggcgggagcagaagctaaagccaaagcccaagagagtggcagtgccagcactggtgccagtaccagtaccaataacagtgccagtgccagtgccagcaccagtggtggcttcagtgctggtgccagcctgaccgccactctcacatttgggctcttcgctggccttggtggagctggtgccagcaccagtggcagctctggtgcctgtggtttctcctacaagtgagattttagatattgttaatcctgccagtctttctcttcaagccagggtgcatcctcagaaacctactcaacacagcactctaggcagccactatcaatcaattgaagttgacactctgcattaaatctatttgccatttctga

SEQ ID NO: 444304 - DNA, 1950 bp, Homo sapiens
agaaagtttcccccacggggcattaatcccgtccagaacccggagccgcccgatcgtagagaaggcagacgcatcccgaactcgctggaggacaaggctcagctcttgccaggccaaattgagacatgtctgacacaagcgagagtggtgcaggtctaactcgcttccaggctgaagcttcagaaaaggacagtagctcgatgatgcagactctgttgacagtgacccagaatgtggaggtcccagagacaccgaaggcctcaaaggcactggaggtctcagaggatgtgaaggtctcaaaagcctctggggtctcaaaggccacagaggtctcaaagaccccagaggctcgggaggcacctgccacccaggcctcatctactactcagctgactgatacccaggttctggcagctgaaaacaagagtctagcagctgacaccaagaaacagaatgctgacccgcaggctgtgacaatgcctgccactgagaccaaaaaggtcagccatgtggctgatacaaaggtcaatacaaaggctcaggagactgaggctgcaccctctcaggccccagcagatgaacctgagcctgagagtgcagctgcccagtctcaggagaatcaggatactcggcccaaggtcaaagccaagaaagcccgaaaggtgaagcatctggatggggaagaggatggcagcagtgatcagagtcaggcttctggaaccacaggtggccgaagggtctcaaaggccctaatggcctcaatggcccgcagggcttcaaggggtcccatagccttttgggcccgcagggcatcaaggactcggttggctgcttgggcccggagagccttgctctccctgagatcacctaaagcccgtaggggcaaggctcgccgtagagctgccaagctccagtcatcccaagagcctgaagcaccaccacctcgggatgtggcccttttgcaagggagggcaaatgatttggtgaagtaccttttggctaaagaccagacgaagattcccatcaagcgctcggacatgctgaaggacatcatcaaagaatacactgatgtgtaccccgaaatcattgaacgagcaggctattccttggagaaggtatttgggattcaattgaaggaaattgataagaatgaccacttgtacattcttctcagcaccttagagcccactgatgcaggcatactgggaacgactaaggactcacccaagctgggtctgctcatggtgcttcttagcatcatcttcatgaatggaaatcggtccagtgaggctgtcatctgggaggtgctgcgcaagttggggctgcgccctgggatacatcattcactctttggggacgtgaagaagctcatcactgatgagtttgtgaagcagaagtacctggactatgccagagtccccaatagcaatccccctgaatatgagttcttctggggcctgcgctcttactatgagaccagcaagatgaaagtcctcaagtttgcctgcaaggtacaaaagaaggatcccaaggaatgggcagctcagtaccgagaggcgatggaagcggatttgaaggctgcagctgaggctgcagctgaagccaaggctagggccgagattagagctcgaatgggcattgggctcggctcggagaatgctgccgggccctgcaactgggacgaagctgatatcggaccctgggccaaagcccggatccaggcgggagcagaagctaaagccaaagcccaagagagtggcagtgcaccagtggcagctctggtgcctgtggtttctcctacaagtgagattttagatattgttaatcctgccagtctttctcttcaagccagggtgcatcctcagaaacctactcaacacagcactctaggcagccactatcaatcaattgaagttgacactctgcattaaatctatttgccatttctga

SEQ ID NO: 444305 - DNA, 1408 bp, Homo sapiens
gtagcctacaccactttgtcaaaggactcttccatcagagatgggaaaaccattggggaggactaggacccatatgggaattattacctctcaggcccgagaggacagaatggatataatctgaatcctgttaaattttctctaaactgtttcttagctgcactgtttatggaaataccaggaccagtttatgtttgtgcttttgggtactacgctttggcatgcccaagcgtagatcccaagagcctgaagcaccaccacctcgggatgtggcccttttgcaagggagggcaaatgatttggtgaagtaccttttggctaaagaccagacgaagattcccatcaagcgctcggacatgctgaaggacatcatcaaagaatacactgatgtgtaccccgaaatcattgaacgagcaggctattccttggagaaggtatttgggattcaattgaaggaaattgataagaatgaccacttgtacattcttctcagcaccttagagcccactgatgcaggcatactgggaacgactaaggactcacccaagctgggtctgctcatggtgcttcttagcatcatcttcatgaatggaaatcggtccagtgaggctgtcatctgggaggtgctgcgcaagttggggctgcgccctgggatacatcattcactctttggggacgtgaagaagctcatcactgatgagtttgtgaagcagaagtacctggactatgccagagtccccaatagcaatccccctgaatatgagttcttctggggcctgcgctcttactatgagaccagcaagatgaaagtcctcaagtttgcctgcaaggtacaaaagaaggatcccaaggaatgggcagctcagtaccgagaggcgatggaagcggatttgaaggctgcagctgaggctgcagctgaagccaaggctagggccgagattagagctcgaatgggcattgggctcggctcggagaatgctgccgggccctgcaactgggacgaagctgatatcggaccctgggccaaagcccggatccaggcgggagcagaagctaaagccaaagcccaagagagtggcagtgccagcactggtgccagtaccagtaccaataacagtgccagtgccagtgccagcaccagtggtggcttcagtgctggtgccagcctgaccgccactctcacatttgggctcttcgctggccttggtggagctggtgccagcaccagtggcagctctggtgcctgtggtttctcctacaagtgagattttagatattgttaatcctgccagtctttctcttcaagccagggtgcatcctcagaaacctactcaacacagcactctaggcagccactatcaatcaattgaagttgacactctgcattaaatctatttgccatttctga

SEQ ID NO: 444306 - DNA, 1894 bp, Homo sapiens
  misc_feature (1607)..(1607): n is a, c, g, or t
agaaagtttcccccacggggcattaatcccgtccagaacccggagccgcccgatcgtagagaaggcagacgcatcccgaactcgctggaggacaaggctcagctcttgccaggccaaattgagacatgtctgacacaagcgagagtggtgcaggtctaactcgcttccaggctgaagcttcagaaaaggacagtagctcgatgatgcagactctgttgacagtgacccagaatgtggaggtcccagagacaccgaaggcctcaaaggcactggaggtctcagaggatgtgaaggtctcaaaagcctctggggtctcaaaggccacagaggtctcaaagaccccagaggctcgggaggcacctgccacccaggcctcatctactactcagctgactgatacccaggttctggcagctgaaaacaagagtctagcagctgacaccaagaaacagaatgctgacccgcaggctgtgacaatgcctgccactgagaccaaaaaggtcagccatgtggctgatacaaaggtcaatacaaaggctcaggagactgaggctgcaccctctcaggccccagcagatgaacctgagcctgagagtgcagctgcccagtctcaggagaatcaggatactcggcccaaggtcaaagccaagaaagcccgaaaggtgaagcatctggatggggaagaggatggcagcagtgatcagagtcaggcttctggaaccacaggtggccgaagggtctcaaaggccctaatggcctcaatggcccgcagggcttcaaggggtcccatagccttttgggcccgcagggcatcaaggactcggttggctgcttgggcccggagagccttgctctccctgagatcacctaaagcccgtaggggcaaggctcgccgtagagctgccaagctccagtcatcccaagagcctgaagcaccaccacctcgggatgtggcccttttgcaagggagggcaaatgatttggtgaagtaccttttggctaaagaccagacgaagattcccatcaagcgctcggacatgctgaaggacatcatcaaagaatacactgatgtgtaccccgaaatcattgaacgagcaggctattccttggagaaggtatttgggattcaattgaaggaaattgataagaatgaccacttgtacattcttctcagcaccttagagcccactgatgcaggcatactgggaacgactaaggactcacccaagctgggtctgctcatggtgcttcttagcatcatcttcatgaatggaaatcggtccagtgaggctgtcatctgggaggtgctgcgcaagttggggctgcgccctgggatacatcattcactctttggggacgtgaagaagctcatcactgatgagtttgtgaagcagaagtacctggactatgccagagtccccaatagcaatccccctgaatatgagttcttctggggcctgcgctcttactatgagaccagcaagatgaagtaccttttggctaaagaccagacgaagattcccatcaagcgctcggacatgctgaaggacatcatcaaagaatacactgatgtgtaccccgaaatcattgaacgagcaggctattcnttggagaaggtatttgggattcaattgaaggaaattgataagaatgaccacttgtacattcttctcagcaccttagagcccactgatgcaggcatactgggaacgactaaggactcacccaagctgggtctgctcatggtgcttcttagcatcatcttcatgaatggaaatcggtccagtgaggctgtcatctgggactcagaaacctactcaacacagcactctaggcagccactatcaatcaattgaagttgacactctgcattaaatctatttgccatttctga

SEQ ID NO: 444307 - DNA, 1676 bp, Homo sapiens
agaaagtttcccccacggggcattaatcccgtccagaacccggagccgcccgatcgtagagaaggcagacgcatcccgaactcgctggaggacaaggctcagctcttgccaggccaaattgagacatgtctgacacaagcgagagtggtgcaggtctaactcgcttccaggctgaagcttcagaaaaggacagtagctcgatgatgcagactctgttgacagtgacccagaatgtggaggtcccagagacaccgaaggcctcaaaggcactggaggtctcagaggatgtgaaggtctcaaaagcctctggggtctcaaaggccacagaggtctcaaagaccccagaggctcgggaggcacctgccacccaggcctcatctactactcagctgactgatacccaggttctggcagctgaaaacaagagtctagcagctgacaccaagaaacagaatgctgacccgcaggctgtgacaatgcctgccactgagaccaaaaaggtcagccatgtggctgatacaaaggtcaatacaaaggctcaggagactgaggctgcaccctctcaggccccagcagatgaacctgagcctgagagtgcagctgcccagtctcaggagaatcaggatactcggcccaaggtcaaagccaagaaagcccgaaaggtgaagcatctggatggggaagaggatggcagcagtgatcagagtcaggcttctggaaccacaggtggccgaagggtctcaaaggccctaatggcctcaatggcccgcagggcttcaaggggtcccatagccttttgggcccgcagggcatcaaggactcggttggctgcttgggcccggagagccttgctctccctgagatcacctaaagcccgtaggggcaaggctcgccgtagagctgccaagctccagtcatcccaagagcctgaagcaccaccacctcgggatgtggcccttttgcaagggagggcaaatgatttggtgaagtaccttttggctaaagaccagacgaagattcccatcaagcgctcggacatgctgaaggacatcatcaaagaatacactgatgtgtaccccgaaatcattgaacgagcaggctattccttggagaaggcatatagcgctttcgacgacaaggtacttggagacttcaattgacaggacaacgtggaataaaagacaatgaacacatttggtacaaattaatataataaaagagaacatatactaagcacgacgcagaattgcaagaggaactagctggggacaacagaagaaaacagcgacacccgacgaccaaaagcacagagagcacatgcacccaagtgcgagaaagacaaaaagaggaatcacaagatgcgagtggcacaagagaaaaaaccggacaaccagcaagagggacacgacacacgagaagaaaaagaagacgcgaagcacaaaagacataggacgggccaacgagacacacataagcaggaacacaccccctgaacctagccaacaacacgacaagcacagcaagcggcagaaaaggcaacgaccacccagtacacgagagaaggaccgaaaaagaggaagaaaaagcacaaacacagccacaccatgggaaacaaacaaacccagagaaccaccccccagcaaacaccaacaaacacgaacaatgggacaacaaag

SEQ ID NO: 444308 - DNA, 1050 bp, Homo sapiens
agaaagtttcccccacggggcattaatcccgtccagaacccggagccgcccgatcgtagagaaggcagacgcatcccgaactcgctggaggacaaggctcagctcttgccaggccaaattgagacatgtctgacacaagcgagagtggtgcaggtctaactcgcttccaggctgaagcttcagaaaaggacagtagctcgatgatgcagactctgttgacagtgacccagaatgtggaggtcccagagacaccgaaggcctcaaaggcactggaggtctcagaggatgtgaaggtctcaaaagcctctggggtctcaaaggccacagaggtctcaaagaccccagaggctcgggaggcacctgccacccaggcctcatctactactcagctgactgatacccaggttctggcagctgaaaacaagagtctagcagctgacaccaagaaacagaatgctgacccgcaggctgtgacaatgcctgccactgagaccaaaaaggtcagccatgtggctgatacaaaggtcaatacaaaggctcaggagactgaggctgcaccctctcaggccccagcagatgaacctgagcctgagagtgcagctgcccagtctcaggagaatcaggatactcggcccaaggtcaaagccaagaaagcccgaaaggtgaagcatctggatggggaagaggatggcagcagtgatcagagtcaggcttctggaaccacaggtggccgaagggtctcaaaggccctaatggcctcaatggcccgcagggcttcaaggggtcccatagccttttgggcccgcagggcatcaaggactcggttggctgcttgggcccggagagccttgctctccctgagatcacctaaagcccgtaggggcaaggctcgccgtagagctgccaagctccagtcatcccaagagcctgaagcaccaccacctcggggtgggcttgagggggcacgctgggcgcctggtaaacaacaaatcacaaggcggaggaagagcaaaaagggggcaaaagagagacacaagggacggagaacac

SEQ ID NO: 444309 - DNA, 781 bp, Homo sapiens
agaaagtttcccccacggggcattaatcccgtccagaacccggagccgcccgatcgtagagaaggcagacgcatcccgaactcgctggaggacaaggctcagctcttgccaggccaaattgagacatgtctgacacaagcgagagtggtgcaggtctaactcgcttccaggctgaagcttcagaaaaggacagtagctcgatgatgcagactctgttgacagtgacccagaatgtggaggtcccagagacaccgaaggcctcaaaggcactggaggtctcagaggatgtgaaggtctcaaaagcctctggggtctcaaaggccacagaggtctcaaagaccccagaggctcgggaggcacctgccacccaggcctcatctactactcagctgactgatacccaggttctggcagctgaaaacaagagtctagcagctgacaccaagaaacagaatgctgacccgcaggctgtgacaatgcctgccactgagaccaaaaaggtcagccatgtggctgatacaaaggtcaatacaaaggctcaggagactgaggctgcaccctctcaggccccagcagatgaacctgagcctgagagtgcagctgcccagtctcaggagaatcaggatactcggcccaaggtcaaagccaagaaagcccgaaagggggaagctctggatggggagaggatggagcgtgatcagagcaagctctggaacacaggggccacggtgccaaggcgaagggcaaggcgccgggaggggcgccacctgccggcgagcgg

SEQ ID NO: 444310 - DNA, 4390 bp, Homo sapiens
ggcgacagggtcgaggcacccggcccgggctccccactggcgcgcccgcagcggcgctctatttttagcaggcgctgtggcaatataaggaatgcgcggcgcgctaggcgctcggggcgcacgctggcggcgcggtcgctttaaggaggcgccggggcggggacggaccggagtggccggctggcggggagccgtcagtccggcggccgcggggcccggcgggcgcgacgctgcctcctcaccggcgcaggctaggagggggcggcctgagtgccgtagccgagccggggctggagcgcgcggtctgacctacgagaaacatggcaaccagcgccgtccccagtgacaacctccccacatacaagctggtggtggtgggggatgggggtgtgggcaaaagtgccctcaccatccagtttttccagaagatctttgtgcctgactatgaccccaccattgaagactcctacctgaaacatacggagattgacaatcaatgggccatcttggacgttctggacacagctgggcaggaggaattcagcgccatgcgggagcaatacatgcgcacgggggatggcttcctcatcgtctactccgtcactgacaaggccagctttgagcacgtggaccgcttccaccagcttatcctgcgcgtcaaagacagggagtcattcccgatgatcctcgtggccaacaaggtcgatttgatgcacttgaggaagatcaccagggagcaaggaaaagaaatggcgaccaaacacaatattccgtacatagaaaccagtgccaaggacccacctctcaatgtcgacaaagccttccatgacctcgttagagtaattaggcaacagattccggaaaaaagccagaagaagaagaagaaaaccaaatggcggggagaccgggccacaggcacccacaaactgcaatgtgtgatcttgtgacaggcctgaggccctgggcacagtgacggtggcctggccagccctcgggacccctccccacctaactgcactgaaaccatttctaaccacaacccttggcccaaggacttggtacaggaagggagaagggcaggtgggcagggagcagacagggtctggctttgcccagagggcacgggctttcccacctctcaaagagacaaggaagccacctgtaagcagaagcagcatccaagtgcccctggcccccccatgtgttgattcaacccggttcctccccctctctcggtgggtgtgttgtttattgtaactacatagtgttggtttgatgtggaagtgtttatccacatacaaagtacaaaacaagccatgaacaagcttctttcccttaccccccatccacaatgtctgagcttggatgtcttttatagatttttaaattattttagtgattattattttattaaaggggtctgggctcactgcctggtgaagtttcaagtgttcagcagacctctctggtaacatatctggaatattgttgttgttttttaaccgagttttcccatcagtgccaaaactcaactcaatctgaaagtagagtgtctgagaggacagaaggtaatgggaactgtagctggaggcctcaggccatgggtcaaacctgggagggaaagagaccctacacatggcctagaaatgagagaagagagaggtatttacccagaggattttcctatggttggggatgcaaatattagaaaacagattgtattttgctgaggggagtggctgtcatgagcatgtcagttctaaaaggggttttcattatcctggaaatgtataaactaaagtaagctgattggctttgcaaacatgttcatttgtttttcagacagtatgggttaagttctctgccctccccaggggtctgaggaggctctgggtttctcagatctgtctcttgctgcgttttcacatcagctgtgctgcttggtgcctctctgatacgaatacactgacacgtcaaagtaacctaatgtggacaccatccagaaaactccagttcatgctggatcttaaccaaaaatgattcaatactgttatcactaaaacagcaccaagacctgaagccatcttcccttggagtcaactgactaccacctctataagcctagtcaatgagcagaccccttccagtatttgtaaaagtagtactaggttgcctttttggcaatttttattgacctgttgaatcttgactataaaatgatctgagaagtaaggaaggctgggctgatgtgtggctctcatataccttctgcaagggggcagtctccccagctccctgatgatgctcacccccgcccccccacctcaggtgctgctggtgtgagccaaagactggagtttttccagctggggtgggagtggagagacaacaggaacaacgctgcaccaaagaaaaggtcagaataaaaggcagcacagctggtgaccttattttctagatgttacaaatcaggtcactatgcaaactagaatatcctcagcaggtggcctggccactctggagaaagaaacccaaggaaagtgagcacccaactggatgccaagacacccgggttctgaaaatgtgctgtgttcctacctcggcaagatcaccagcactgaggggcccagctggagaatgattctgctacaaaaggagacagttgagacttttgcttgttggaaatcaaacttcttatttgtctaaattgcccctttttctgttcctaaaaggaaggataagagagaacattccaggtgaggcacttcaaagtttccttagaccctatagtgttaagaggtattttaaacactaaaaggacaaagctcttcccaatccttatgcttccctaagtggtatctgcagcagtttgttgtgtgcagtttgatggcagctgcaaactggaggtgaggcggaggaaaggcaggtaggaaggagtaaggatggagatgctcagaatcaagagcatggcggagtaggagaagaagccctgcacacagggcagtgtccacagccagaaaactcctgctgggcaccaaccactacgagcataccccatgcccaccgtggagctgcaactcctcgacagcactgagtttgatagtctcactggaagcagatcagctgatgtagaacagagacctcggccataaaggtgagaagacatagggatttcaaccacacagttgggacagaagggacagtgcatctgttcatccatcctgcacttggcccacgttgaactccatggtgcctgagagagactagttaagggttggtcttctgtatcctctgctgttgagcctctggtaagctttcatctcccatgaactcatttccccataaatgaaatgggtaaataatgccccatttgtagaagtgggccctcatgactgaggtagcttccagataggccagagtagagtgtagagtgtgccccgtgacatccctccatcttctcctccattatcatctagcagggtcagactgggaaacctggttggccacgccacaccatgaccgaggagccaactgggacttctggctgtttgacatcctcatgttcccgttggtcttccggagaatagtgctaccctcacatcccctggagcacagccttcctgaaatgccctcaccccatgcctttgccattgtgtgctctcagatttcttccactgtttgacaccctccttagagggctgctcttttttttccagagataatcctagccatcctctccactcccacggctggggacaatggccacttactacctgtgcactttgccactcgggacacctggatggtttctcttaggactttgcccacctccttctcatggcacttgctgtggaaaatgcctggctggcctcgtggggcctgtctcacttttccaggagacatgacccactaacgtggcaactttaacccaaaggcccctcagacatgttacagcaaatctggagccacagacaggttccctccattggcagcccattgtgtttgaaattccatgtcgggtttacttggaatgaaagatacttgaattattgtgcgcctgtgagcgcccagcttctgtttcatagtcttaacaggtggccattgtcgtgaaacgagtgatgcctgaagatctcagtgatgtttgaaccttctgtgtaactttttattaagtctttgtatctctcgactgattaataaagaagagaaacacgaaaaaaaaacacacacacgaagcgacaaaagaacaaaaaaaggaggggggggccaaaaaacccccggggggcatacgagagcaccctttttggaaagggcgcccaggggcgtaaaaaaagggggccggaaacgggggggaaaccgggccggggcccccgggggggggacaccgaaacgg

SEQ ID NO: 444311 - DNA, 4609 bp, Homo sapiens
ggcgacagggtcgaggcacccggcccgggctccccactggcgcgcccgcagcggcgctctatttttagcaggcgctgtggcaatataaggaatgcgcggcgcgctaggcgctcggggcgcacgctggcggcgcggtcgctttaaggaggcgccggggcggggacggaccggagtggccggctggcggggagccgtcagtccggcggccgcggggcccggcgggcgcgacgctgcctcctcaccggcgcaggctaggagggggcggcctgagtgccgtagccgagccggggctggagcgcgcggtctgacctacgagaaacatggcaaccagcgccgtccccagtgacaacctccccacatacaagctggtggtggtgggggatgggggtgtgggcaaaagtgccctcaccatccagtttttccagaagatctttgtgcctgactatgaccccaccattgaagactcctacctgaaacatacggagattgacaatcaatgggccatcttggacgttctggacacagctgggcaggaggaattcagcgccatgcgggagcaatacatgcgcacgggggatggcttcctcatcgtctactccgtcactgacaaggccagctttgagcacgtggaccgcttccaccagcttatcctgcgcgtcaaagacagggagtcattcccgatgatcctcgtggccaacaaggtcgatttgatgcacttgaggaagatcaccagggagcaaggaaaagaaatggcgaccaaacacaatattccgtacatagaaaccagtgccaaggacccacctctcaatgtcgacaaagccttccatgacctcgttagagtaattaggcaacagattccggaaaaaagccagaagaagaagaagaaaaccaaatggcggggagaccgggccacaggcacccacaaactgcaatgtgtgatcttgtgacaggcctgaggccctgggcacagtgacggtggcctggccagccctcgggacccctccccacctaactgcactgaaaccatttctaaccacaacccttggcccaaggacttggtacaggaagggagaagggcaggtgggcagggagcagacagggtctggctttgcccagagggcacgggctttcccacctctcaaagagacaaggaagccacctgtaagcagaagcagcatccaagtgcccctggcccccccatgtgttgattcaacccggttcctccccctctctcggtgggtgtgttgtttattgtaactacatagtgttggtttgatgtggaagtgtttatccacatacaaagtacaaaacaagccatgaacaagcttctttcccttaccccccatccacaatgtctgagcttggatgtcttttatagatttttaaattattttagtgattattattttattaaaggggtctgggctcactgcctggtgaagtttcaagtgttcagcagacctctctggtaacatatctggaatattgttgttgttttttaaccgagttttcccatcagtgccaaaactcaactcaatctgaaagtagagtgtctgagaggacagaaggtaatgggaactgtagctggaggcctcaggccatgggtcaaacctgggagggaaagagaccctacacatggcctagaaatgagagaagagagaggtatttacccagaggattttcctatggttggggatgcaaatattagaaaacagattgtattttgctgaggggagtggctgtcatgagcatgtcagttctaaaaggggttttcattatcctggaaatgtataaactaaagtaagctgattggctttgcaaacatgttcatttgtttttcagacagtatgggttaagttctctgccctccccaggggtctgaggaggctctgggtttctcagatctgtctcttgctgcgttttcacatcagctgtgctgcttggtgcctctctgatacgaatacactgacacgtcaaagtaacctaatgtggacaccatccagaaaactccagttcatgctggatcttaaccaaaaatgattcaatactgttatcactaaaacagcaccaagacctgaagccatcttcccttggagtcaactgactaccacctctataagcctagtcaatgagcagaccccttccagtatttgtaaaagtagtactaggttgcctttttggcaatttttattgacctgttgaatcttgactataaaatgatctgagaagtaaggaaggctgggctgatgtgtggctctcatataccttctgcaagggggcagtctccccagctccctgatgatgctcacccccgcccccccacctcaggtgctgctggtgtgagccaaagactggagtttttccagctggggtgggagtggagagacaacaggaacaacgctgcaccaaagaaaaggtcagaataaaaggcagcacagctggtgaccttattttctagatgttacaaatcaggtcactatgcaaactagaatatcctcagcaggtggcctggccactctggagaaagaaacccaaggaaagtgagcacccaactggatgccaagacacccgggttctgaaaatgtgctgtgttcctacctcggcaagatcaccagcactgaggggcccagctggagaatgattctgctacaaaaggagacagttgagacttttgcttgttggaaatcaaacttcttatttgtctaaattgcccctttttctgttcctaaaaggaaggataagagagaacattccaggtgaggcacttcaaagtttccttagaccctatagtgttaagaggtattttaaacactaaaaggacaaagctcttcccaatccttatgcttccctaagtggtatctgcagcagtttgttgtgtgcagtttgatggcagctgcaaactggaggtgaggcggaggaaaggcaggtaggaaggagtaaggatggagatgctcagaatcaagagcatggcggagtaggagaagaagccctgcacacagggcagtgtccacagccagaaaactcctgctgggcaccaaccactacgagcataccccatgcccaccgtggagctgcaactcctcgacagcactgagtttgatagtctcactggaagcagatcagctgatgtagaacagagacctcggccataaaggtgagaagacatagggatttcaaccacacagttgggacagaagggacagtgcatctgttcatccatcctgcacttggcccacgttgaactccatggtgcctgagagagactagttaagggttggtcttctgtatcctctgctgttgagcctctggtaagctttcatctcccatgaactcatttccccataaatgaaatgggtaaataatgccccatttgtagaagtgggccctcatgactgaggtagcttccagataggccagagtagagtgtagagtgtgccccgtgacatccctccatcttctcctccattatcatctagcagggtcagactgggaaacctggttggccacgccacaccatgaccgaggagccaactgggacttctggctgtttgacatcctcatgttcccgttggtcttccggagaatagtgctaccctcacatcccctggagcacagccttcctgaaatgccctcaccccatgcctttgccattgtgtgctctcagatttcttccactgtttgacaccctccttagagggctgctcttttttttccagagataatcctagccatcctctccactcccacggctggggacaatggccacttactacctgtgcactttgccactcgggacacctggatggtttctcttaggactttgcccacctccttctcatggcacttgctgtggaaaatgcctggctggcctcgtggggcctgtctcacttttccaggagacatgacccactaacgtggcaactttaacccaaaggcccctcagacatgttacagcaaatctggagccacagacaggttccctccattggcagcccattgtgtttgaaattccatgtcgggtttacttggaatgaaagatacttgaattattgtgcgcctgtgagcgcccagcttctgtttcatagtcttaacaggtggccattgtcgtgaaacgagtgatgcctgaagatctcagtgatgtttgaaccttctgtgtaactttttattaagtctttgtatctctcgactgattaataaagaagagaaacacgacgtatctgtcttagttccttttactccagtattcctgaagttttgctgagaacattgtgagttgttggtgttttgcccagaacatccacgtcttacagagcatgaccttggtgctaaccagatctgaagtaaggaggagcccactggtggccgtggggtgtctccttcctgcatggagctggaggatgaaggcaggctagcacagcatttagaggcactacctcttgatactgggcagatctggattttagccctactaccgacctttgtatgcctttgggcaaatgacctgccttagtcttgagctgccttgcctgtgaatgggacactaatgtgcacttcaaagtagctggaggactaaagctaatgtaggagtgtggtgaggagcccagaaaca

SEQ ID NO: 444312 - DNA, 4589 bp, Homo sapiens
tcaggcgattcacccgcctcggcctcccaaagtgttaggattacaggcgtgagccaccgcgcccggcttgaattgtacacttcaaaaggtggaattttatggtgttgaattatatctttatttttttaacggggggaaaatgacgccgctggagaggagttagcggaactgaaacaatgaaatggtgcgcgagtgtcgcctgtccccgtcgcatccatcccaacgaagtttgggccctggaacggtgcacccagaaggcctgcggggagagacgctggggcatgatctggaagaaagacgtctcaggattcgaagggaatgcagctaaggtggcggcggaggttcgcctaggactggggaggcgtccctaggctcagaagttggcccggccggagcggagatttaaaggttggagcgcagaggctcttaaagaggccgagtcgaattcccactcggcgtccaccttaaagccagctccccggcaccacggatctgacccgggtctgacctacgagaaacatggcaaccagcgccgtccccagtgacaacctccccacatacaagctggtggtggtgggggatgggggtgtgggcaaaagtgccctcaccatccagtttttccagaagatctttgtgcctgactatgaccccaccattgaagactcctacctgaaacatacggagattgacaatcaatgggccatcttggacgttctggacacagctgggcaggaggaattcagcgccatgcgggagcaatacatgcgcacgggggatggcttcctcatcgtctactccgtcactgacaaggccagctttgagcacgtggaccgcttccaccagcttatcctgcgcgtcaaagacagggagtcattcccgatgatcctcgtggccaacaaggtcgatttgatgcacttgaggaagatcaccagggagcaaggaaaagaaatggcgaccaaacacaatattccgtacatagaaaccagtgccaaggacccacctctcaatgtcgacaaagccttccatgacctcgttagagtaattaggcaacagattccggaaaaaagccagaagaagaagaagaaaaccaaatggcggggagaccgggccacaggcacccacaaactgcaatgtgtgatcttgtgacaggcctgaggccctgggcacagtgacggtggcctggccagccctcgggacccctccccacctaactgcactgaaaccatttctaaccacaacccttggcccaaggacttggtacaggaagggagaagggcaggtgggcagggagcagacagggtctggctttgcccagagggcacgggctttcccacctctcaaagagacaaggaagccacctgtaagcagaagcagcatccaagtgcccctggcccccccatgtgttgattcaacccggttcctccccctctctcggtgggtgtgttgtttattgtaactacatagtgttggtttgatgtggaagtgtttatccacatacaaagtacaaaacaagccatgaacaagcttctttcccttaccccccatccacaatgtctgagcttggatgtcttttatagatttttaaattattttagtgattattattttattaaaggggtctgggctcactgcctggtgaagtttcaagtgttcagcagacctctctggtaacatatctggaatattgttgttgttttttaaccgagttttcccatcagtgccaaaactcaactcaatctgaaagtagagtgtctgagaggacagaaggtaatgggaactgtagctggaggcctcaggccatgggtcaaacctgggagggaaagagaccctacacatggcctagaaatgagagaagagagaggtatttacccagaggattttcctatggttggggatgcaaatattagaaaacagattgtattttgctgaggggagtggctgtcatgagcatgtcagttctaaaaggggttttcattatcctggaaatgtataaactaaagtaagctgattggctttgcaaacatgttcatttgtttttcagacagtatgggttaagttctctgccctccccaggggtctgaggaggctctgggtttctcagatctgtctcttgctgcgttttcacatcagctgtgctgcttggtgcctctctgatacgaatacactgacacgtcaaagtaacctaatgtggacaccatccagaaaactccagttcatgctggatcttaaccaaaaatgattcaatactgttatcactaaaacagcaccaagacctgaagccatcttcccttggagtcaactgactaccacctctataagcctagtcaatgagcagaccccttccagtatttgtaaaagtagtactaggttgcctttttggcaatttttattgacctgttgaatcttgactataaaatgatctgagaagtaaggaaggctgggctgatgtgtggctctcatataccttctgcaagggggcagtctccccagctccctgatgatgctcacccccgcccccccacctcaggtgctgctggtgtgagccaaagactggagtttttccagctggggtgggagtggagagacaacaggaacaacgctgcaccaaagaaaaggtcagaataaaaggcagcacagctggtgaccttattttctagatgttacaaatcaggtcactatgcaaactagaatatcctcagcaggtggcctggccactctggagaaagaaacccaaggaaagtgagcacccaactggatgccaagacacccgggttctgaaaatgtgctgtgttcctacctcggcaagatcaccagcactgaggggcccagctggagaatgattctgctacaaaaggagacagttgagacttttgcttgttggaaatcaaacttcttatttgtctaaattgcccctttttctgttcctaaaaggaaggataagagagaacattccaggtgaggcacttcaaagtttccttagaccctatagtgttaagaggtattttaaacactaaaaggacaaagctcttcccaatccttatgcttccctaagtggtatctgcagcagtttgttgtgtgcagtttgatggcagctgcaaactggaggtgaggcggaggaaaggcaggtaggaaggagtaaggatggagatgctcagaatcaagagcatggcggagtaggagaagaagccctgcacacagggcagtgtccacagccagaaaactcctgctgggcaccaaccactacgagcataccccatgcccaccgtggagctgcaactcctcgacagcactgagtttgatagtctcactggaagcagatcagctgatgtagaacagagacctcggccataaaggtgagaagacatagggatttcaaccacacagttgggacagaagggacagtgcatctgttcatccatcctgcacttggcccacgttgaactccatggtgcctgagagagactagttaagggttggtcttctgtatcctctgctgttgagcctctggtaagctttcatctcccatgaactcatttccccataaatgaaatgggtaaataatgccccatttgtagaagtgggccctcatgactgaggtagcttccagataggccagagtagagtgtagagtgtgccccgtgacatccctccatcttctcctccattatcatctagcagggtcagactgggaaacctggttggccacgccacaccatgaccgaggagccaactgggacttctggctgtttgacatcctcatgttcccgttggtcttccggagaatagtgctaccctcacatcccctggagcacagccttcctgaaatgccctcaccccatgcctttgccattgtgtgctctcagatttcttccactgtttgacaccctccttagagggctgctcttttttttccagagataatcctagccatcctctccactcccacggctggggacaatggccacttactacctgtgcactttgccactcgggacacctggatggtttctcttaggactttgcccacctccttctcatggcacttgctgtggaaaatgcctggctggcctcgtggggcctgtctcacttttccaggagacatgacccactaacgtggcaactttaacccaaaggcccctcagacatgttacagcaaatctggagccacagacaggttccctccattggcagcccattgtgtttgaaattccatgtcgggtttacttggaatgaaagatacttgaattattgtgcgcctgtgagcgcccagcttctgtttcatagtcttaacaggtggccattgtcgtgaaacgagtgatgcctgaagatctcagtgatgtttgaaccttctgtgtaactttttattaagtctttgtatctctcgactgattaataaagaagagaaacacgaaaaaaaaacacacacacgaagcgacaaaagaacaaaaaaaggaggggggggccaaaaaacccccggggggcatacgagagcaccctttttggaaagggcgcccaggggcgtaaaaaaagggggccggaaacgggggggaaaccgggccggggcccccgggggggggacaccgaaacgg

SEQ ID NO: 444313 - DNA, 4179 bp, Homo sapiens
ggcgacagggtcgaggcacccggcccgggctccccactggcgcgcccgcagcggcgctctatttttagcaggcgctgtggcaatataaggaatgcgcggcgcgctaggcgctcggggcgcacgctggcggcgcggtcgctttaaggaggcgccggggcggggacggaccggagtggccggctggcggggagccgtcagtccggcggccgcggggcccggcgggcgcgacgctgcctcctcaccggcgcaggctaggagggggcggcctgagtgccgtagccgagccggggctggagcgcgcgttctggacacagctgggcaggaggaattcagcgccatgcgggagcaatacatgcgcacgggggatggcttcctcatcgtctactccgtcactgacaaggccagctttgagcacgtggaccgcttccaccagcttatcctgcgcgtcaaagacagggagtcattcccgatgatcctcgtggccaacaaggtcgatttgatgcacttgaggaagatcaccagggagcaaggaaaagaaatggcgaccaaacacaatattccgtacatagaaaccagtgccaaggacccacctctcaatgtcgacaaagccttccatgacctcgttagagtaattaggcaacagattccggaaaaaagccagaagaagaagaagaaaaccaaatggcggggagaccgggccacaggcacccacaaactgcaatgtgtgatcttgtgacaggcctgaggccctgggcacagtgacggtggcctggccagccctcgggacccctccccacctaactgcactgaaaccatttctaaccacaacccttggcccaaggacttggtacaggaagggagaagggcaggtgggcagggagcagacagggtctggctttgcccagagggcacgggctttcccacctctcaaagagacaaggaagccacctgtaagcagaagcagcatccaagtgcccctggcccccccatgtgttgattcaacccggttcctccccctctctcggtgggtgtgttgtttattgtaactacatagtgttggtttgatgtggaagtgtttatccacatacaaagtacaaaacaagccatgaacaagcttctttcccttaccccccatccacaatgtctgagcttggatgtcttttatagatttttaaattattttagtgattattattttattaaaggggtctgggctcactgcctggtgaagtttcaagtgttcagcagacctctctggtaacatatctggaatattgttgttgttttttaaccgagttttcccatcagtgccaaaactcaactcaatctgaaagtagagtgtctgagaggacagaaggtaatgggaactgtagctggaggcctcaggccatgggtcaaacctgggagggaaagagaccctacacatggcctagaaatgagagaagagagaggtatttacccagaggattttcctatggttggggatgcaaatattagaaaacagattgtattttgctgaggggagtggctgtcatgagcatgtcagttctaaaaggggttttcattatcctggaaatgtataaactaaagtaagctgattggctttgcaaacatgttcatttgtttttcagacagtatgggttaagttctctgccctccccaggggtctgaggaggctctgggtttctcagatctgtctcttgctgcgttttcacatcagctgtgctgcttggtgcctctctgatacgaatacactgacacgtcaaagtaacctaatgtggacaccatccagaaaactccagttcatgctggatcttaaccaaaaatgattcaatactgttatcactaaaacagcaccaagacctgaagccatcttcccttggagtcaactgactaccacctctataagcctagtcaatgagcagaccccttccagtatttgtaaaagtagtactaggttgcctttttggcaatttttattgacctgttgaatcttgactataaaatgatctgagaagtaaggaaggctgggctgatgtgtggctctcatataccttctgcaagggggcagtctccccagctccctgatgatgctcacccccgcccccccacctcaggtgctgctggtgtgagccaaagactggagtttttccagctggggtgggagtggagagacaacaggaacaacgctgcaccaaagaaaaggtcagaataaaaggcagcacagctggtgaccttattttctagatgttacaaatcaggtcactatgcaaactagaatatcctcagcaggtggcctggccactctggagaaagaaacccaaggaaagtgagcacccaactggatgccaagacacccgggttctgaaaatgtgctgtgttcctacctcggcaagatcaccagcactgaggggcccagctggagaatgattctgctacaaaaggagacagttgagacttttgcttgttggaaatcaaacttcttatttgtctaaattgcccctttttctgttcctaaaaggaaggataagagagaacattccaggtgaggcacttcaaagtttccttagaccctatagtgttaagaggtattttaaacactaaaaggacaaagctcttcccaatccttatgcttccctaagtggtatctgcagcagtttgttgtgtgcagtttgatggcagctgcaaactggaggtgaggcggaggaaaggcaggtaggaaggagtaaggatggagatgctcagaatcaagagcatggcggagtaggagaagaagccctgcacacagggcagtgtccacagccagaaaactcctgctgggcaccaaccactacgagcataccccatgcccaccgtggagctgcaactcctcgacagcactgagtttgatagtctcactggaagcagatcagctgatgtagaacagagacctcggccataaaggtgagaagacatagggatttcaaccacacagttgggacagaagggacagtgcatctgttcatccatcctgcacttggcccacgttgaactccatggtgcctgagagagactagttaagggttggtcttctgtatcctctgctgttgagcctctggtaagctttcatctcccatgaactcatttccccataaatgaaatgggtaaataatgccccatttgtagaagtgggccctcatgactgaggtagcttccagataggccagagtagagtgtagagtgtgccccgtgacatccctccatcttctcctccattatcatctagcagggtcagactgggaaacctggttggccacgccacaccatgaccgaggagccaactgggacttctggctgtttgacatcctcatgttcccgttggtcttccggagaatagtgctaccctcacatcccctggagcacagccttcctgaaatgccctcaccccatgcctttgccattgtgtgctctcagatttcttccactgtttgacaccctccttagagggctgctcttttttttccagagataatcctagccatcctctccactcccacggctggggacaatggccacttactacctgtgcactttgccactcgggacacctggatggtttctcttaggactttgcccacctccttctcatggcacttgctgtggaaaatgcctggctggcctcgtggggcctgtctcacttttccaggagacatgacccactaacgtggcaactttaacccaaaggcccctcagacatgttacagcaaatctggagccacagacaggttccctccattggcagcccattgtgtttgaaattccatgtcgggtttacttggaatgaaagatacttgaattattgtgcgcctgtgagcgcccagcttctgtttcatagtcttaacaggtggccattgtcgtgaaacgagtgatgcctgaagatctcagtgatgtttgaaccttctgtgtaactttttattaagtctttgtatctctcgactgattaataaagaagagaaacacgaaaaaaaaacacacacacgaagcgacaaaagaacaaaaaaaggaggggggggccaaaaaacccccggggggcatacgagagcaccctttttggaaagggcgcccaggggcgtaaaaaaagggggccggaaacgggggggaaaccgggccggggcccccgggggggggacaccgaaacgg

SEQ ID NO: 444314 - DNA, 3948 bp, Homo sapiens
ggatagaatcagaatgtatttttgataaatgaaacagtctttcatcttcaagtatataaaaagatcactttattctatttttagggagctattaaatatctctgtgcctagagaacaagagggaattggaaaagccattagtaacactttccaacctgaaagagtgaaaagccctaaatgatgcttgaggctattgggggctggggcttctgtggggggttttgaaagcacctgggttcctcagaacctctgggcatttttaagggtgtaacagggctttgaggatctctgtgccactttgatcaagttgagctttgccttccagattccgtacatagaaaccagtgccaaggacccacctctcaatgtcgacaaagccttccatgacctcgttagagtaattaggcaacagattccggaaaaaagccagaagaagaagaagaaaaccaaatggcggggagaccgggccacaggcacccacaaactgcaatgtgtgatcttgtgacaggcctgaggccctgggcacagtgacggtggcctggccagccctcgggacccctccccacctaactgcactgaaaccatttctaaccacaacccttggcccaaggacttggtacaggaagggagaagggcaggtgggcagggagcagacagggtctggctttgcccagagggcacgggctttcccacctctcaaagagacaaggaagccacctgtaagcagaagcagcatccaagtgcccctggcccccccatgtgttgattcaacccggttcctccccctctctcggtgggtgtgttgtttattgtaactacatagtgttggtttgatgtggaagtgtttatccacatacaaagtacaaaacaagccatgaacaagcttctttcccttaccccccatccacaatgtctgagcttggatgtcttttatagatttttaaattattttagtgattattattttattaaaggggtctgggctcactgcctggtgaagtttcaagtgttcagcagacctctctggtaacatatctggaatattgttgttgttttttaaccgagttttcccatcagtgccaaaactcaactcaatctgaaagtagagtgtctgagaggacagaaggtaatgggaactgtagctggaggcctcaggccatgggtcaaacctgggagggaaagagaccctacacatggcctagaaatgagagaagagagaggtatttacccagaggattttcctatggttggggatgcaaatattagaaaacagattgtattttgctgaggggagtggctgtcatgagcatgtcagttctaaaaggggttttcattatcctggaaatgtataaactaaagtaagctgattggctttgcaaacatgttcatttgtttttcagacagtatgggttaagttctctgccctccccaggggtctgaggaggctctgggtttctcagatctgtctcttgctgcgttttcacatcagctgtgctgcttggtgcctctctgatacgaatacactgacacgtcaaagtaacctaatgtggacaccatccagaaaactccagttcatgctggatcttaaccaaaaatgattcaatactgttatcactaaaacagcaccaagacctgaagccatcttcccttggagtcaactgactaccacctctataagcctagtcaatgagcagaccccttccagtatttgtaaaagtagtactaggttgcctttttggcaatttttattgacctgttgaatcttgactataaaatgatctgagaagtaaggaaggctgggctgatgtgtggctctcatataccttctgcaagggggcagtctccccagctccctgatgatgctcacccccgcccccccacctcaggtgctgctggtgtgagccaaagactggagtttttccagctggggtgggagtggagagacaacaggaacaacgctgcaccaaagaaaaggtcagaataaaaggcagcacagctggtgaccttattttctagatgttacaaatcaggtcactatgcaaactagaatatcctcagcaggtggcctggccactctggagaaagaaacccaaggaaagtgagcacccaactggatgccaagacacccgggttctgaaaatgtgctgtgttcctacctcggcaagatcaccagcactgaggggcccagctggagaatgattctgctacaaaaggagacagttgagacttttgcttgttggaaatcaaacttcttatttgtctaaattgcccctttttctgttcctaaaaggaaggataagagagaacattccaggtgaggcacttcaaagtttccttagaccctatagtgttaagaggtattttaaacactaaaaggacaaagctcttcccaatccttatgcttccctaagtggtatctgcagcagtttgttgtgtgcagtttgatggcagctgcaaactggaggtgaggcggaggaaaggcaggtaggaaggagtaaggatggagatgctcagaatcaagagcatggcggagtaggagaagaagccctgcacacagggcagtgtccacagccagaaaactcctgctgggcaccaaccactacgagcataccccatgcccaccgtggagctgcaactcctcgacagcactgagtttgatagtctcactggaagcagatcagctgatgtagaacagagacctcggccataaaggtgagaagacatagggatttcaaccacacagttgggacagaagggacagtgcatctgttcatccatcctgcacttggcccacgttgaactccatggtgcctgagagagactagttaagggttggtcttctgtatcctctgctgttgagcctctggtaagctttcatctcccatgaactcatttccccataaatgaaatgggtaaataatgccccatttgtagaagtgggccctcatgactgaggtagcttccagataggccagagtagagtgtagagtgtgccccgtgacatccctccatcttctcctccattatcatctagcagggtcagactgggaaacctggttggccacgccacaccatgaccgaggagccaactgggacttctggctgtttgacatcctcatgttcccgttggtcttccggagaatagtgctaccctcacatcccctggagcacagccttcctgaaatgccctcaccccatgcctttgccattgtgtgctctcagatttcttccactgtttgacaccctccttagagggctgctcttttttttccagagataatcctagccatcctctccactcccacggctggggacaatggccacttactacctgtgcactttgccactcgggacacctggatggtttctcttaggactttgcccacctccttctcatggcacttgctgtggaaaatgcctggctggcctcgtggggcctgtctcacttttccaggagacatgacccactaacgtggcaactttaacccaaaggcccctcagacatgttacagcaaatctggagccacagacaggttccctccattggcagcccattgtgtttgaaattccatgtcgggtttacttggaatgaaagatacttgaattattgtgcgcctgtgagcgcccagcttctgtttcatagtcttaacaggtggccattgtcgtgaaacgagtgatgcctgaagatctcagtgatgtttgaaccttctgtgtaactttttattaagtctttgtatctctcgactgattaataaagaagagaaacacgaaaaaaaaacacacacacgaagcgacaaaagaacaaaaaaaggaggggggggccaaaaaacccccggggggcatacgagagcaccctttttggaaagggcgcccaggggcgtaaaaaaagggggccggaaacgggggggaaaccgggccggggcccccgggggggggacaccgaaacgg

SEQ ID NO: 444315 - DNA, 4415 bp, Homo sapiens
ggcgacagggtcgaggcacccggcccgggctccccactggcgcgcccgcagcggcgctctatttttagcaggcgctgtggcaatataaggaatgcgcggcgcgctaggcgctcggggcgcacgctggcggcgcggtcgctttaaggaggcgccggggcggggacggaccggagtggccggctggcggggagccgtcagtccggcggccgcggggcccggcgggcgcgacgctgcctcctcaccggcgcaggctaggagggggcggcctgagtgccgtagccgagccggggctggagcgcgcggtctgacctacgagaaacatggcaaccagcgccgtccccagtgacaacctccccacatacaagctggtggtggtgggggatgggggtgtgggcaaaagtgccctcaccatccagtttttccagaagatctttgtgcctgactatgaccccaccattgaagactcctacctgaaacatacggagattgacaatcaatgggccatcttggacgttctggacacagctgggcaggaggaattcagcgccatgcgggagcaatacatgcgcacgggggatggcttcctcatcgtctactccgtcactgacaaggccagctttgagcacgtggaccgcttccaccagcttatcctgcgcgtcaaagacagggagtcattcccgatgatcctcgtggccaacaaggtcgatttgatgcacttgaggaagatcaccagggagcaaggaaaagaaatggcgaccaaacacaatattccgtacatagaaaccagtgccaaggacccacctctcaatgtcgacaaagccttccatgacctcgttagagtaattaggcaacagattccggaaaaaagccagaagaagaagaagaaaaccaaatggcggggagaccgggccacaggcacccacaaactgcaatgtgtgatcttgtgacaggcctgaggccctgggcacagtgacggtggcctggccagccctcgggacccctccccacctaactgcactgaaaccatttctaaccacaacccttggcccaaggacttggtacaggaagggagaagggcaggtgggcagggagcagacagggtctggctttgcccagagggcacgggctttcccacctctcaaagagacaaggaagccacctgtaagcagaagcagcatccaagtgcccctggcccccccatgtgttgattcaacccggttcctccccctctctcggtgggtgtgttgtttattgtaactacatagtgttggtttgatgtggaagtgtttatccacatacaaagtacaaaacaagccatgaacaagcttctttcccttaccccccatccacaatgtctgagcttggatgtcttttatagatttttaaattattttagtgattattattttattaaaggggtctgggctcactgcctggtgaagtttcaagtgttcagcagacctctctggtaacatatctggaatattgttgttgttttttaaccgagttttcccatcagtgccaaaactcaactcaatctgaaagtagagtgtctgagaggacagaaggtaatgggaactgtagctggaggcctcaggccatgggtcaaacctgggagggaaagagaccctacacatggcctagaaatgagagaagagagaggtatttacccagaggattttcctatggttggggatgcaaatattagaaaacagattgtattttgctgaggggagtggctgtcatgagcatgtcagttctaaaaggggttttcattatcctggaaatgtataaactaaagtaagctgattggctttgcaaacatgttcatttgtttttcagacagtatgggttaagttctctgccctccccaggggtctgaggaggctctgggtttctcagatctgtctcttgctgcgttttcacatcagctgtgctgcttggtgcctctctgatacgaatacactgacacgtcaaagtaacctaatgtggacaccatccagaaaactccagttcatgctggatcttaaccaaaaatgattcaatactgttatcactaaaacagcaccaagacctgaagccatcttcccttggagtcaactgactaccacctctataagcctagtcaatgagcagaccccttccagtatttgtaaaagtagtactaggttgcctttttggcaatttttattgacctgttgaatcttgactataaaatgatctgagaagtaaggaaggctgggctgatgtgtggctctcatataccttctgcaagggggcagtctccccagctccctgatgatgctcacccccgcccccccacctcaggtgctgctggtgtgagccaaagactggagtttttccagctggggtgggagtggagagacaacaggaacaacgctgcaccaaagaaaaggtcagaataaaaggcagcacagctggtgaccttattttctagatgttacaaatcaggtcactatgcaaactagaatatcctcagcaggtggcctggccactctggagaaagaaacccaaggaaagtgagcacccaactggatgccaagacacccgggttctgaaaatgtgctgtgttcctacctcggcaagatcaccagcactgaggggcccagctggagaatgattctgctacaaaaggagacagttgagacttttgcttgttggaaatcaaacttcttatttgtctaaattgcccctttttctgttcctaaaaggaaggataagagagaacattccaggtgaggcacttcaaagtttccttagaccctatagtgttaagaggtattttaaacactaaaaggacaaagctcttcccaatccttatgcttccctaagtggtatctgcagcagtttgttgtgtgcagtttgatggcagctgcaaactggaggtgaggcggaggaaaggcaggtaggaaggagtaaggatggagatgctcagaatcaagagcatggcggagtaggagaagaagccctgcacacagggcagtgtccacagccagaaaactcctgctgggcaccaaccactacgagcataccccatgcccaccgtggagctgcaactcctcgacagcactgagtttgatagtctcactggaagcagatcagctgatgtagaacagagacctcggccataaaggtgagaagacatagggatttcaaccacacagttgggacagaagggacagtgcatctgttcatccatcctgcacttggcccacgttgaactccatggtgcctgagagagactagttaagggttggtcttctgtatcctctgctgttgagcctctggtaagctttcatctcccatgaactcatttccccataaatgaaatgggtaaataatgccccatttgtagaagtgggccctcatgactgaggtagcttccagataggccagagtagagtgtagagtgtgccccgtgacatccctccatcttctcctccattatcatctagcagggtcagactgggaaacctggttggccacgccacaccatgaccgaggagccaactgggacttctggctgtttgacatcctcatgttcccgttggtcttccggagaatagtgctaccctcacatcccctggagcacagccttcctgaaatgccctcaccccatgcctttgccattgtgtgctctcagatttcttccactgtttgacaccctccttagagggctgctcttttttttccagagataatcctagccatcctctccactcccacggctggggacaatggccacttactacctgtgcactttccctccattggcagcccattgtgtttgaaattccatgtcgggtttacttggaatgaaagatacttgaattattgtgcgcctgtgagcgcccagcttctgtttcatagtcttaacaggtggccattgtcgtgaaacgagtgatgcctgaagatctcagtgatgtttgaaccttctgtgtaactttttattaagtctttgtatctctcgactgattaataaagaagagaaacacgacgtatctgtcttagttccttttactccagtattcctgaagttttgctgagaacattgtgagttgttggtgttttgcccagaacatccacgtcttacagagcatgaccttggtgctaaccagatctgaagtaaggaggagcccactggtggccgtggggtgtctccttcctgcatggagctggaggatgaaggcaggctagcacagcatttagaggcactacctcttgatactgggcagatctggattttagccctactaccgacctttgtatgcctttgggcaaatgacctgccttagtcttgagctgccttgcctgtgaatgggacactaatgtgcacttcaaagtagctggaggactaaagctaatgtaggagtgtggtgaggagcccagaaaca

SEQ ID NO: 444316 - DNA, 3165 bp, Homo sapiens
ggcgacagggtcgaggcacccggcccgggctccccactggcgcgcccgcagcggcgctctatttttagcaggcgctgtggcaatataaggaatgcgcggcgcgctaggcgctcggggcgcacgctggcggcgcggtcgctttaaggaggcgccggggcggggacggaccggagtggccggctggcggggagccgtcagtccggcggccgcggggcccggcgggcgcgacgctgcctcctcaccggcgcaggctaggagggggcggcctgagtgccgtagccgagccggggctggagcgcgcggtctgacctacgagaaacatggcaaccagcgccgtccccagtgacaacctccccacatacaagctggtggtggtgggggatgggggtgtgggcaaaagtgccctcaccatccagtttttccagaagatctttgtgcctgactatgaccccaccattgaagactcctacctgaaacatacggagattgacaatcaatgggccatcttggacgttctggacacagctgggcaggaggaattcagcgccatgcgggagcaatacatgcgcacgggggatggcttcctcatcgtctactccgtcactgacaaggccagctttgagcacgtggaccgcttccaccagcttatcctgcgcgtcaaagacagggagtcattcccgatgatcctcgtggccaacaaggtcgatttgatgcacttgaggaagatcaccagggagcaaggaaaagaaatggcgaccaaacacaatattccgtacatagaaaccagtgccaaggacccacctctcaatgtcgacaaagccttccatgacctcgttagagtaattaggcaacagattccggaaaaaagccagaagaagaagaagaaaaccaaatggcggggagaccgggccacaggcacccacaaactgcaatgtgtgatcttgtgacaggcctgaggccctgggcacagtgacggtggcctggccagccctcgggacccctccccacctaactgcactgaaaccatttctaaccacaacccttggcccaaggacttggtacaggaagggagaagggcaggtgggcagggagcagacagggtctggctttgcccagagggcacgggctttcccacctctcaaagagacaaggaagccacctgtaagcagaagcagcatccaagtgcccctggcccccccatgtgttgattcaacccggttcctccccctctctcggtgggtgtgttgtttattgtaactacatagtgttggtttgatgtggaagtgtttatccacatacaaagtacaaaacaagccatgaacaagcttctttcccttaccccccatccacaatgtctgagcttggatgtcttttatagatttttaaattattttagtgattattattttattaaaggggtctgggctcactgcctggtgaagtttcaagtgttcagcagacctctctggtaacatatctggaatattgttgttgttttttaaccgagttttcccatcagtgccaaaactcaactcaatctgaaagtagagtgtctgagaggacagaaggtaatgggaactgtagctggaggcctcaggccatgggtcaaacctgggagggaaagagaccctacacatggcctagaaatgagagaagagagaggtatttacccagaggattttcctatggttggggatgcaaatattagaaaacagattgtattttgctgaggggagtggctgtcatgagcatgtcagttctaaaaggggttttcattatcctggaaatgtataaactaaagtaagctgattggctttgcaaacatgttcatttgtttttcagacagtatgggttaagttctctgccctccccaggggtctgaggaggctctgggtttctcagatctgtctcttgctgcgttttcacatcagctgtgctgcttggtgcctctctgatacgaatacactgacacgtcaaagtaacctaatgtggacaccatccagaaaactccagttcatgctggatcttaaccaaaaatgattcaatactgttatcactaaaacagcaccaagacctgaagccatcttcccttggagtcaactgactaccacctctataagcctagtcaatgagcagaccccttccagtatttgtaaaagtagtactaggttgcctttttggcaatttttattgacctgttgaatcttgactataaaatgatctgagaagtaaggaaggctgggctgatgtgtggctctcatataccttctgcaagggggcagtctccccagctccctgatgatgctcacccccgcccccccacctcaggtgctgctggtgtgagccaaagactggagtttttccagctggggtgggagtggagagacaacaggaacaacgctgcaccaaagaaaaggtcagaataaaaggcagcacagctggtgaccttattttctagatgttacaaatcaggtcactatgcaaactagaatatcctcaacatgttacagcaaatctggagccacagacaggttccctccattggcagcccattgtgtttgaaattccatgtcgggtttacttggaatgaaagatacttgaattattgtgcgcctgtgagcgcccagcttctgtttcatagtcttaacaggtggccattgtcgtgaaacgagtgatgcctgaagatctcagtgatgtttgaaccttctgtgtaactttttattaagtctttgtatctctcgactgattaataaagaagagaaacacgacgtatctgtcttagttccttttactccagtattcctgaagttttgctgagaacattgtgagttgttggtgttttgcccagaacatccacgtcttacagagcatgaccttggtgctaaccagatctgaagtaaggaggagcccactggtggccgtggggtgtctccttcctgcatggagctggaggatgaaggcaggctagcacagcatttagaggcactacctcttgatactgggcagatctggattttagccctactaccgacctttgtatgcctttgggcaaatgacctgccttagtcttgagctgccttgcctgtgaatgggacactaatgtgcacttcaaagtagctggaggactaaagctaatgtaggagtgtggtgaggagcccagaaaca

SEQ ID NO: 444317 - DNA, 1077 bp, Homo sapiens
acctaaagatctttgagcatcaccccccataaatgaaatgggtaaataatgccccatttgtagaagtgggccctcatgactgaggtagcttccagataggccagagtagagtgtagagtgtgccccgtgacatccctccatcttctcctccattatcatctagcagggtcagactgggaaacctggttggccacgccacaccatgaccgaggagccaactgggacttctggctgtttgacatcctcatgttcccgttggtcttccggagaatagtgctaccctcacatcccctggagcacagccttcctgaaatgccctcaccccatgcctttgccattgtgtgctctcagatttcttccactgtttgacaccctccttagagggctgctcttttttttccagagataatcctagccatcctctccactcccacggctggggacaatggccacttactacctgtgcactttgccactcgggacacctggatggtttctcttaggactttgcccacctccttctcatggcacttgctgtggaaaatgcctggctggcctcgtggggcctgtctcacttttccaggagacatgacccactaacgtggcaactttaacccaaaggcccctcagacatgttacagcaaatctggagccacagacaggttccctccattggcagcccattgtgtttgaaattccatgtcgggtttacttggaatgaaagatacttgaattattgtgcgcctgtgagcgcccagcttctgtttcatagtcttaacaggtggccattgtcgtgaaacgagtgatgcctgaagatctcagtgatgtttgaaccttctgtgtaactttttattaagtctttgtatctctcgactgattaataaagaagagaaacacgaaaaaaaaacacacacacgaagcgacaaaagaacaaaaaaaggaggggggggccaaaaaacccccggggggcatacgagagcaccctttttggaaagggcgcccaggggcgtaaaaaaagggggccggaaacgggggggaaaccgggccggggcccccgggggggggacaccgaaacgg

SEQ ID NO: 444318 - DNA, 4275 bp, Homo sapiens
ggcgacagggtcgaggcacccggcccgggctccccactggcgcgcccgcagcggcgctctatttttagcaggcgctgtggcaatataaggaatgcgcggcgcgctaggcgctcggggcgcacgctggcggcgcggtcgctttaaggaggcgccggggcggggacggaccggagtggccggctggcggggagccgtcagtccggcggccgcggggcccggcgggcgcgacgctgcctcctcaccggcgcaggctaggagggggcggcctgagtgccgtagccgagccggggctggagcgcgcggtctgacctacgagaaacatggcaaccagcgccgtccccagtgacaacctccccacatacaagctggtggtggtgggggatgggggtgtgggcaaaagtgccctcaccatccagtttttccagaagatctttgtgcctgactatgaccccaccattgaagactcctacctgaaacatacggagattgacaatcaatgggccatcttggacgttctggacacagctgggcaggaggaattcagcgccatgcgggagcaatacatgcgcacgggggatggcttcctcatcgtctactccgtcactgacaaggccagctttgagcacgtggaccgcttccaccagcttatcctgcgcgtcaaagacagggagtcattcccgatgatcctcgtggccaacaaggtcgatttgatgcacttgaggaagatcaccagggagcaaggaaaagaaatggcgaccaaacacaatattccgtacatagaaaccagtgccaaggacccacctctcaatgtcgacaaagccttccatgacctcgttagagtaattaggcaacagattccggaaaaaagccagaagaagaagaagaaaaccaaatggcggggagaccgggccacaggcacccacaaactgcaatgtgtgatcttgtgacaggcctgaggccctgggcacagtgacggtggcctggccagccctcgggacccctccccacctaactgcactgaaaccatttctaaccacaacccttggcccaaggacttggtacaggaagggagaagggcaggtgggcagggagcagacagggtctggctttgcccagagggcacgggctttcccacctctcaaagagacaaggaagccacctgtaagcagaagcagcatccaagtgcccctggcccccccatgtgttgattcaacccggttcctccccctctctcggtgggtgtgttgtttattgtaactacatagtgttggtttgatgtggaagtgtttatccacatacaaagtacaaaacaagccatgaacaagcttctttcccttaccccccatccacaatgtctgagcttggatgtcttttatagatttttaaattattttagtgattattattttattaaaggggtctgggctcactgcctggtgaagtttcaagtgttcagcagacctctctggtaacatatctggaatattgttgttgttttttaaccgagttttcccatcagtgccaaaactcaactcaatctgaaagtagagtgtctgagaggacagaaggtaatgggaactgtagctggaggcctcaggccatgggtcaaacctgggagggaaagagaccctacacatggcctagaaatgagagaagagagaggtatttacccagaggattttcctatggttggggatgcaaatattagaaaacagattgtattttgctgaggggagtggctgtcatgagcatgtcagttctaaaaggggttttcattatcctggaaatgtataaactaaagtaagctgattggctttgcaaacatgttcatttgtttttcagacagtatgggttaagttctctgccctccccaggggtctgaggaggctctgggtttctcagatctgtctcttgctgcgttttcacatcagctgtgctgcttggtgcctctctgatacgaatacactgacacgtcaaagtaacctaatgtggacaccatccagaaaactccagttcatgctggatcttaaccaaaaatgattcaatactgttatcactaaaacagcaccaagacctgaagccatcttcccttggagtcaactgactaccacctctataagcctagtcaatgagcagaccccttccagtatttgtaaaagtagtactaggttgcctttttggcaatttttattgacctgttgaatcttgactataaaatgatctgagaagtaaggaaggctgggctgatgtgtggctctcatataccttctgcaagggggcagtctccccagctccctgatgatgctcacccccgcccccccacctcaggtgctgctggtgtgagccaaagactggagtttttccagctggggtgggagtggagagacaacaggaacaacgctgcaccaaagaaaaggtcagaataaaaggcagcacagctggtgaccttattttctagatgttacaaatcaggtcactatgcaaactagaatatcctcagcaggtggcctggccactctggagaaagaaacccaaggaaagtgagcacccaactggatgccaagacacccgggttctgaaaatgtgctgtgttcctacctcggcaagatcaccagcactgaggggcccagctggagaatgattctgctacaaaaggagacagttgagacttttgcttgttggaaatcaaacttcttatttgtctaaattgcccctttttctgttcctaaaaggaaggataagagagaacattccaggtgaggcacttcaaagtttccttagaccctatagtgttaagaggtattttaaacactaaaaggacaaagctcttcccaatccttatgcttccctaagtggtatctgcagcagtttgttgtgtgcagtttgatggcagctgcaaactggaggtgaggcggaggaaaggcaggtaggaaggagtaaggatggagatgctcagaatcaagagcatggcggagtaggagaagaagccctgcacacagggcagtgtccacagccagaaaactcctgctgggcaccaaccactacgagcataccccatgcccaccgtggagctgcaactcctcgacagcactgagtttgatagtctcactggaagcagatcagctgatgtagaacagagacctcggccataaaggtgagaagacatagggatttcaaccacacagttgggacagaagggacagtgcatctgttcatccatcctgcacttggcccacgttgaactccatggtgcctgagagagactagttaagggttggtcttctgtatcctctgctgttgagcctctggtaagctttcatctcccatgaactcatttccccataaatgaaatgggtaaataatgccccatttgtagaagtgggccctcatgactgaggtagcttccagataggccagagtagagtgtagagtgtgccccgtgacatccctccatcttctcctccattatcatctagcagggtcagactgggaaacctggttggccacgccacaccatgaccgaggagccaactgggacttctggctgtttgacatcctcatgttcccgttggtcttccggagaatagtgctaccctcacatcccctggagcacagccttcctgaaatgccctcaccccatgcctttgccattgtgtgctctcagatttcttccactgtttgacaccctccttagagggctgctcttttttttccagagataatcctagccatcctctccactcccacggctggggacaatggccacttactacctgtgcactttgccactcgggacacctggatggtttctcttaggactttgcccacctccttctcatggcacttgctgtggaaaatgcctggctggcctcgtggggcctgtctcacttttccaggagacatgacccactaacgtggcaactttaacccaaaggcccctcagacatgttacagcaaatctggagccacagacaggttccctccattggcagcccattgtgtttgaaattccatgtcgggtttacttggaatgaaagatacttgaattattgtgcgcctgtgagcgcccagcttctgtttcatagtcttaacaggtggccattgtcgtgaaacgagtgatgcctgaagatctcagtgatgtttgaaccttctgtgtaactttttattaagtctttgtatctctcgactgattaataaagaagagaaacacgacacgtaaaaaaaaagggggcggcaaaaaaccccggggcaatacggaccgttttggaaaggcca

SEQ ID NO: 444319 - DNA, 4206 bp, Homo sapiens
gctgtggtcacaactagggcctgggctcatgcattgaactgatctggctgaggcatcagacacggtgccagtcctgccctgcggggaagacaagagcacaaagtgacaagccagtgtggtctgacctacgagaaacatggcaaccagcgccgtccccagtgacaacctccccacatacaagctggtggtggtgggggatgggggtgtgggcaaaagtgccctcaccatccagtttttccagaagatctttgtgcctgactatgaccccaccattgaagactcctacctgaaacatacggagattgacaatcaatgggccatcttggacgttctggacacagctgggcaggaggaattcagcgccatgcgggagcaatacatgcgcacgggggatggcttcctcatcgtctactccgtcactgacaaggccagctttgagcacgtggaccgcttccaccagcttatcctgcgcgtcaaagacagggagtcattcccgatgatcctcgtggccaacaaggtcgatttgatgcacttgaggaagatcaccagggagcaaggaaaagaaatggcgaccaaacacaatattccgtacatagaaaccagtgccaaggacccacctctcaatgtcgacaaagccttccatgacctcgttagagtaattaggcaacagattccggaaaaaagccagaagaagaagaagaaaaccaaatggcggggagaccgggccacaggcacccacaaactgcaatgtgtgatcttgtgacaggcctgaggccctgggcacagtgacggtggcctggccagccctcgggacccctccccacctaactgcactgaaaccatttctaaccacaacccttggcccaaggacttggtacaggaagggagaagggcaggtgggcagggagcagacagggtctggctttgcccagagggcacgggctttcccacctctcaaagagacaaggaagccacctgtaagcagaagcagcatccaagtgcccctggcccccccatgtgttgattcaacccggttcctccccctctctcggtgggtgtgttgtttattgtaactacatagtgttggtttgatgtggaagtgtttatccacatacaaagtacaaaacaagccatgaacaagcttctttcccttaccccccatccacaatgtctgagcttggatgtcttttatagatttttaaattattttagtgattattattttattaaaggggtctgggctcactgcctggtgaagtttcaagtgttcagcagacctctctggtaacatatctggaatattgttgttgttttttaaccgagttttcccatcagtgccaaaactcaactcaatctgaaagtagagtgtctgagaggacagaaggtaatgggaactgtagctggaggcctcaggccatgggtcaaacctgggagggaaagagaccctacacatggcctagaaatgagagaagagagaggtatttacccagaggattttcctatggttggggatgcaaatattagaaaacagattgtattttgctgaggggagtggctgtcatgagcatgtcagttctaaaaggggttttcattatcctggaaatgtataaactaaagtaagctgattggctttgcaaacatgttcatttgtttttcagacagtatgggttaagttctctgccctccccaggggtctgaggaggctctgggtttctcagatctgtctcttgctgcgttttcacatcagctgtgctgcttggtgcctctctgatacgaatacactgacacgtcaaagtaacctaatgtggacaccatccagaaaactccagttcatgctggatcttaaccaaaaatgattcaatactgttatcactaaaacagcaccaagacctgaagccatcttcccttggagtcaactgactaccacctctataagcctagtcaatgagcagaccccttccagtatttgtaaaagtagtactaggttgcctttttggcaatttttattgacctgttgaatcttgactataaaatgatctgagaagtaaggaaggctgggctgatgtgtggctctcatataccttctgcaagggggcagtctccccagctccctgatgatgctcacccccgcccccccacctcaggtgctgctggtgtgagccaaagactggagtttttccagctggggtgggagtggagagacaacaggaacaacgctgcaccaaagaaaaggtcagaataaaaggcagcacagctggtgaccttattttctagatgttacaaatcaggtcactatgcaaactagaatatcctcagcaggtggcctggccactctggagaaagaaacccaaggaaagtgagcacccaactggatgccaagacacccgggttctgaaaatgtgctgtgttcctacctcggcaagatcaccagcactgaggggcccagctggagaatgattctgctacaaaaggagacagttgagacttttgcttgttggaaatcaaacttcttatttgtctaaattgcccctttttctgttcctaaaaggaaggataagagagaacattccaggtgaggcacttcaaagtttccttagaccctatagtgttaagaggtattttaaacactaaaaggacaaagctcttcccaatccttatgcttccctaagtggtatctgcagcagtttgttgtgtgcagtttgatggcagctgcaaactggaggtgaggcggaggaaaggcaggtaggaaggagtaaggatggagatgctcagaatcaagagcatggcggagtaggagaagaagccctgcacacagggcagtgtccacagccagaaaactcctgctgggcaccaaccactacgagcataccccatgcccaccgtggagctgcaactcctcgacagcactgagtttgatagtctcactggaagcagatcagctgatgtagaacagagacctcggccataaaggtgagaagacatagggatttcaaccacacagttgggacagaagggacagtgcatctgttcatccatcctgcacttggcccacgttgaactccatggtgcctgagagagactagttaagggttggtcttctgtatcctctgctgttgagcctctggtaagctttcatctcccatgaactcatttccccataaatgaaatgggtaaataatgccccatttgtagaagtgggccctcatgactgaggtagcttccagataggccagagtagagtgtagagtgtgccccgtgacatccctccatcttctcctccattatcatctagcagggtcagactgggaaacctggttggccacgccacaccatgaccgaggagccaactgggacttctggctgtttgacatcctcatgttcccgttggtcttccggagaatagtgctaccctcacatcccctggagcacagccttcctgaaatgccctcaccccatgcctttgccattgtgtgctctcagatttcttccactgtttgacaccctccttagagggctgctcttttttttccagagataatcctagccatcctctccactcccacggctggggacaatggccacttactacctgtgcactttgccactcgggacacctggatggtttctcttaggactttgcccacctccttctcatggcacttgctgtggaaaatgcctggctggcctcgtggggcctgtctcacttttccaggagacatgacccactaacgtggcaactttaacccaaaggcccctcagacatgttacagcaaatctggagccacagacaggttccctccattggcagcccattgtgtttgaaattccatgtcgggtttacttggaatgaaagatacttgaattattgtgcgcctgtgagcgcccagcttctgtttcatagtcttaacaggtggccattgtcgtgaaacgagtgatgcctgaagatctcagtgatgtttgaaccttctgtgtaactttttattaagtctttgtatctctcgactgattaataaagaagagaaacacgaaaaaaaaacacacacacgaagcgacaaaagaacaaaaaaaggaggggggggccaaaaaacccccggggggcatacgagagcaccctttttggaaagggcgcccaggggcgtaaaaaaagggggccggaaacgggggggaaaccgggccggggcccccgggggggggacaccgaaacgg

SEQ ID NO: 444320 - DNA, 4237 bp, Homo sapiens
ccgcttgcggggtgcgccctgggaccggctgtgcgtggcgttttgcccccatcgcgggctcccgcgtaacggtgtgcgttcgtgaaatcggccacgaccaagaccccagtggggagggcctgcgcgccgctcagagagaccctttcatggtctgacctacgagaaacatggcaaccagcgccgtccccagtgacaacctccccacatacaagctggtggtggtgggggatgggggtgtgggcaaaagtgccctcaccatccagtttttccagaagatctttgtgcctgactatgaccccaccattgaagactcctacctgaaacatacggagattgacaatcaatgggccatcttggacgttctggacacagctgggcaggaggaattcagcgccatgcgggagcaatacatgcgcacgggggatggcttcctcatcgtctactccgtcactgacaaggccagctttgagcacgtggaccgcttccaccagcttatcctgcgcgtcaaagacagggagtcattcccgatgatcctcgtggccaacaaggtcgatttgatgcacttgaggaagatcaccagggagcaaggaaaagaaatggcgaccaaacacaatattccgtacatagaaaccagtgccaaggacccacctctcaatgtcgacaaagccttccatgacctcgttagagtaattaggcaacagattccggaaaaaagccagaagaagaagaagaaaaccaaatggcggggagaccgggccacaggcacccacaaactgcaatgtgtgatcttgtgacaggcctgaggccctgggcacagtgacggtggcctggccagccctcgggacccctccccacctaactgcactgaaaccatttctaaccacaacccttggcccaaggacttggtacaggaagggagaagggcaggtgggcagggagcagacagggtctggctttgcccagagggcacgggctttcccacctctcaaagagacaaggaagccacctgtaagcagaagcagcatccaagtgcccctggcccccccatgtgttgattcaacccggttcctccccctctctcggtgggtgtgttgtttattgtaactacatagtgttggtttgatgtggaagtgtttatccacatacaaagtacaaaacaagccatgaacaagcttctttcccttaccccccatccacaatgtctgagcttggatgtcttttatagatttttaaattattttagtgattattattttattaaaggggtctgggctcactgcctggtgaagtttcaagtgttcagcagacctctctggtaacatatctggaatattgttgttgttttttaaccgagttttcccatcagtgccaaaactcaactcaatctgaaagtagagtgtctgagaggacagaaggtaatgggaactgtagctggaggcctcaggccatgggtcaaacctgggagggaaagagaccctacacatggcctagaaatgagagaagagagaggtatttacccagaggattttcctatggttggggatgcaaatattagaaaacagattgtattttgctgaggggagtggctgtcatgagcatgtcagttctaaaaggggttttcattatcctggaaatgtataaactaaagtaagctgattggctttgcaaacatgttcatttgtttttcagacagtatgggttaagttctctgccctccccaggggtctgaggaggctctgggtttctcagatctgtctcttgctgcgttttcacatcagctgtgctgcttggtgcctctctgatacgaatacactgacacgtcaaagtaacctaatgtggacaccatccagaaaactccagttcatgctggatcttaaccaaaaatgattcaatactgttatcactaaaacagcaccaagacctgaagccatcttcccttggagtcaactgactaccacctctataagcctagtcaatgagcagaccccttccagtatttgtaaaagtagtactaggttgcctttttggcaatttttattgacctgttgaatcttgactataaaatgatctgagaagtaaggaaggctgggctgatgtgtggctctcatataccttctgcaagggggcagtctccccagctccctgatgatgctcacccccgcccccccacctcaggtgctgctggtgtgagccaaagactggagtttttccagctggggtgggagtggagagacaacaggaacaacgctgcaccaaagaaaaggtcagaataaaaggcagcacagctggtgaccttattttctagatgttacaaatcaggtcactatgcaaactagaatatcctcagcaggtggcctggccactctggagaaagaaacccaaggaaagtgagcacccaactggatgccaagacacccgggttctgaaaatgtgctgtgttcctacctcggcaagatcaccagcactgaggggcccagctggagaatgattctgctacaaaaggagacagttgagacttttgcttgttggaaatcaaacttcttatttgtctaaattgcccctttttctgttcctaaaaggaaggataagagagaacattccaggtgaggcacttcaaagtttccttagaccctatagtgttaagaggtattttaaacactaaaaggacaaagctcttcccaatccttatgcttccctaagtggtatctgcagcagtttgttgtgtgcagtttgatggcagctgcaaactggaggtgaggcggaggaaaggcaggtaggaaggagtaaggatggagatgctcagaatcaagagcatggcggagtaggagaagaagccctgcacacagggcagtgtccacagccagaaaactcctgctgggcaccaaccactacgagcataccccatgcccaccgtggagctgcaactcctcgacagcactgagtttgatagtctcactggaagcagatcagctgatgtagaacagagacctcggccataaaggtgagaagacatagggatttcaaccacacagttgggacagaagggacagtgcatctgttcatccatcctgcacttggcccacgttgaactccatggtgcctgagagagactagttaagggttggtcttctgtatcctctgctgttgagcctctggtaagctttcatctcccatgaactcatttccccataaatgaaatgggtaaataatgccccatttgtagaagtgggccctcatgactgaggtagcttccagataggccagagtagagtgtagagtgtgccccgtgacatccctccatcttctcctccattatcatctagcagggtcagactgggaaacctggttggccacgccacaccatgaccgaggagccaactgggacttctggctgtttgacatcctcatgttcccgttggtcttccggagaatagtgctaccctcacatcccctggagcacagccttcctgaaatgccctcaccccatgcctttgccattgtgtgctctcagatttcttccactgtttgacaccctccttagagggctgctcttttttttccagagataatcctagccatcctctccactcccacggctggggacaatggccacttactacctgtgcactttgccactcgggacacctggatggtttctcttaggactttgcccacctccttctcatggcacttgctgtggaaaatgcctggctggcctcgtggggcctgtctcacttttccaggagacatgacccactaacgtggcaactttaacccaaaggcccctcagacatgttacagcaaatctggagccacagacaggttccctccattggcagcccattgtgtttgaaattccatgtcgggtttacttggaatgaaagatacttgaattattgtgcgcctgtgagcgcccagcttctgtttcatagtcttaacaggtggccattgtcgtgaaacgagtgatgcctgaagatctcagtgatgtttgaaccttctgtgtaactttttattaagtctttgtatctctcgactgattaataaagaagagaaacacgaaaaaaaaacacacacacgaagcgacaaaagaacaaaaaaaggaggggggggccaaaaaacccccggggggcatacgagagcaccctttttggaaagggcgcccaggggcgtaaaaaaagggggccggaaacgggggggaaaccgggccggggcccccgggggggggacaccgaaacgg

SEQ ID NO: 444321 - DNA, 3031 bp, Homo sapiens
ggcgacagggtcgaggcacccggcccgggctccccactggcgcgcccgcagcggcgctctatttttagcaggcgctgtggcaatataaggaatgcgcggcgcgctaggcgctcggggcgcacgctggcggcgcggtcgctttaaggaggcgccggggcggggacggaccggagtggccggctggcggggagccgtcagtccggcggccgcggggcccggcgggcgcgacgctgcctcctcaccggcgcaggctaggagggggcggcctgagtgccgtagccgagccggggctggagcgcgcggtctgacctacgagaaacatggcaaccagcgccgtccccagtgacaacctccccacatacaagctggtggtggtgggggatgggggtgtgggcaaaagtgccctcaccatccagtttttccagaagatctttgtgcctgactatgaccccaccattgaagactcctacctgaaacatacggagattgacaatcaatgggccatcttggacgttctggacacagctgggcaggaggaattcagcgccatgcgggagcaatacatgcgcacgggggatggcttcctcatcgtctactccgtcactgacaaggccagctttgagcacgtggaccgcttccaccagcttatcctgcgcgtcaaagacagggagtcattcccgatgatcctcgtggccaacaaggtcgatttgatgcacttgaggaagatcaccagggagcaaggaaaagaaatggcgaccaaacacaatattccgtacatagaaaccagtgccaaggacccacctctcaatgtcgacaaagccttccatgacctcgttagagtaattaggcaacagattccggaaaaaagccagaagaagaagaagaaaaccaaatggcggggagaccgggccacaggcacccacaaactgcaatgtgtgatcttgtgacaggcctgaggccctgggcacagtgacggtggcctggccagccctcgggacccctccccacctaactgcactgaaaccatttctaaccacaacccttggcccaaggacttggtacaggaagggagaagggcaggtgggcagggagcagacagggtctggctttgcccagagggcacgggctttcccacctctcaaagagacaaggaagccacctgtaagcagaagcagcatccaagtgcccctggcccccccatgtgttgattcaacccggttcctccccctctctcggtgggtgtgttgtttattgtaactacatagtgttggtttgatgtggaagtgtttatccacatacaaagtacaaaacaagccatgaacaagcttctttcccttaccccccatccacaatgtctgagcttggatgtcttttatagatttttaaattattttagtgattattattttattaaaggggtctgggctcactgcctggtgaagtttcaagtgttcagcagacctctctggtaacatatctggaatattgttgttgttttttaaccgagttttcccatcagtgccaaaactcaactcaatctgaaagtagagtgtctgagaggacagaaggtaatgggaactgtagctggaggcctcaggccatgggtcaaacctgggagggaaagagaccctacacatggcctagaaatgagagaagagagaggtatttacccagaggattttcctatggttggggatgcaaatattagaaaacagattgtattttgctgaggggagtggctgtcatgagcatgtcagttctaaaaggggttttcattatcctggaaatgtataaactaaagtaagctgattggctttgcaaacatgttcatttgtttttcagacagtatgggttaagttctctgccctccccaggggtctgaggaggctctgggtttctcagatctgtctcttgctgcgttttcacatcagctgtgctgcttggtgcctctctgatacgaatacactgacacgtcaaagtaacctaatgtggacaccatccagaaaactccagttcatgctggatcttaaccaaaaatgattcaatactgttatcactaaaacagcaccaagacctgaagccatcttcccttggagtcaactgactaccacctctataagcctagtcaatgagcagaccccttccagtatttgtaaaagtagtactaggttgcctttttggcaatttttattgacctgttgaatcttgactataaaatgatctgagaagtaaggaaggctgggctgatgtgtggctctcatggcacttgctgtggaaaatgcctggctggcctcgtggggcctgtctcacttttccaggagacatgacccactaacgtggcaactttaacccaaaggcccctcagacatgttacagcaaatctggagccacagacaggttccctccattggcagcccattgtgtttgaaattccatgtcgggtttacttggaatgaaagatacttgaattattgtgcgcctgtgagcgcccagcttctgtttcatagtcttaacaggtggccattgtcgtgaaacgagtgatgcctgaagatctcagtgatgtttgaaccttctgtgtaactttttattaagtctttgtatctctcgactgattaataaagaagagaaacacgacgtatctgtcttagttccttttactccagtattcctgaagttttgctgagaacattgtgagttgttggtgttttgcccagaacatccacgtcttacagagcatgaccttggtgctaaccagatctgaagtaaggaggagcccactggtggccgtggggtgtctccttcctgcatggagctggaggatgaaggcaggctagcacagcatttagaggcactacctcttgatactgggcagatctggattttagccctactaccgacctttgtatgcctttgggcaaatgacctgccttagtcttgagctgccttgcctgtgaatgggacactaatgtgcacttcaaagtagctggaggactaaagctaatgtaggagtgtggtgaggagcccagaaaca

SEQ ID NO: 444322 - DNA, 1419 bp, Homo sapiens
  misc_feature (290)..(290): n is a, c, g, or t
ctggagtggcaacaactttcataatcagtttttctgtttcaccttcaaagatgccattaagggttcacaagaaaatgaagggaaacagaaaaactgattatgaaagttgttgcctctcctgcttcttcatacagagtgtgtatgatattgctgtgtgatgttagactgcaacttagcccaacagctgttctagtaattggcagtttctcatcgagttaagcctacctgataaagaagcacgcttacatttattgattacccccgtaaaatgaacaatacatccaacaagncttctagcaaaaatgttcttattaacctcctttttatactaaggaaaaactgggtacaacacaaatcttcatcaacagaagaataccaactgttatacagtcataaaacgatcccagaagttcactccataccatcaaaaccaggaacccacactgatgcccctgatggcagaaaatcatgatacaaaaatgagagaaacgagagagagaaaatgtactagagtcatggtagtgggtaaaagccaaagagctcagtttctactcatgatattcattagaagaaccaaaggaacatgagccaacagctgtaagggtccaggtctgcacaaggtgcctgttgggtgcagggttctgttggctccagtgatatatctcaggtgggctaatttttacggacatagccgctgcaaaaatctatcaaacaataataaagggatagctacttgcatgctaatttaccattgtatagaagggagaacaggcatcagattgttttcgtcaaataaaagcaaaaccaagatttatgaagaaaagaggaaagaggaaaaaaaatcgcctgggacctttgtgattttgctccccttggataagagacttgacagaaagctttcaaagaggtcactgtggcctgtcttcttgagacacacgacacttgttcaccacggaaaacaattacagatgttggaggactttaaaatatcctagtttagcagttcatcctatgccacagaatctgtgtgtgatgtccaccatgtccttctgtggtacaccccttcagttaagccaggagggtgcctctccgctcagtggaatatcatacatcaatgtgtagaaagtttgttgtgctggcaagtaaatgacaaaagggacattgatagaattaggaaacaaattggaatatgatctgttaccgttcccatggaagataaatttgcagaatatactcaaattagaagcattaaataaacgctgtaatttaaaatggcacatcccattctctacactacagaaatatctgcaggagtgaccaaagatatgtgtacaactatggtagagattgcagcatcagttataatcctaaaaccatgaaacccaccttatttcaaaaacatcttggtaaagaccgtcg

SEQ ID NO: 444323 - DNA, 5297 bp, Homo sapiens
  misc_feature (342)..(342): n is a, c, g, or t
  misc_feature (427)..(427): n is a, c, g, or t
  misc_feature (848)..(848): n is a, c, g, or t
  misc_feature (4168)..(4168): n is a, c, g, or t
gaattacaggcttgagccactgcgcctggcctggtctagtctccttttagagatgagaaaactgaggctcagggaggtaacctgttcaaggtcatgaactgtcttaagaccatagttgcaagtgacagagctgggtctcagatgcaacctcagacctgatactgactccagagctgtgcgcctaagcactagagcacatagcctccttgccccagggaaagaacaatgggaggttgtgggtgacctctgggtctcagggccctgggatatagggactgtgccttttttttttttttttttttgagacaaagtttcgctcttgttgcccaggctggagtgcantggcatgatctcagctcactgcaacctccgcctcccaggttcaattgattctcctgcctcagcctcccaagtagctgggattacnggcatgtgccaccacacccggctaatttttgtatttttggtggagatggggtttcgccatattgatcaggctggtctcgaactcctgacctcaggtgatccgcctgccttggcctcccaaaatgctgagattacaggtgtgagtgcccatgcctggcaggactgtgccttttgcattttcaaatgaaggaaatgagtatttcttgagtgttgaccgtgtgtccccccggcaccgtgtcatgtgctggttatgcacacacgatattctgtttcatccccggacagctctgtgagcccccaccccagagcctggagttgcagaggcagctacaggaggagcaggcctcctaccagcgcaagctgcaggcctacctggagggccagcagcggcaggcccagcttgtgtgcagcggctgcagggnaagtacaagaagaggtactcggagctggagcagcagctgctggagagatccggagagctggagcagcagcggctaagggacacagagcacagccaagacctgcagagtgccctcatccggctggaggaggagccgcagaggagtgccagcctggcccaggtgaaagccatgctccgagaacatctggaccaggcaggctcggccaaccaggctctgagtgaggacatacaaaaggtgaccaatgactggacacgcagccgcaaggagctggagcagcgggaggcggcatggaggcgcgaggaggagtctttcaatgcctacttcagcaagaagcacaatcacctgctcctgctatggaggcaggtggtggggttccggcggctggtcagcgaggtgaagatgttcaccgagagagtgacagagctgggcctggcagtgaagcgtcttcagaagcagaatccggagaaggatcaggtcaacacggacctcaccgagaagcttgaggccctgtccgtcctgtcggacacagagcggcgtccagctgagcggctccgagcgcaccgcggatgactccttcggcagcctgcgggggctctcggcccagcagaccccgtccccaccgcggcgctcctcgcccggccgaggccgttcaccccgccgaggcccctccccggcctgctcagactcctccacgctcgccctgatccactccaccttacacaagcacgagctgcaggtccaggacatgcgtgggcgctatgaggcaagccaggacctgctgggcaccctgcggaagcagcttagcgacagcgagagtgagcggcgggccctagaggaacagctgcagcgcctgcgggacaagaccgacagcaccatgcaggcccacgaggacgcccagcgcgaggtgcagcggctgcggagcgccaaagagctcctgagaagggagaagagcaacctggcccacagcctgcaggtggcccagcagcaggccaaggagctgcggcaggagcggaagaagctgcaggctgcccaggaggagctgcggcgccagcggtactggctgggggaagagcaggaggacgcagtgcaggatggtgtgcgggtgcgccgggagcttgagcgcagccatagacaactggagcagctggaagggaagcgctcagtcctggccaaggagctggtggaggtgagggaggcgctgagccgcgccacactgcaacgggacatgctgcaggccgagaaggccgaggtggccgaggcgctgaccaaggctgagggcagaggaggcctccctgcaggactccctgtccaagctgagcgccctcaacgagagccttgctcaggacaagttggatctgaaccgccttgtcacccaggccacagctggaggaagaaaagtgcgccctgcagggccggcagcggcaggcgaagcaggaggccacagtggcacgggaagagcaggagcggctggaggcgctgcggttggaacaggaggtggcgcggcagggcctggagggctccctatgagcggcggagcaggcccaggaggcagtggagcagcagctccccacgctgcatcatgagtgcagccggctgcaggagcagctagcgcagaaacaccctcaaagacacagtgagaaataatgtctaaccaaatgtctgggcacccccgacccaggcaaattgacacaaaaattaattttcacaaatactatcaatagaagtgactaataaatgtggcatcatgtcctgcctgtttatcccatgacaattagtatagtcgagcgtaacattggcttccgttcccttatagtagcaacatgtaggagtttcatttaaagtgaggataattttgaccttacagagtttctccctacccctatctaccattgccacttgtggattgtcattttgccatgactttcttttaaaaaatatcaataagctctatacttcagtaatgtaagtttgaatttcatcctggctgcataagtcactttccattttgacaaagtctagaaatatttttctccatctccttgaatatgggtaatggatacctattgtggggcccactctcaatctcatggttttattttaatttagttctcaatagatatgcctcagctgcttaaaaaccattgaaaatggcccatggccttgtccatctaacagagtccagtaaaatcctgacaatggaatggggagagagaaagtgagaaccaccaaactcagcacaaaacgactgagtttaaacctctgtgctaagagatgatcagagtctatcatggcttctagtagcatgagaccatgtctcacgaatgaccctaggctcccatgacaatgcctacctaagaaagctcaaggctgccaggggaacttactttagtctagccaatacttgatgatggcagtttcaggatctttctttcttatagcacttactaagaagggaatccttcctccatccctttgatatatgtgtgtatctcctagggacttcaatgtatctttgcccaggatctgaaaggcaatacttttgaggtgtagttctcaggaaggactgagcctctgtcttccagtctctgtgggaggttagaatcctaacttctaatattgccagctggcagacacagctgtcctgatgaggcagacatttaaaatgaccaatcttttgtaatgtttcacttgtgccctgccccctgccctctcccctgcctctctctcccattagaatgccatcacctctgcacaaatgcgaacagaaccagccccttcctctacggtcagtagttactgaataaaattggttttcatcgatttgactaatgtctgatatatctttgacaaaataagtgtgaatgattgtttttagagacacggcagctgcaaagagaggcacagacatggcaggagagggaggggtcacctgacccttctcatttcataggcatctattcctgcctggtgtttatgagcctgagacttggcagggctgtcctggtatataactccatggctctgcagcaagactcgaataggctggtggtgacacttggtgtgaccagtcaccttcaaagatgccattaagggttcacaagaaaatgaagggaaacagaaaaactgattatgaaagttgttgcctctcctgcttcttcatacagagtgtgtatgatattgctgtgtgatgttagactgcaacttagcccaacagctgttctagtaattggcagtttctcatcgagttaagcctacctgataaagaagcacgcttacatttattgattacccccgtaaaatgaacaatacatccaacaagncttctagcaaaaatgttcttattaacctcctttttatactaaggaaaaactgggtacaacacaaatcttcatcaacagaagaataccaactgttatacagtcataaaacgatcccagaagttcactccataccatcaaaaccaggaacccacactgatgcccctgatggcagaaaatcatgatacaaaaatgagagaaacgagagagagaaaatgtactagagtcatggtagtgggtaaaagccaaagagctcagtttctactcatgatattcattagaagaaccaaaggaacatgagccaacagctgtaagggtccaggtctgcacaaggtgcctgttgggtgcagggttctgttggctccagtgatatatctcaggtgggctaatttttacggacatagccgctgcaaaaatctatcaaacaataataaagggatagctacttgcatgctaatttaccattgtatagaagggagaacaggcatcagattgttttcgtcaaataaaagcaaaaccaagatttatgaagaaaagaggaaagaggaaaaaaaatcgcctgggacctttgtgattttgctccccttggataagagacttgacagaaagctttcaaagaggtcactgtggcctgtcttcttgagacacacgacacttgttcaccacggaaaacaattacagatgttggaggactttaaaatatcctagtttagcagttcatcctatgccacagaatctgtgtgtgatgtccaccatgtccttctgtggtacaccccttcagttaagccaggagggtgcctctccgctcagtggaatatcatacatcaatgtgtagaaagtttgttgtgctggcaagtaaatgacaaaagggacattgatagaattaggaaacaaattggaatatgatctgttaccgttcccatggaagataaatttgcagaatatactcaaattagaagcattaaataaacgctgtaatttaaaatggcacatcccattctctacactacagaaatatctgcaggagtgaccaaagatatgtgtacaactatggtagagattgcagcatcagttataatcctaaaaccatgaaacccaccttatttcaaaaacatcttggtaaagaccgtcg

SEQ ID NO: 444324 - DNA, 2584 bp, Homo sapiens
  misc_feature (1455)..(1455): n is a, c, g, or t
cgtcagcgcatatctaaccattgacagttgcttcgttttccaacggccttgaactggcataaacccttgctgtcaataagctctatacttcagtaatgtaagtttgaatttcatcctggctgcataagtcactttccattttgacaaagtctagaaatatttttctccatctccttgaatatgggtaatggatacctattgtggggcccactctcaatctcatggttttattttaatttagttctcaatagatatgcctcagctgcttaaaaaccattgaaaatggcccatggccttgtccatctaacagagtccagtaaaatcctgacaatggaatggggagagagaaagtgagaaccaccaaactcagcacaaaacgactgagtttaaacctctgtgctaagagatgatcagagtctatcatggcttctagtagcatgagaccatgtctcacgaatgaccctaggctcccatgacaatgcctacctaagaaagctcaaggctgccaggggaacttactttagtctagccaatacttgatgatggcagtttcaggatctttctttcttatagcacttactaagaagggaatccttcctccatccctttgatatatgtgtgtatctcctagggacttcaatgtatctttgcccaggatctgaaaggcaatacttttgaggtgtagttctcaggaaggactgagcctctgtcttccagtctctgtgggaggttagaatcctaacttctaatattgccagctggcagacacagctgtcctgatgaggcagacatttaaaatgaccaatcttttgtaatgtttcacttgtgccctgccccctgccctctcccctgcctctctctcccattagaatgccatcacctctgcacaaatgcgaacagaaccagccccttcctctacggtcagtagttactgaataaaattggttttcatcgatttgactaatgtctgatatatctttgacaaaataagtgtgaatgattgtttttagagacacggcagctgcaaagagaggcacagacatggcaggagagggaggggtcacctgacccttctcatttcataggcatctattcctgcctggtgtttatgagcctgagacttggcagggctgtcctggtatataactccatggctctgcagcaagactcgaataggctggtggtgacacttggtgtgaccagtcaccttcaaagatgccattaagggttcacaagaaaatgaagggaaacagaaaaactgattatgaaagttgttgcctctcctgcttcttcatacagagtgtgtatgatattgctgtgtgatgttagactgcaacttagcccaacagctgttctagtaattggcagtttctcatcgagttaagcctacctgataaagaagcacgcttacatttattgattacccccgtaaaatgaacaatacatccaacaagncttctagcaaaaatgttcttattaacctcctttttatactaaggaaaaactgggtacaacacaaatcttcatcaacagaagaataccaactgttatacagtcataaaacgatcccagaagttcactccataccatcaaaaccaggaacccacactgatgcccctgatggcagaaaatcatgatacaaaaatgagagaaacgagagagagaaaatgtactagagtcatggtagtgggtaaaagccaaagagctcagtttctactcatgatattcattagaagaaccaaaggaacatgagccaacagctgtaagggtccaggtctgcacaaggtgcctgttgggtgcagggttctgttggctccagtgatatatctcaggtgggctaatttttacggacatagccgctgcaaaaatctatcaaacaataataaagggatagctacttgcatgctaatttaccattgtatagaagggagaacaggcatcagattgttttcgtcaaataaaagcaaaaccaagatttatgaagaaaagaggaaagaggaaaaaaaatcgcctgggacctttgtgattttgctccccttggataagagacttgacagaaagctttcaaagaggtcactgtggcctgtcttcttgagacacacgacacttgttcaccacggaaaacaattacagatgttggaggactttaaaatatcctagtttagcagttcatcctatgccacagaatctgtgtgtgatgtccaccatgtccttctgtggtacaccccttcagttaagccaggagggtgcctctccgctcagtggaatatcatacatcaatgtgtagaaagtttgttgtgctggcaagtaaatgacaaaagggacattgatagaattaggaaacaaattggaatatgatctgttaccgttcccatggaagataaatttgcagaatatactcaaattagaagcattaaataaacgctgtaatttaaaatggcacatcccattctctacactacagaaatatctgcaggagtgaccaaagatatgtgtacaactatggtagagattgcagcatcagttataatcctaaaaccatgaaacccaccttatttcaaaaacatcttggtaaagaccgtcg

SEQ ID NO: 444325 - DNA, 451 bp, Homo sapiens
aaagcatagagacaaaacccggcaactggcatataatactgtattagtctgagttatccagaggacaagatacacacacacacacacacacacacacacacacacacacgcatgcacgcacgcagagaagcccaagttctactctgagtaagctctatacctaggagagtcgaatatagttcaagaccaagtccaaggcttaaggcagaagactgatgtcccagctcaaagacagtggagcagaaacctttcttaacccatcatcttattcaagccgtccatgggttggatgaggcccacccacactcgggagggcaatctgcttcactcagtttactgattcaaatgtcaatctcttccagaaacaccctcaaagacacagtgagaaataatgtctaaccaaatgtctgggcacccccgacccaggcaaattgacacaaaaattaatttt

SEQ ID NO: 444326 - DNA, 5510 bp, Homo sapiens
  misc_feature (342)..(342): n is a, c, g, or t
  misc_feature (427)..(427): n is a, c, g, or t
  misc_feature (848)..(848): n is a, c, g, or t
  misc_feature (1245)..(1245): n is a, c, g, or t
  misc_feature (4381)..(4381): n is a, c, g, or t
gaattacaggcttgagccactgcgcctggcctggtctagtctccttttagagatgagaaaactgaggctcagggaggtaacctgttcaaggtcatgaactgtcttaagaccatagttgcaagtgacagagctgggtctcagatgcaacctcagacctgatactgactccagagctgtgcgcctaagcactagagcacatagcctccttgccccagggaaagaacaatgggaggttgtgggtgacctctgggtctcagggccctgggatatagggactgtgccttttttttttttttttttttgagacaaagtttcgctcttgttgcccaggctggagtgcantggcatgatctcagctcactgcaacctccgcctcccaggttcaattgattctcctgcctcagcctcccaagtagctgggattacnggcatgtgccaccacacccggctaatttttgtatttttggtggagatggggtttcgccatattgatcaggctggtctcgaactcctgacctcaggtgatccgcctgccttggcctcccaaaatgctgagattacaggtgtgagtgcccatgcctggcaggactgtgccttttgcattttcaaatgaaggaaatgagtatttcttgagtgttgaccgtgtgtccccccggcaccgtgtcatgtgctggttatgcacacacgatattctgtttcatccccggacagctctgtgagcccccaccccagagcctggagttgcagaggcagctacaggaggagcaggcctcctaccagcgcaagctgcaggcctacctggagggccagcagcggcaggcccagcttgtgtgcagcggctgcagggnaagtacaagaagaggtactcggagctggagcagcagctgctggagagatccggagagctggagcagcagcggctaagggacacagagcacagccaagacctgcagagtgccctcatccggctggaggaggagccgcagaggagtgccagcctggcccaggtgaaagccatgctccgagaacatctggaccaggcaggctcggccaaccaggctctgagtgaggacatacaaaaggtgaccaatgactggacacgcagccgcaaggagctggagcagcgggaggcggcatggaggcgcgaggaggaggacctgctgcagctgggaggggagctggcccggacatcacgagctgtccaggaggcgggcctgggactgagcacgggcctgtggctggcanagagccgggccaaggcagccctggagaagcaggccctgctgcaggcccagctggaggagcagctgcgggacaaggtgctccactagaaggacctggcccagcagcagatgcaaagtgacctggacaaggctgacctcagtgccagagtgacagagctgggcctggcagtgaagcgtcttcagaagcagaatccggagaaggatcaggtcaacacggacctcaccgagaagcttgaggccctggaatccctgcggctacaggagcaggtggccctggagacagaggacggagaggggctacagcagagcctaagggacctggcacagtccgtcctgtcggacacagagcggcgtccagctgagcggctccgagcgcaccgcggatgactccttcggcagcctgcgggggctctcggcccagcagaccccgtccccaccgcggcgctcctcgcccggccgaggccgttcaccccgccgaggcccctccccggcctgctcagactcctccacgctcgccctgatccactccaccttacacaagcacgagctgcaggtccaggacatgcgtgggcgctatgaggcaagccaggacctgctgggcaccctgcggaagcagcttagcgacagcgagagtgagcggcgggccctagaggaacagctgcagcgcctgcgggacaagaccgacagcaccatgcaggcccacgaggacgcccagcgcgaggtgcagcggctgcggagcgccaaagagctcctgagaagggagaagagcaacctggcccacagcctgcaggtggcccagcagcaggccaaggagctgcggcaggagcggaagaagctgcaggctgcccaggaggagctgcggcgccagcggtactggctgggggaagagcaggaggacgcagtgcaggatggtgtgcgggtgcgccgggagcttgagcgcagccatagacaactggagcagctggaagggaagcgctcagtcctggccaaggagctggtggaggtgagggaggcgctgagccgcgccacactgcaacgggacatgctgcaggccgagaaggccgaggtggccgaggcgctgaccaaggctgagggcagaggaggcctccctgcaggactccctgtccaagctgagcgccctcaacgagagccttgctcaggacaagttggatctgaaccgccttgtcacccaggccacagctggaggaagaaaagtgcgccctgcagggccggcagcggcaggcgaagcaggaggccacagtggcacgggaagagcaggagcggctggaggcgctgcggttggaacaggaggtggcgcggcagggcctggagggctccctatgagcggcggagcaggcccaggaggcagtggagcagcagctccccacgctgcatcatgagtgcagccggctgcaggagcagctagcgcagaaacaccctcaaagacacagtgagaaataatgtctaaccaaatgtctgggcacccccgacccaggcaaattgacacaaaaattaattttcacaaatactatcaatagaagtgactaataaatgtggcatcatgtcctgcctgtttatcccatgacaattagtatagtcgagcgtaacattggcttccgttcccttatagtagcaacatgtaggagtttcatttaaagtgaggataattttgaccttacagagtttctccctacccctatctaccattgccacttgtggattgtcattttgccatgactttcttttaaaaaatatcaataagctctatacttcagtaatgtaagtttgaatttcatcctggctgcataagtcactttccattttgacaaagtctagaaatatttttctccatctccttgaatatgggtaatggatacctattgtggggcccactctcaatctcatggttttattttaatttagttctcaatagatatgcctcagctgcttaaaaaccattgaaaatggcccatggccttgtccatctaacagagtccagtaaaatcctgacaatggaatggggagagagaaagtgagaaccaccaaactcagcacaaaacgactgagtttaaacctctgtgctaagagatgatcagagtctatcatggcttctagtagcatgagaccatgtctcacgaatgaccctaggctcccatgacaatgcctacctaagaaagctcaaggctgccaggggaacttactttagtctagccaatacttgatgatggcagtttcaggatctttctttcttatagcacttactaagaagggaatccttcctccatccctttgatatatgtgtgtatctcctagggacttcaatgtatctttgcccaggatctgaaaggcaatacttttgaggtgtagttctcaggaaggactgagcctctgtcttccagtctctgtgggaggttagaatcctaacttctaatattgccagctggcagacacagctgtcctgatgaggcagacatttaaaatgaccaatcttttgtaatgtttcacttgtgccctgccccctgccctctcccctgcctctctctcccattagaatgccatcacctctgcacaaatgcgaacagaaccagccccttcctctacggtcagtagttactgaataaaattggttttcatcgatttgactaatgtctgatatatctttgacaaaataagtgtgaatgattgtttttagagacacggcagctgcaaagagaggcacagacatggcaggagagggaggggtcacctgacccttctcatttcataggcatctattcctgcctggtgtttatgagcctgagacttggcagggctgtcctggtatataactccatggctctgcagcaagactcgaataggctggtggtgacacttggtgtgaccagtcaccttcaaagatgccattaagggttcacaagaaaatgaagggaaacagaaaaactgattatgaaagttgttgcctctcctgcttcttcatacagagtgtgtatgatattgctgtgtgatgttagactgcaacttagcccaacagctgttctagtaattggcagtttctcatcgagttaagcctacctgataaagaagcacgcttacatttattgattacccccgtaaaatgaacaatacatccaacaagncttctagcaaaaatgttcttattaacctcctttttatactaaggaaaaactgggtacaacacaaatcttcatcaacagaagaataccaactgttatacagtcataaaacgatcccagaagttcactccataccatcaaaaccaggaacccacactgatgcccctgatggcagaaaatcatgatacaaaaatgagagaaacgagagagagaaaatgtactagagtcatggtagtgggtaaaagccaaagagctcagtttctactcatgatattcattagaagaaccaaaggaacatgagccaacagctgtaagggtccaggtctgcacaaggtgcctgttgggtgcagggttctgttggctccagtgatatatctcaggtgggctaatttttacggacatagccgctgcaaaaatctatcaaacaataataaagggatagctacttgcatgctaatttaccattgtatagaagggagaacaggcatcagattgttttcgtcaaataaaagcaaaaccaagatttatgaagaaaagaggaaagaggaaaaaaaatcgcctgggacctttgtgattttgctccccttggataagagacttgacagaaagctttcaaagaggtcactgtggcctgtcttcttgagacacacgacacttgttcaccacggaaaacaattacagatgttggaggactttaaaatatcctagtttagcagttcatcctatgccacagaatctgtgtgtgatgtccaccatgtccttctgtggtacaccccttcagttaagccaggagggtgcctctccgctcagtggaatatcatacatcaatgtgtagaaagtttgttgtgctggcaagtaaatgacaaaagggacattgatagaattaggaaacaaattggaatatgatctgttaccgttcccatggaagataaatttgcagaatatactcaaattagaagcattaaataaacgctgtaatttaaaatggcacatcccattctctacactacagaaatatctgcaggagtgaccaaagatatgtgtacaactatggtagagattgcagcatcagttataatcctaaaaccatgaaacccaccttatttcaaaaacatcttggtaaagaccgtcg

SEQ ID NO: 444327 - DNA, 730 bp, Homo sapiens
gaagcactgggaggtcttctcagtaacaacactaaagtaattgctatttttccagcctgtggaaccacagaagtgactgtaactaaaattagacatttctttctgattcattctctactcacgggattgtcagaccccagtcttcttctggactctataaactttttagaaatcatcagcaggctcctggagaagcttaaatgaactcacacaatatgtgacagtgaactccctgggagagtgaaaaccaaagtctaagccagtgtctccatttacttgtgtgattgtgggcaagtcattcaagtgctttgaggctcaggtcttaattcatgaaatggaggtaataataccttgttggcagacctcacttggttaaaatgataatgttgatagttacaatagttacatttaattgatcaattgttttatgcaagggctttatttgtgctatctcagtttgtcacatcaatgaattagaaagatacgaaagtatttccaatttacaaatgaggagtctgagtctgggagtcattctgtcatgtgtccactgtcacctgctcattggtggcagcactgagattaggatctaagtccacttcaccgcagaagcagggcttctaaatactgttctatggcaagagcaccctgctctcacaaaatgcataaaacttcctatctcaccattataattttgactgatattaaacaaagagaagtattattattatta

SEQ ID NO: 444328 - DNA, 4964 bp, Homo sapiens
agaagacaccagtgcctcagaaactgctcggtcagacggtgatagcgagccacgcattcacagggccactgctgctcacagaagcagtgaggatgatgccaggatgatgtctgcctcgcgcctggctgggactctgatcccagccatggccttcctctcctgcgtgagaccagaaagctgggagccctgcgtggagacttggccctaaaccacacagaagagctggcatgaaacccagagctttcagactccggagcctcagcccttcaccccgattccattgcttcttgctaaatgctgccgttttatcacggaggtggttcctaatattacttatcaatgcatggagctgaatttctacaaaatccccgacaacctccccttctcaaccaagaacctggacctgagctttaatcccctgaggcatttaggcagctatagcttcttcagtttcccagaactgcaggtgctggatttatccaggtgtgaaatccagacaattgaagatggggcatatcagagcctaagccacctctctaccttaatattgacaggaaaccccatccagagtttagccctgggagccttttctggactatcaagtttacagaagctggtggctgtggagacaaatctagcatctctagagaacttccccattggacatctcaaaactttgaaagaacttaatgtggctcacaatcttatccaatctttcaaattacctgagtatttttctaatctgaccaatctagagcacttggacctttccagcaacaagattcaaagtatttattgcacagacttgcgggttctacatcaaatgcccctactcaatctctctttagacctgtccctgaaccctatgaactttatccaaccaggtgcatttaaagaaattaggcttcataagctgactttaagaaataattttgatagtttaaatgtaatgaaaacttgtattcaaggtctggctggtttagaagtccatcgtttggttctgggagaatttagaaatgaaggaaacttggaaaagtttgacaaatctgctctagagggcctgtgcaatttgaccattgaagaattccgattagcatacttagactactacctcgatgatattattgacttatttaattgtttgacaaatgtttcttcattttccctggtgagtgtgactattgaaagggtaaaagacttttcttataatttcggatggcaacatttagaattagttaactgtaaatttggacagtttcccacattgaaactcaaatctctcaaaaggcttactttcacttccaacaaaggtgggaatgctttttcagaagttgatctaccaagccttgagtttctagatctcagtagaaatggcttgagtttcaaaggttgctgttctcaaagtgattttgggacaaccagcctaaagtatttagatctgagcttcaatggtgttattaccatgagttcaaacttcttgggcttagaacaactagaacatctggatttccagcattccaatttgaaacaaatgagtgagttttcagtattcctatcactcagaaacctcatttaccttgacatttctcatactcacaccagagttgctttcaatggcatcttcaatggcttgtccagtctcgaagtcttgaaaatggctggcaattctttccaggaaaacttccttccagatatcttcacagagctgagaaacttgaccttcctggacctctctcagtgtcaactggagcagttgtctccaacagcatttaactcactctccagtcttcaggtactaaatatgagccacaacaacttcttttcattggatacgtttccttataagtgtctgaactccctccaggttcttgattacagtctcaatcacataatgacttccaaaaaacaggaactacagcattttccaagtagtctagctttcttaaatcttactcagaatgactttgcttgtacttgtgaacaccagagtttcctgcaatggatcaaggaccagaggcagctcttggtggaagttgaacgaatggaatgtgcaacaccttcagataagcagggcatgcctgtgctgagtttgaatatcacctgtcagatgaataagaccatcattggtgtgtcggtcctcagtgtgcttgtagtatctgttgtagcagttctggtctataagttctattttcacctgatgcttcttgctggctgcataaagtatggtagaggtgaaaacatctatgatgcctttgttatctactcaagccaggatgaggactgggtaaggaatgagctagtaaagaatttagaagaaggggtgcctccatttcagctctgccttcactacagagactttattcccggtgtggccattgctgccaacatcatccatgaaggtttccataaaagccgaaaggtgattgttgtggtgtcccagcacttcatccagagccgctggtgtatctttgaatatgagattgctcagacctggcagtttctgagcagtcgtgctggtatcatcttcattgtcctgcagaaggtggagaagaccctgctcaggcagcaggtggagctgtaccgccttctcagcaggaacacttacctggagtgggaggacagtgtcctggggcggcacatcttctggagacgactcagaaaagccctgctggatggtaaatcatggaatccagaaggaacagtgggtacaggatgcaattggcaggaagcaacatctatctgaagaggaaaaataaaaacctcctgaggcatttcttgcccagctgggtccaacacttgttcagttaataagtattaaatgctgccacatgtcaggccttatgctaagggtgagtaattccatggtgcactagatatgcagggctgctaatctcaaggagcttccagtgcagagggaataaatgctagactaaaatacagagtcttccaggtgggcatttcaaccaactcagtcaaggaacccatgacaaagaaagtcatttcaactcttacctcatcaagttgaataaagacagagaaaacagaaagagacattgttcttttcctgagtcttttgaatggaaattgtattatgttatagccatcataaaaccattttggtagttttgactgaactgggtgttcactttttcctttttgattgaatacaatttaaattctacttgatgactgcagtcgtcaaggggctcctgatgcaagatgccccttccattttaagtctgtctccttacagaggttaaagtctagtggctaattcctaaggaaacctgattaacacatgctcacaaccatcctggtcattctcgagcatgttctattttttaactaatcacccctgatatatttttatttttatatatccagttttcatttttttacgtcttgcctataagctaatatcataaataaggttgtttaagacgtgcttcaaatatccatattaaccactatttttcaaggaagtatggaaaagtacactctgtcactttgtcactcgatgtcattccaaagttattgcctactaagtaatgactgtcatgaaagcagcattgaaataatttgtttaaagggggcactcttttaaacgggaagaaaatttccgcttcctggtcttatcatggacaatttgggctagaggcaggaaggaagtgggatgacctcaggaggtcaccttttcttgattccagaaacatatgggctgataaacccggggtgacctcatgaaatgagttgcagcagaagtttatttttttcagaacaagtgatgtttgatggacctctgaatctctttagggagacacagatggctgggatccctcccctgtacccttctcactgccaggagaactacgtgtgaaggtattcaaggcagggagtatacattgctgtttcctgttgggcaatgctccttgaccacattttgggaagagtggatgttatcattgagaaaacaatgtgtctggaattaatggggttcttataaagaaggttcccagaaaagaatgttcatccagcctcctcagaaacagaacattcaagaaaaggacaatcaggatgtcatcagggaaatgaaaataaaaaccacaatgagatatcaccttataccaggtagaatggctactataaaaaaatgaagtgtcatcaaggatatagagaaattggaacccttcttcactgctggagggaatggaaaatggtgtagccgttatgaaaaacagtacggaggtttctcaaaaattaaaaatagaactgctatatgatccagcaatctcacttctgtatatatacccaaaataattgaaatcagaatttcaagaaaatatttacactcccatgttcattgtggcactcttcacaatcactgtttccaaagttatggaaacaacccaaatttccattgaaaaataaatggacaaagaaaatgtgcatatacgtacaatgggatattattcagcctaaaaaaagggggaatcctgttatttatgacaacatgaataaacccggaggccattatgctatgtaaaatgagcaagtaacagaaagacaaatactgcctgatttcatttatatgaggttctaaaatagtcaaactcatagaagcagagaatagaacagtggttcctagggaaaaggaggaagggagaaatgaggaaatagggagttgtctaattggtataaaattatagtatgcaagatgaattagctctaaagatcagctgtatagcagagttcgtataatgaacaatactgtattatgcacttaacattttgttaagagggtacctctcatgttaagtgttcttaccatatacatatacacaaggaagcttttggaggtgatggatatatttattaccttgattgtggtgatggtttgacaggtatgtgactatgtctaaactcatcaaattgtatacattaaatatatgcagttttataatatc

SEQ ID NO: 444329 - DNA, 5783 bp, Homo sapiens
agaagacaccagtgcctcagaaactgctcggtcagacggtgatagcgagccacgcattcacagggccactgctgctcacagaagcagtgaggatgatgccaggatgatgtctgcctcgcgcctggctgggactctgatcccagccatggccttcctctcctgcgtgagaccagaaagctgggagccctgcgtggagacttggccctaaaccacacagaagagctggcatgaaacccagagctttcagactccggagcctcagcccttcaccccgattccattgcttcttgctaaatgctgccgttttatcacggaggtggttcctaatattacttatcaatgcatggagctgaatttctacaaaatccccgacaacctccccttctcaaccaagaacctggacctgagctttaatcccctgaggcatttaggcagctatagcttcttcagtttcccagaactgcaggtgctggatttatccaggtgtgaaatccagacaattgaagatggggcatatcagagcctaagccacctctctaccttaatattgacaggaaaccccatccagagtttagccctgggagccttttctggactatcaagtttacagaagctggtggctgtggagacaaatctagcatctctagagaacttccccattggacatctcaaaactttgaaagaacttaatgtggctcacaatcttatccaatctttcaaattacctgagtatttttctaatctgaccaatctagagcacttggacctttccagcaacaagattcaaagtatttattgcacagacttgcgggttctacatcaaatgcccctactcaatctctctttagacctgtccctgaaccctatgaactttatccaaccaggtgcatttaaagaaattaggcttcataagctgactttaagaaataattttgatagtttaaatgtaatgaaaacttgtattcaaggtctggctggtttagaagtccatcgtttggttctgggagaatttagaaatgaaggaaacttggaaaagtttgacaaatctgctctagagggcctgtgcaatttgaccattgaagaattccgattagcatacttagactactacctcgatgatattattgacttatttaattgtttgacaaatgtttcttcattttccctggtgagtgtgactattgaaagggtaaaagacttttcttataatttcggatggcaacatttagaattagttaactgtaaatttggacagtttcccacattgaaactcaaatctctcaaaaggcttactttcacttccaacaaaggtgggaatgctttttcagaagttgatctaccaagccttgagtttctagatctcagtagaaatggcttgagtttcaaaggttgctgttctcaaagtgattttgggacaaccagcctaaagtatttagatctgagcttcaatggtgttattaccatgagttcaaacttcttgggcttagaacaactagaacatctggatttccagcattccaatttgaaacaaatgagtgagttttcagtattcctatcactcagaaacctcatttaccttgacatttctcatactcacaccagagttgctttcaatggcatcttcaatggcttgtccagtctcgaagtcttgaaaatggctggcaattctttccaggaaaacttccttccagatatcttcacagagctgagaaacttgaccttcctggacctctctcagtgtcaactggagcagttgtctccaacagcatttaactcactctccagtcttcaggtactaaatatgagccacaacaacttcttttcattggatacgtttccttataagtgtctgaactccctccaggttcttgattacagtctcaatcacataatgacttccaaaaaacaggaactacagcattttccaagtagtctagctttcttaaatcttactcagaatgactttgcttgtacttgtgaacaccagagtttcctgcaatggatcaaggaccagaggcagctcttggtggaagttgaacgaatggaatgtgcaacaccttcagataagcagggcatgcctgtgctgagtttgaatatcacctgtcagatgaataagaccatcattggtgtgtcggtcctcagtgtgcttgtagtatctgttgtagcagttctggtctataagttctattttcacctgatgcttcttgctggctgcataaagtatggtagaggtgaaaacatctatgatgcctttgttatctactcaagccaggatgaggactgggtaaggaatgagctagtaaagaatttagaagaaggggtgcctccatttcagctctgccttcactacagagactttattcccggtgtggccattgctgccaacatcatccatgaaggtttccataaaagccgaaaggtgattgttgtggtgtcccagcacttcatccagagccgctggtgtatctttgaatatgagattgctcagacctggcagtttctgagcagtcgtgctggtatcatcttcattgtcctgcagaaggtggagaagaccctgctcaggcagcaggtggagctgtaccgccttctcagcaggaacacttacctggagtgggaggacagtgtcctggggcggcacatcttctggagacgactcagaaaagccctgctggatggtaaatcatggaatccagaaggaacagtgggtacaggatgcaattggcaggaagcaacatctatctgaagaggaaaaataaaaacctcctgaggcatttcttgcccagctgggtccaacacttgttcagttaataagtattaaatgctgccacatgtcaggccttatgctaagggtgagtaattccatggtgcactagatatgcagggctgctaatctcaaggagcttccagtgcagagggaataaatgctagactaaaatacagagtcttccaggtgggcatttcaaccaactcagtcaaggaacccatgacaaagaaagtcatttcaactcttacctcatcaagttgaataaagacagagaaaacagaaagagacattgttcttttcctgagtcttttgaatggaaattgtattatgttatagccatcataaaaccattttggtagttttgactgaactgggtgttcactttttcctttttgattgaatacaatttaaattctacttgatgactgcagtcgtcaaggggctcctgatgcaagatgccccttccattttaagtctgtctccttacagaggttaaagtctagtggctaattcctaaggaaacctgattaacacatgctcacaaccatcctggtcattctcgagcatgttctattttttaactaatcacccctgatatatttttatttttatatatccagttttcatttttttacgtcttgcctataagctaatatcataaataaggttgtttaagacgtgcttcaaatatccatattaaccactatttttcaaggaagtatggaaaagtacactctgtcactttgtcactcgatgtcattccaaagttattgcctactaagtaatgactgtcatgaaagcagcattgaaataatttgtttaaagggggcactcttttaaacgggaagaaaatttccgcttcctggtcttatcatggacaatttgggctagaggcaggaaggaagtgggatgacctcaggaggtcaccttttcttgattccagaaacatatgggctgataaacccggggtgacctcatgaaatgagttgcagcagaagtttatttttttcagaacaagtgatgtttgatggacctctgaatctctttagggagacacagatggctgggatccctcccctgtacccttctcactgccaggagaactacgtgtgaaggtattcaaggcagggagtatacattgctgtttcctgttgggcaatgctccttgaccacattttgggaagagtggatgttatcattgagaaaacaatgtgtctggaattaatggggttcttataaagaaggttcccagaaaagaatgttcatccagcctcctcagaaacagaacattcaagaaaaggacaatcaggatgtcatcagggaaatgaaaataaaaaccacaatgagatatcaccttataccaggtagaatggctactataaaaaaatgaagtgtcatcaaggatatagagaaattggaacccttcttcactgctggagggaatggaaaatggtgtagccgttatgaaaaacagtacggaggtttctcaaaaattaaaaatagaactgctatatgatccagcaatctcacttctgtatatatacccaaaataattgaaatcagaatttcaagaaaatatttacactcccatgttcattgtggcactcttcacaatcactgtttccaaagttatggaaacaacccaaatttccattgaaaaataaatggacaaagaaaatgtgcatatacgtacaatgggatattattcagcctaaaaaaagggggaatcctgttatttatgacaacatgaataaacccggaggccattatgctatgtaaaatgagcaagtaacagaaagacaaatactgcctgatttcatttatatgaggttctaaaatagtcaaactcatagaagcagagaatagaacagtggttcctagggaaaaggaggaagggagaaatgaggaaatagggagttgtctaattggtataaaattatagtatgcaagatgaattagctctaaagatcagctgtatagcagagttcgtataatgaacaatactgtattatgcacttaacattttgttaagagggtacctctcatgttaagtgttcttaccatatacatatacacaaggaagcttttggaggtgatggatatatttattaccttgattgtggtgatggtttgacaggtatgtgactatgtctaaactcatcaaattgtatacattaaatatatgcagttttataatatcaattatgtctgaatgaagctataaaaaagaaaagacaacaaaattcagttgtcaaaactggaaatatgaccacagtcagaagtgtttgttactgagtgtttcagagtgtgtttggtttgagcaggtctagggtgattgaacatccctgggtgtgtttccatgtctcatgtactagtgaaagtagatgtgtgcatttgtgcacatatccctatgtatccctatcagggctgtgtgtatttgaaagtgtgtgtgtccgcatgatcatatctgtatagaagagagtgtgattatatttcttgaagaatacatccatttgaaatggatgtctatggctgtttgagatgagttctctactcttgtgcttgtacagtagtctccccttatcccttatgcttggtggatacgttcttagaccccaagtggatctctgagaccgcagatggtaccaaacctcatatatgcaatattttttcctatacataaatacctaagataaagttcatcttctgaattaggcacagtaagagattaacaataactaacaataaaattgaatagttataataatatattgtaataaaagttatgtgaatgtgatctctttctttctctctctcaaaatatcttactgtactgtactcacctgctcattggtggcagcactgagattaggatctaagtccacttcaccgcagaagcagggcttctaaatactgttctatggcaagagcaccctgctctcacaaaatgcataaaacttcctatctcaccattataattttgactgatattaaacaaagagaagtattattattatta

SEQ ID NO: 444330 - DNA, 4677 bp, Homo sapiens
agaagacaccagtgcctcagaaactgctcggtcagacggtgatagcgagccacgcattcacagggccactgctgctcacagaagcagtgaggatgatgccaggatgatgtctgcctcgcgcctggctgggactctgatcccagccatggccttcctctcctgcgtgagaccagaaagctgggagccctgcgtggaggtgtgaaatccagacaattgaagatggggcatatcagagcctaagccacctctctaccttaatattgacaggaaaccccatccagagtttagccctgggagccttttctggactatcaagtttacagaagctggtggctgtggagacaaatctagcatctctagagaacttccccattggacatctcaaaactttgaaagaacttaatgtggctcacaatcttatccaatctttcaaattacctgagtatttttctaatctgaccaatctagagcacttggacctttccagcaacaagattcaaagtatttattgcacagacttgcgggttctacatcaaatgcccctactcaatctctctttagacctgtccctgaaccctatgaactttatccaaccaggtgcatttaaagaaattaggcttcataagctgactttaagaaataattttgatagtttaaatgtaatgaaaacttgtattcaaggtctggctggtttagaagtccatcgtttggttctgggagaatttagaaatgaaggaaacttggaaaagtttgacaaatctgctctagagggcctgtgcaatttgaccattgaagaattccgattagcatacttagactactacctcgatgatattattgacttatttaattgtttgacaaatgtttcttcattttccctggtgagtgtgactattgaaagggtaaaagacttttcttataatttcggatggcaacatttagaattagttaactgtaaatttggacagtttcccacattgaaactcaaatctctcaaaaggcttactttcacttccaacaaaggtgggaatgctttttcagaagttgatctaccaagccttgagtttctagatctcagtagaaatggcttgagtttcaaaggttgctgttctcaaagtgattttgggacaaccagcctaaagtatttagatctgagcttcaatggtgttattaccatgagttcaaacttcttgggcttagaacaactagaacatctggatttccagcattccaatttgaaacaaatgagtgagttttcagtattcctatcactcagaaacctcatttaccttgacatttctcatactcacaccagagttgctttcaatggcatcttcaatggcttgtccagtctcgaagtcttgaaaatggctggcaattctttccaggaaaacttccttccagatatcttcacagagctgagaaacttgaccttcctggacctctctcagtgtcaactggagcagttgtctccaacagcatttaactcactctccagtcttcaggtactaaatatgagccacaacaacttcttttcattggatacgtttccttataagtgtctgaactccctccaggttcttgattacagtctcaatcacataatgacttccaaaaaacaggaactacagcattttccaagtagtctagctttcttaaatcttactcagaatgactttgcttgtacttgtgaacaccagagtttcctgcaatggatcaaggaccagaggcagctcttggtggaagttgaacgaatggaatgtgcaacaccttcagataagcagggcatgcctgtgctgagtttgaatatcacctgtcagatgaataagaccatcattggtgtgtcggtcctcagtgtgcttgtagtatctgttgtagcagttctggtctataagttctattttcacctgatgcttcttgctggctgcataaagtatggtagaggtgaaaacatctatgatgcctttgttatctactcaagccaggatgaggactgggtaaggaatgagctagtaaagaatttagaagaaggggtgcctccatttcagctctgccttcactacagagactttattcccggtgtggccattgctgccaacatcatccatgaaggtttccataaaagccgaaaggtgattgttgtggtgtcccagcacttcatccagagccgctggtgtatctttgaatatgagattgctcagacctggcagtttctgagcagtcgtgctggtatcatcttcattgtcctgcagaaggtggagaagaccctgctcaggcagcaggtggagctgtaccgccttctcagcaggaacacttacctggagtgggaggacagtgtcctggggcggcacatcttctggagacgactcagaaaagccctgctggatggtaaatcatggaatccagaaggaacagtgggtacaggatgcaattggcaggaagcaacatctatctgaagaggaaaaataaaaacctcctgaggcatttcttgcccagctgggtccaacacttgttcagttaataagtattaaatgctgccacatgtcaggccttatgctaagggtgagtaattccatggtgcactagatatgcagggctgctaatctcaaggagcttccagtgcagagggaataaatgctagactaaaatacagagtcttccaggtgggcatttcaaccaactcagtcaaggaacccatgacaaagaaagtcatttcaactcttacctcatcaagttgaataaagacagagaaaacagaaagagacattgttcttttcctgagtcttttgaatggaaattgtattatgttatagccatcataaaaccattttggtagttttgactgaactgggtgttcactttttcctttttgattgaatacaatttaaattctacttgatgactgcagtcgtcaaggggctcctgatgcaagatgccccttccattttaagtctgtctccttacagaggttaaagtctagtggctaattcctaaggaaacctgattaacacatgctcacaaccatcctggtcattctcgagcatgttctattttttaactaatcacccctgatatatttttatttttatatatccagttttcatttttttacgtcttgcctataagctaatatcataaataaggttgtttaagacgtgcttcaaatatccatattaaccactatttttcaaggaagtatggaaaagtacactctgtcactttgtcactcgatgtcattccaaagttattgcctactaagtaatgactgtcatgaaagcagcattgaaataatttgtttaaagggggcactcttttaaacgggaagaaaatttccgcttcctggtcttatcatggacaatttgggctagaggcaggaaggaagtgggatgacctcaggaggtcaccttttcttgattccagaaacatatgggctgataaacccggggtgacctcatgaaatgagttgcagcagaagtttatttttttcagaacaagtgatgtttgatggacctctgaatctctttagggagacacagatggctgggatccctcccctgtacccttctcactgccaggagaactacgtgtgaaggtattcaaggcagggagtatacattgctgtttcctgttgggcaatgctccttgaccacattttgggaagagtggatgttatcattgagaaaacaatgtgtctggaattaatggggttcttataaagaaggttcccagaaaagaatgttcatccagcctcctcagaaacagaacattcaagaaaaggacaatcaggatgtcatcagggaaatgaaaataaaaaccacaatgagatatcaccttataccaggtagaatggctactataaaaaaatgaagtgtcatcaaggatatagagaaattggaacccttcttcactgctggagggaatggaaaatggtgtagccgttatgaaaaacagtacggaggtttctcaaaaattaaaaatagaactgctatatgatccagcaatctcacttctgtatatatacccaaaataattgaaatcagaatttcaagaaaatatttacactcccatgttcattgtggcactcttcacaatcactgtttccaaagttatggaaacaacccaaatttccattgaaaaataaatggacaaagaaaatgtgcatatacgtacaatgggatattattcagcctaaaaaaagggggaatcctgttatttatgacaacatgaataaacccggaggccattatgctatgtaaaatgagcaagtaacagaaagacaaatactgcctgatttcatttatatgaggttctaaaatagtcaaactcatagaagcagagaatagaacagtggttcctagggaaaaggaggaagggagaaatgaggaaatagggagttgtctaattggtataaaattatagtatgcaagatgaattagctctaaagatcagctgtatagcagagttcgtataatgaacaatactgtattatgcacttaacattttgttaagagggtacctctcatgttaagtgttcttaccatatacatatacacaaggaagcttttggaggtgatggatatatttattaccttgattgtggtgatggtttgacaggtatgtgactatgtctaaactcatcaaattgtatacattaaatatatgcagttttataatatc

SEQ ID NO: 444331 - DNA, 4844 bp, Homo sapiens
agaagacaccagtgcctcagaaactgctcggtcagacggtgatagcgagccacgcattcacagggccactgctgctcacagaagcagtgaggatgatgccaggatgatgtctgcctcgcgcctggctgggactctgatcccagccatggccttcctctcctgcgtgagaccagaaagctgggagccctgcgtggaggtggttcctaatattacttatcaatgcatggagctgaatttctacaaaatccccgacaacctccccttctcaaccaagaacctggacctgagctttaatcccctgaggcatttaggcagctatagcttcttcagtttcccagaactgcaggtgctggatttatccaggtgtgaaatccagacaattgaagatggggcatatcagagcctaagccacctctctaccttaatattgacaggaaaccccatccagagtttagccctgggagccttttctggactatcaagtttacagaagctggtggctgtggagacaaatctagcatctctagagaacttccccattggacatctcaaaactttgaaagaacttaatgtggctcacaatcttatccaatctttcaaattacctgagtatttttctaatctgaccaatctagagcacttggacctttccagcaacaagattcaaagtatttattgcacagacttgcgggttctacatcaaatgcccctactcaatctctctttagacctgtccctgaaccctatgaactttatccaaccaggtgcatttaaagaaattaggcttcataagctgactttaagaaataattttgatagtttaaatgtaatgaaaacttgtattcaaggtctggctggtttagaagtccatcgtttggttctgggagaatttagaaatgaaggaaacttggaaaagtttgacaaatctgctctagagggcctgtgcaatttgaccattgaagaattccgattagcatacttagactactacctcgatgatattattgacttatttaattgtttgacaaatgtttcttcattttccctggtgagtgtgactattgaaagggtaaaagacttttcttataatttcggatggcaacatttagaattagttaactgtaaatttggacagtttcccacattgaaactcaaatctctcaaaaggcttactttcacttccaacaaaggtgggaatgctttttcagaagttgatctaccaagccttgagtttctagatctcagtagaaatggcttgagtttcaaaggttgctgttctcaaagtgattttgggacaaccagcctaaagtatttagatctgagcttcaatggtgttattaccatgagttcaaacttcttgggcttagaacaactagaacatctggatttccagcattccaatttgaaacaaatgagtgagttttcagtattcctatcactcagaaacctcatttaccttgacatttctcatactcacaccagagttgctttcaatggcatcttcaatggcttgtccagtctcgaagtcttgaaaatggctggcaattctttccaggaaaacttccttccagatatcttcacagagctgagaaacttgaccttcctggacctctctcagtgtcaactggagcagttgtctccaacagcatttaactcactctccagtcttcaggtactaaatatgagccacaacaacttcttttcattggatacgtttccttataagtgtctgaactccctccaggttcttgattacagtctcaatcacataatgacttccaaaaaacaggaactacagcattttccaagtagtctagctttcttaaatcttactcagaatgactttgcttgtacttgtgaacaccagagtttcctgcaatggatcaaggaccagaggcagctcttggtggaagttgaacgaatggaatgtgcaacaccttcagataagcagggcatgcctgtgctgagtttgaatatcacctgtcagatgaataagaccatcattggtgtgtcggtcctcagtgtgcttgtagtatctgttgtagcagttctggtctataagttctattttcacctgatgcttcttgctggctgcataaagtatggtagaggtgaaaacatctatgatgcctttgttatctactcaagccaggatgaggactgggtaaggaatgagctagtaaagaatttagaagaaggggtgcctccatttcagctctgccttcactacagagactttattcccggtgtggccattgctgccaacatcatccatgaaggtttccataaaagccgaaaggtgattgttgtggtgtcccagcacttcatccagagccgctggtgtatctttgaatatgagattgctcagacctggcagtttctgagcagtcgtgctggtatcatcttcattgtcctgcagaaggtggagaagaccctgctcaggcagcaggtggagctgtaccgccttctcagcaggaacacttacctggagtgggaggacagtgtcctggggcggcacatcttctggagacgactcagaaaagccctgctggatggtaaatcatggaatccagaaggaacagtgggtacaggatgcaattggcaggaagcaacatctatctgaagaggaaaaataaaaacctcctgaggcatttcttgcccagctgggtccaacacttgttcagttaataagtattaaatgctgccacatgtcaggccttatgctaagggtgagtaattccatggtgcactagatatgcagggctgctaatctcaaggagcttccagtgcagagggaataaatgctagactaaaatacagagtcttccaggtgggcatttcaaccaactcagtcaaggaacccatgacaaagaaagtcatttcaactcttacctcatcaagttgaataaagacagagaaaacagaaagagacattgttcttttcctgagtcttttgaatggaaattgtattatgttatagccatcataaaaccattttggtagttttgactgaactgggtgttcactttttcctttttgattgaatacaatttaaattctacttgatgactgcagtcgtcaaggggctcctgatgcaagatgccccttccattttaagtctgtctccttacagaggttaaagtctagtggctaattcctaaggaaacctgattaacacatgctcacaaccatcctggtcattctcgagcatgttctattttttaactaatcacccctgatatatttttatttttatatatccagttttcatttttttacgtcttgcctataagctaatatcataaataaggttgtttaagacgtgcttcaaatatccatattaaccactatttttcaaggaagtatggaaaagtacactctgtcactttgtcactcgatgtcattccaaagttattgcctactaagtaatgactgtcatgaaagcagcattgaaataatttgtttaaagggggcactcttttaaacgggaagaaaatttccgcttcctggtcttatcatggacaatttgggctagaggcaggaaggaagtgggatgacctcaggaggtcaccttttcttgattccagaaacatatgggctgataaacccggggtgacctcatgaaatgagttgcagcagaagtttatttttttcagaacaagtgatgtttgatggacctctgaatctctttagggagacacagatggctgggatccctcccctgtacccttctcactgccaggagaactacgtgtgaaggtattcaaggcagggagtatacattgctgtttcctgttgggcaatgctccttgaccacattttgggaagagtggatgttatcattgagaaaacaatgtgtctggaattaatggggttcttataaagaaggttcccagaaaagaatgttcatccagcctcctcagaaacagaacattcaagaaaaggacaatcaggatgtcatcagggaaatgaaaataaaaaccacaatgagatatcaccttataccaggtagaatggctactataaaaaaatgaagtgtcatcaaggatatagagaaattggaacccttcttcactgctggagggaatggaaaatggtgtagccgttatgaaaaacagtacggaggtttctcaaaaattaaaaatagaactgctatatgatccagcaatctcacttctgtatatatacccaaaataattgaaatcagaatttcaagaaaatatttacactcccatgttcattgtggcactcttcacaatcactgtttccaaagttatggaaacaacccaaatttccattgaaaaataaatggacaaagaaaatgtgcatatacgtacaatgggatattattcagcctaaaaaaagggggaatcctgttatttatgacaacatgaataaacccggaggccattatgctatgtaaaatgagcaagtaacagaaagacaaatactgcctgatttcatttatatgaggttctaaaatagtcaaactcatagaagcagagaatagaacagtggttcctagggaaaaggaggaagggagaaatgaggaaatagggagttgtctaattggtataaaattatagtatgcaagatgaattagctctaaagatcagctgtatagcagagttcgtataatgaacaatactgtattatgcacttaacattttgttaagagggtacctctcatgttaagtgttcttaccatatacatatacacaaggaagcttttggaggtgatggatatatttattaccttgattgtggtgatggtttgacaggtatgtgactatgtctaaactcatcaaattgtatacattaaatatatgcagttttataatatc

SEQ ID NO: 444332 - DNA, 5699 bp, Homo sapiens
agaagacaccagtgcctcagaaactgctcggtcagacggtgatagcgagccacgcattcacagggccactgctgctcacagaagcagtgaggatgatgccaggatgatgtctgcctcgcgcctggctgggactctgatcccagccatggccttcctctcctgcgtgagaccagaaagctgggagccctgcgtggagacttggccctaaaccacacagaagagctggcatgaaacccagagctttcagactccggagcctcagcccttcaccccgattccattgcttcttgctaaatgctgccgttttatcacggaggtggttcctaatattacttatcaatgcatggagctgaatttctacaaaatccccgacaacctccccttctcaaccaagaacctggacctgagctttaatcccctgaggcatttaggcagctatagcttcttcagtttcccagaactgcaggtgctggatttatccaggtgtgaaatccagacaattgaagatggggcatatcagagcctaagccacctctctaccttaatattgacaggaaaccccatccagagtttagccctgggagccttttctggactatcaagtttacagaagctggtggctgtggagacaaatctagcatctctagagaacttccccattggacatctcaaaactttgaaagaacttaatgtggctcacaatcttatccaatctttcaaattacctgagtatttttctaatctgaccaatctagagcacttggacctttccagcaacaagattcaaagtatttattgcacagacttgcgggttctacatcaaatgcccctactcaatctctctttagacctgtccctgaaccctatgaactttatccaaccaggtgcatttaaagaaattaggcttcataagctgactttaagaaataattttgatagtttaaatgtaatgaaaacttgtattcaaggtctggctggtttagaagtccatcgtttggttctgggagaatttagaaatgaaggaaacttggaaaagtttgacaaatctgctctagagggcctgtgcaatttgaccattgaagaattccgattagcatacttagactactacctcgatgatattattgacttatttaattgtttgacaaatgtttcttcattttccctggtgagtgtgactattgaaagggtaaaagacttttcttataatttcggatggcaacatttagaattagttaactgtaaatttggacagtttcccacattgaaactcaaatctctcaaaaggcttactttcacttccaacaaaggtgggaatgctttttcagaagttgatctaccaagccttgagtttctagatctcagtagaaatggcttgagtttcaaaggttgctgttctcaaagtgattttgggacaaccagcctaaagtatttagatctgagcttcaatggtgttattaccatgagttcaaacttcttgggcttagaacaactagaacatctggatttccagcattccaatttgaaacaaatgagtgagttttcagtattcctatcactcagaaacctcatttaccttgacatttctcatactcacaccagagttgctttcaatggcatcttcaatggcttgtccagtctcgaagtcttgaaaatggctggcaattctttccaggaaaacttccttccagatatcttcacagagctgagaaacttgaccttcctggacctctctcagtgtcaactggagcagttgtctccaacagcatttaactcactctccagtcttcaggtactaaatatgagccacaacaacttcttttcattggatacgtttccttataagtgtctgaactccctccaggttcttgattacagtctcaatcacataatgacttccaaaaaacaggaactacagcattttccaagtagtctagctttcttaaatcttactcagaatgactttgcttgtacttgtgaacaccagagtttcctgcaatggatcaaggaccagaggcagctcttggtggaagttgaacgaatggaatgtgcaacaccttcagataagcagggcatgcctgtgctgagtttgaatatcacctgtcagatgaataagaccatcattggtgtgtcggtcctcagtgtgcttgtagtatctgttgtagcagttctggtctataagttctattttcacctgatgcttcttgctggctgcataaagtatggtagaggtgaaaacatctatgatgcctttgttatctactcaagccaggatgaggactgggtaaggaatgagctagtaaagaatttagaagaaggggtgcctccatttcagctctgccttcactacagagactttattcccggtgtggccattgctgccaacatcatccatgaaggtttccataaaagccgaaaggtgattgttgtggtgtcccagcacttcatccagagccgctggtgtatctttgaatatgagattgctcagacctggcagtttctgagcagtcgtgctggtatcatcttcattgtcctgcagaaggtggagaagaccctgctcaggcagcaggtggagctgtaccgccttctcagcaggaacacttacctggagtgggaggacagtgtcctggggcggcacatcttctggagacgactcagaaaagccctgctggatggtaaatcatggaatccagaaggaacagtgggtacaggatgcaattggcaggaagcaacatctatctgaagaggaaaaataaaaacctcctgaggcatttcttgcccagctgggtccaacacttgttcagttaataagtattaaatgctgccacatgtcaggccttatgctaagggtgagtaattccatggtgcactagatatgcagggctgctaatctcaaggagcttccagtgcagagggaataaatgctagactaaaatacagagtcttccaggtgggcatttcaaccaactcagtcaaggaacccatgacaaagaaagtcatttcaactcttacctcatcaagttgaataaagacagagaaaacagaaagagacattgttcttttcctgagtcttttgaatggaaattgtattatgttatagccatcataaaaccattttggtagttttgactgaactgggtgttcactttttcctttttgattgaatacaatttaaattctacttgatgactgcagtcgtcaaggggctcctgatgcaagatgccccttccattttaagtctgtctccttacagaggttaaagtctagtggctaattcctaaggaaacctgattaacacatgctcacaaccatcctggtcattctcgagcatgttctattttttaactaatcacccctgatatatttttatttttatatatccagttttcatttttttacgtcttgcctataagctaatatcataaataaggttgtttaagacgtgcttcaaatatccatattaaccactatttttcaaggaagtatggaaaagtacactctgtcactttgtcactcgatgtcattccaaagttattgcctactaagtaatgactgtcatgaaagcagcattgaaataatttgtttaaagggggcactcttttaaacgggaagaaaatttccgcttcctggtcttatcatggacaatttgggctagaggcaggaaggaagtgggatgacctcaggaggtcaccttttcttgattccagaaacatatgggctgataaacccggggtgacctcatgaaatgagttgcagcagaagtttatttttttcagaacaagtgatgtttgatggacctctgaatctctttagggagacacagatggctgggatccctcccctgtacccttctcactgccaggagaactacgtgtgaaggtattcaaggcagggagtatacattgctgtttcctgttgggcaatgctccttgaccacattttgggaagagtggatgttatcattgagaaaacaatgtgtctggaattaatggggttcttataaagaaggttcccagaaaagaatgttcatccagcctcctcagaaacagaacattcaagaaaaggacaatcaggatgtcatcagggaaatgaaaataaaaaccacaatgagatatcaccttataccaggtagaatggctactataaaaaaatgaagtgtcatcaaggatatagagaaattggaacccttcttcactgctggagggaatggaaaatggtgtagccgttatgaaaaacagtacggaggtttctcaaaaattaaaaatagaactgctatatgatccagcaatctcacttctgtatatatacccaaaataattgaaatcagaatttcaagaaaatatttacactcccatgttcattgtggcactcttcacaatcactgtttccaaagttatggaaacaacccaaatttccattgaaaaataaatggacaaagaaaatgtgcatatacgtacaatgggatattattcagcctaaaaaaagggggaatcctgttatttatgacaacatgaataaacccggaggccattatgctatgtaaaatgagcaagtaacagaaagacaaatactgcctgatttcatttatatgaggttctaaaatagtcaaactcatagaagcagagaatagaacagtggttcctagggaaaaggaggaagggagaaatgaggaaatagggagttgtctaattggtataaaattatagtatgcaagatgaattagctctaaagatcagctgtatagcagagttcgtataatgaacaatactgtattatgcacttaacattttgttaagagggtacctctcatgttaagtgttcttaccatatacatatacacaaggaagcttttggaggtgatggatatatttattaccttgattgtggtgatggtttgacaggtatgtgactatgtctaaactcatcaaattgtatacattaaatatatgcagttttataatatcaattatgtctgaatgaagctataaaaaagaaaagacaacaaaattcagttgtcaaaactggaaatatgaccacagtcagaagtgtttgttactgagtgtttcagagtgtgtttggtttgagcaggtctagggtgattgaacatccctgggtgtgtttccatgtctcatgtactagtgaaagtagatgtgtgcatttgtgcacatatccctatgtatccctatcagggctgtgtgtatttgaaagtgtgtgtgtccgcatgatcatatctgtatagaagagagtgtgattatatttcttgaagaatacatccatttgaaatggatgtctatggctgtttgagatgagttctctactcttgtgcttgtacagtagtctccccttatcccttatgcttggtggatacgttcttagaccccaagtggatctctgagaccgcagatggtaccaaacctcatatatgcaatattttttcctatacataaatacctaagataaagttcatcttctgaattaggcacagtaagagattaacaataactaacaataaaattgaatagttataataatatattgtaataaaagttatgtgaatgtgatctctttctttctctctctcaaaatatcttactgtactgtactcacctattttcagaccataactgaccatgaaacctgggaaagtgaaactgtggataagtgaggaactaacatacatacatgattgtttatctaca

SEQ ID NO: 444333 - DNA, 376 bp, Homo sapiens
ccagaatgctaaggttgccgctttcacttcctctcaccctttagcccagaactgctttgaatacaccaattgctgtggggcggctcgaggaagagaagacaccagtgcctcagaaactgctcggtcagacggtgatagcgagccacgcattcacagggccactgctgctcacagaagcagtgaggatgatgccaggatgatgtctgcctcgcgcctggctgggactctgatcccagccatggccttcctctcctgcgtgagaccagaaagctgggagccctgcgtggaggtatgtggctggagtcagctcctctgaactttccctcacttctgcccagaacttctcactgtgtgccctggtttgtttatttttgca

SEQ ID NO: 444334 - DNA, 467 bp, Homo sapiens
agaaaaaacgggtggcggagtcggtgggggaggtgggtgggagtgtgggtgggacacaaagaataacaccagctctgtccctgtagtcacctgccggtgggcgaggatcctctccctgggataagcactcccagccccgtttatcagaaacacaggcaaggaaattggaactgccacccagcccagcatggtggctcaattggttggttgcgttgtcagttgtctcttcgttttgttaaggtttttaataagtacgtttggcataatgtcttttaatgggtttgtaatatttgtaacggttttagcagcctataacttttcagctggtgcttttacttagggaaaaaaacaatttgtaaatacagaacattgtttaaaagacataaccatagaacatagcttcctgtttgtggattttgtttcctatatattcaaagtaaaatgacttacaggagccaaaaaatgtg

SEQ ID NO: 444335 - DNA, 4842 bp, Homo sapiens
aaccaaacggcgtcgcccttttacaccttcccggagcggcagtcatcccaaatacaaactacatgttccaggatgctttgggcggcagatctcgcggaagccgcgaggagagcccggccccgtctcgcgcgcctgcttccgcctccctgtggcggcggcttgttgttgtggaggccaaaatggcggctcaggcggcggcagcggcccaggcggcggcggcccaggctgcgcaggccgaggcggccgactcgtggtacctggcgcttctgggcttcgctgagcacttccgcacttccagcccgcccaaaatccgcctgtgcgtgcactgcctgcaggccgtgttccccttcaagccgccgcagcgcatcgaggcccgtacacacctgcagctgggctccgttctctatcaccacaccaagaacagcgagcaggcgcgcagccacctggagaaggcgtggttgatatcacagcaaatcccacagttcgaagatgttaaatttgaagcagcaagtctgttgtctgaattgtactgtcaagagaattccgttgatgcagcaaagccgctgctgcggaaggcgatccagatctcacagcagaccccatattggcactgccgcctgctcttccagctcgctcaactgcacacgcttgagaaggacctggtgtctgcctgtgacctcctgggtgtaggggccgagtacgcccgggtggtgggatctgaatacacacgggcgctgttcctcctcagcaaggggatgctgctgctgatggagcgaaagctgcaggaggtgcacccgctgctgaccctctgcgggcagatcgtggagaactggcaggggaaccccatccagaaggagtcgctgcgtgtcttcttcctggtgctccaggtcacccactatctggatgccgggcaggtgaagagcgtgaagccgtgtctgaagcagctgcagcagtgcatccagaccatctccacactgcacgatgatgagatcctgcccagcaaccccgctgacctcttccactggctgcccaaggagcacatgtgtgtgcttgtctacctggtgactgtgatgcactccatgcaggccggctacctggagaaggcgcagaagtacacggacaaggccctcatgcagctggagaagctcaagatgctggactgcagccccatcctgtcatccttccaagtgatcctgctggagcacatcatcatgtgccgccttgtcacgggtcacaaggccacggcgctgcaggagatctcccaggtctgccagctgtgccagcagtccccccggctcttctccaaccatgcagcacagctgcacacattgctgggcctgtactgtgtctctgtcaactgcatggacaacgcggaagcccagttcaccacggccctgcggctcaccaaccaccaggagctgtgggccttcatcgtcaccaacctggcgagtgtgtatatacgggaaggaaatagacaccaagaggtactctacagtctgctggagaggatcaacccggaccacagcttccctgtcagctcgcactgcctccgagcagccgccttctatgtgcgtgggctcttctccttcttccagggacgctacaacgaggccaagcgatttctgcgggaaactctgaagatgtccaatgctgaggacctgaaccggctcacagcctgctccctcgtgcttctgggccacatcttctatgtgctgggaaaccacagggagagtaacaacatggtggtgcctgccatgcagctcgccagcaagatcccggacatgtcggtacagctgtggtcgtcagcactgctgagagacctgaataaagcctgtgggaacgccatggatgcccatgaagccgcccagatgcaccagaacttctcgcagcagctgctccaggaccacattgaggcctgcagcctccccgaacacaacctcatcacgtggacagacggtccaccccccgtgcagttccaagctcagaatggacccaacaccagcctggccagcctcctgtgaggccttgatggggccatccagctccgcagggcctgcgcgtctccggcttccacccagacggcactcaagcctgcccccgaggcgtgcttccttcctgattgtctctagagcttccaagtcctgggaatgtgcggggccagtccctgccctcccaggaggggtggtagccgttcccacctcgcagcaggacccccagtgcagaggctcacaggtggcacacaggcgctgtctctccagagccatccttcagagtggacctcagtgccagtcctgcctcagcatctgggtcacgtcggccaggagtagggtgcaggcctccagcaggtcctaatcctgtgtgccagggcaggcagtgccccaggggcaccacgcctgactctccatcacccaggccttgatgccgagcgggagtagagtgtttcctctgctcaaggcaatttccagagcccggatgccagtttctggcctgaatttggagggaagaagtaatggccctagtgtgggacgaagcacagatcccagcacttttcccagctttctctccagcatcagtccctgcagcagctggggcctctggtcaggaaccctcagggacccaggaactcagcttccaaacatctgcaccttgaccggactcgccatcccgccgtgggggtgcaggtgattgtaaacacgggtgtgcatgtggatgcacacgggtgtgcggtgaagatctgtggagatggagctgggagctgaggctcctgttgcaccagccaccttcccccatcttgtggctgctgaggggcaggaagcgggggagtgggctcgtctcctaaatttaagatcacctcctcagctagcttagagtgcgtggcacgggccccccgcccccgagatctggagcccagggactttcttcctggcagatctgtggccttccctgctcagcctcttggtccccccactccctccaccgcctcaccttccctgctgggtctctggggcacagtgtgaaacccgcaccctagccaggccccagggagcctccgctgggcccagacagcagcgtttggttttatccacttttcttggataatcaggaggtgccccagtggtcacagtgtggcattccgagttggggcgggtggtcgggtcaagatagcagcagcaggtgtcagggctcaagacaccaccccctccagcttctggggcccaggagcctctccctgctacagggggtgggggtcctgctcagcagggtaggtggtggttttaggtcttgtcaccctcactcagtggaactgcctctgggagctttggcgtctgtgactaaagggacgctggattgctcaggtcagctgctcggggctcccaggctgggtgtgccttagccacaggcagggctgtcaataacccccttcctcactggccaccacctgacatcagcaccagtgacaggctggtcagagggcggggctggtgagggtttgtcctaagaggaccaccgccatctctgggtctccagggggagagcctggccctgtcctttgctacccagggctgcccccaggcccatgaagccaataggagagcgtgtggcactggcccacaaactgtccctgtcctgtcttcctcccgagccatggcctctgctagctccaccttgaaggagccccccacatcctcccctacatcccagagatgccaccacttgtgtctccacaatgtgctcctgcccacccgggttccgcactgtccgacccctgcacaccactcatgtcaccacggcgtgcatcatgttcatccccatctatttatttaagcctttctttgcttgtagggcattttgtatgtagagcagttgaaaacagaacctcagaacttaacatctgtcctgatgttaaagtgcttttcatgaccaccctgttatctatgtatatgtaaagttaaggatgagatcttaagtttacaattaaaaactcagtactcaatatttaatattctactcgagctttatggaagccaaatcatgtgcatgtgtgtgtgtgcgtgtgtgcaagctttgaacctccttccacagccgcatcttctcatgacacaaagcttttgataagtactttcctgtgggtcgctcagggcctcatagcatctcattcaattacaagaatagaggccagacacggtggcgcatgcctgtagtcccagctaactgggaggctgaggcaggaggatcacttgagcccaggagattgaggctgcagtgagcatgatcgcgacactgcactccagcctgggtgacggtgagactttgtctcaaaaaaaaaaaaaaaaacaatggaaggcagacagcaagtccctgaggacacatcacacagtgtcctgtagctaagtgtctaggaaaaaacaaaaactccaaacccttcagtggatgaggacaaggtcgcagaaaggcattctgttgacagatgaacagccgaaagctggccagaccctcctgtatgcctctgcccttttatcagaaacacaggcaaggaaattggaactgccacccagcccagcatggtggctcaattggttggttgcgttgtcagttgtctcttcgttttgttaaggtttttaataagtacgtttggcataatgtcttttaatgggtttgtaatatttgtaacggttttagcagcctataacttttcagctggtgcttttacttagggaaaaaaacaatttgtaaatacagaacattgtttaaaagacataaccatagaacatagcttcctgtttgtggattttgtttcctatatattcaaagtaaaatgacttacaggagccaaaaaatgtg

SEQ ID NO: 444336 - DNA, 5910 bp, Homo sapiens
aaccaaacggcgtcgcccttttacaccttcccggagcggcagtcatcccaaatacaaactacatgttccaggatgctttgggcggcagatctcgcggaagccgcgaggagagcccggccccgtctcgcgcgcctgcttccgcctccctgtggcggcggcttgttgttgtggaggccaaaatggcggctcaggcggcggcagcggcccaggcggcggcggcccaggctgcgcaggccgaggcggccgactcgtggtacctggcgcttctgggcttcgctgagcacttccgcacttccagcccgcccaaaatccgcctgtgcgtgcactgcctgcaggccgtgttccccttcaagccgccgcagcgcatcgaggcccgtacacacctgcagctgggctccgttctctatcaccacaccaagaacagcgagcaggcgcgcagccacctggagaaggcgtggttgatatcacagcaaatcccacagttcgaagatgttaaatttgaagcagcaagtctgttgtctgaattgtactgtcaagagaattccgttgatgcagcaaagccgctgctgcggaaggcgatccagatctcacagcagaccccatattggcactgccgcctgctcttccagctcgctcaactgcacacgcttgagaaggacctggtgtctgcctgtgacctcctgggtgtaggggccgagtacgcccgggtggtgggatctgaatacacacgggcgctgttcctcctcagcaaggggatgctgctgctgatggagcgaaagctgcaggaggtgcacccgctgctgaccctctgcgggcagatcgtggagaactggcaggggaaccccatccagaaggagtcgctgcgtgtcttcttcctggtgctccaggtcacccactatctggatgccgggcaggtgaagagcgtgaagccgtgtctgaagcagctgcagcagtgcatccagaccatctccacactgcacgatgatgagatcctgcccagcaaccccgctgacctcttccactggctgcccaaggagcacatgtgtgtgcttgtctacctggtgactgtgatgcactccatgcaggccggctacctggagaaggcgcagaagtacacggacaaggccctcatgcagctggagaagctcaagatgctggactgcagccccatcctgtcatccttccaagtgatcctgctggagcacatcatcatgtgccgccttgtcacgggtcacaaggccacggcgctgcaggaggtaaggctggaagcaggaggggcgggaaggcccaggagtttgttgggtctcagcagtgtcagacaagagactgaattcaccaagtgcatactggcaggccagcccatcctgctgtctcgctgtcggccagcgttttacagccctgcatgggcaccactgatcagagaatctcatacaaaaaccagtggaggccgggcgcagtggctcacgcctgtcatcccagcagtttgggaggccgaggcgggtggatcacttgaggccaggagtttgagaccagcctggccaacatggcgaaaccccgcctctactaaaaatataaaaattagccaggtgtggtggcagacacctgtaatcccagttacttgagaggctgaggcaggagaatagcctgaacccaggaggcagaggttgcagtgagccgagatcgcactactgcactccaacctgggcaacagagtgagactccatctcaaaaaaaaaaacccaaaaaactaatgggccatggcccaaaagcttgcacaccaaggggatagcgcacatggtctctggggatttggggggtcctttgacagtgattgttataccccaccctgccattaggaacactctacccccagtacccaccctcctgagagggcatgggggccctcagtaggctggaggtcctttacaacccagacacctgttggacagagtggaagagacgagtaacagacaagggtccctgtccacgatgggatctgggctgccctttgccctcatggtggacgtgtctgctggggctttgtaccccagtttggtcagacaggacatgggctcacccaccagctatggggtctctccattgctgctcagacgccaggtcccaggttgcagtcctgtgatggcagtacactctctcccggcagatctcccaggtctgccagctgtgccagcagtccccccggctcttctccaaccatgcagcacagctgcacacattgctgggcctgtactgtgtctctgtcaactgcatggacaacgcggaagcccagttcaccacggccctgcggctcaccaaccaccaggagctgtgggccttcatcgtcaccaacctggcgagtgtgtatatacgggaaggaaatagacaccaagaggtactctacagtctgctggagaggatcaacccggaccacagcttccctgtcagctcgcactgcctccgagcagccgccttctatgtgcgtgggctcttctccttcttccagggacgctacaacgaggccaagcgatttctgcgggaaactctgaagatgtccaatgctgaggacctgaaccggctcacagcctgctccctcgtgcttctgggccacatcttctatgtgctgggaaaccacagggagagtaacaacatggtggtgcctgccatgcagctcgccagcaagatcccggacatgtcggtacagctgtggtcgtcagcactgctgagagacctgaataaagcctgtgggaacgccatggatgcccatgaagccgcccagatgcaccagaacttctcgcagcagctgctccaggaccacattgaggcctgcagcctccccgaacacaacctcatcacgtggacagacggtccaccccccgtgcagttccaagctcagaatggacccaacaccagcctggccagcctcctgtgaggccttgatggggccatccagctccgcagggcctgcgcgtctccggcttccacccagacggcactcaagcctgcccccgaggcgtgcttccttcctgattgtctctagagcttccaagtcctgggaatgtgcggggccagtccctgccctcccaggaggggtggtagccgttcccacctcgcagcaggacccccagtgcagaggctcacaggtggcacacaggcgctgtctctccagagccatccttcagagtggacctcagtgccagtcctgcctcagcatctgggtcacgtcggccaggagtagggtgcaggcctccagcaggtcctaatcctgtgtgccagggcaggcagtgccccaggggcaccacgcctgactctccatcacccaggccttgatgccgagcgggagtagagtgtttcctctgctcaaggcaatttccagagcccggatgccagtttctggcctgaatttggagggaagaagtaatggccctagtgtgggacgaagcacagatcccagcacttttcccagctttctctccagcatcagtccctgcagcagctggggcctctggtcaggaaccctcagggacccaggaactcagcttccaaacatctgcaccttgaccggactcgccatcccgccgtgggggtgcaggtgattgtaaacacgggtgtgcatgtggatgcacacgggtgtgcggtgaagatctgtggagatggagctgggagctgaggctcctgttgcaccagccaccttcccccatcttgtggctgctgaggggcaggaagcgggggagtgggctcgtctcctaaatttaagatcacctcctcagctagcttagagtgcgtggcacgggccccccgcccccgagatctggagcccagggactttcttcctggcagatctgtggccttccctgctcagcctcttggtccccccactccctccaccgcctcaccttccctgctgggtctctggggcacagtgtgaaacccgcaccctagccaggccccagggagcctccgctgggcccagacagcagcgtttggttttatccacttttcttggataatcaggaggtgccccagtggtcacagtgtggcattccgagttggggcgggtggtcgggtcaagatagcagcagcaggtgtcagggctcaagacaccaccccctccagcttctggggcccaggagcctctccctgctacagggggtgggggtcctgctcagcagggtaggtggtggttttaggtcttgtcaccctcactcagtggaactgcctctgggagctttggcgtctgtgactaaagggacgctggattgctcaggtcagctgctcggggctcccaggctgggtgtgccttagccacaggcagggctgtcaataacccccttcctcactggccaccacctgacatcagcaccagtgacaggctggtcagagggcggggctggtgagggtttgtcctaagaggaccaccgccatctctgggtctccagggggagagcctggccctgtcctttgctacccagggctgcccccaggcccatgaagccaataggagagcgtgtggcactggcccacaaactgtccctgtcctgtcttcctcccgagccatggcctctgctagctccaccttgaaggagccccccacatcctcccctacatcccagagatgccaccacttgtgtctccacaatgtgctcctgcccacccgggttccgcactgtccgacccctgcacaccactcatgtcaccacggcgtgcatcatgttcatccccatctatttatttaagcctttctttgcttgtagggcattttgtatgtagagcagttgaaaacagaacctcagaacttaacatctgtcctgatgttaaagtgcttttcatgaccaccctgttatctatgtatatgtaaagttaaggatgagatcttaagtttacaattaaaaactcagtactcaatatttaatattctactcgagctttatggaagccaaatcatgtgcatgtgtgtgtgtgcgtgtgtgcaagctttgaacctccttccacagccgcatcttctcatgacacaaagcttttgataagtactttcctgtgggtcgctcagggcctcatagcatctcattcaattacaagaatagaggccagacacggtggcgcatgcctgtagtcccagctaactgggaggctgaggcaggaggatcacttgagcccaggagattgaggctgcagtgagcatgatcgcgacactgcactccagcctgggtgacggtgagactttgtctcaaaaaaaaaaaaaaaaacaatggaaggcagacagcaagtccctgaggacacatcacacagtgtcctgtagctaagtgtctaggaaaaaacaaaaactccaaacccttcagtggatgaggacaaggtcgcagaaaggcattctgttgacagatgaacagccgaaagctggccagaccctcctgtatgcctctgcccttgtcctgtgggttgagggggtctgaccaggaggccacctacagcaggaagtgaggctgccatgtttccttgagacacagctgcctctccccagctctgtccctgtagtcacctgccggtgggcgaggatcctctccctgggataagcactcccagccccgtttatcagaaacacaggcaaggaaattggaactgccacccagcccagcatggtggctcaattggttggttgcgttgtcagttgtctcttcgttttgttaaggtttttaataagtacgtttggcataatgtcttttaatgggtttgtaatatttgtaacggttttagcagcctataacttttcagctggtgcttttacttagggaaaaaaacaatttgtaaatacagaacattgtttaaaagacataaccatagaacatagcttcctgtttgtggattttgtttcctatatattcaaagtaaaatgacttacaggagccaaaaaatgtg

SEQ ID NO: 444337 - DNA, 6226 bp, Homo sapiens
aaccaaacggcgtcgcccttttacaccttcccggagcggcagtcatcccaaatacaaactacatgttccaggatgctttgggcggcagatctcgcggaagccgcgaggagagcccggccccgtctcgcgcgcctgcttccgcctccctgtggcggcggcttgttgttgtggaggccaaaatggcggctcaggcggcggcagcggcccaggcggcggcggcccaggctgcgcaggccgaggcggccgactcgtggtacctggcgcttctgggcttcgctgagcacttccgcacttccagcccgcccaaaatccgcctgtgcgtgcactgcctgcaggccgtgttccccttcaagccgccgcagcgcatcgaggcccgtacacacctgcagctgggctccgttctctatcaccacaccaagaacagcgagcaggcgcgcagccacctggagaaggcgtggttgatatcacagcaaatcccacagttcgaagatgttaaatttgaagcagcaagtctgttgtctgaattgtactgtcaagagaattccgttgatgcagcaaagccgctgctgcggaaggcgatccagatctcacagcagaccccatattggcactgccgcctgctcttccagctcgctcaactgcacacgcttgagaaggacctggtgtctgcctgtgacctcctgggtgtaggggccgagtacgcccgggtggtgggatctgaatacacacgggcgctgttcctcctcagcaaggggatgctgctgctgatggagcgaaagctgcaggaggtgcacccgctgctgaccctctgcgggcagatcgtggagaactggcaggggaaccccatccagaaggagtcgctgcgtgtcttcttcctggtgctccaggtcacccactatctggatgccgggcaggtgaagagcgtgaagccgtgtctgaagcagctgcagcagtgcatccagaccatctccacactgcacgatgatgagatcctgcccagcaaccccgctgacctcttccactggctgcccaaggagcacatgtgtgtgcttgtctacctggtgactgtgatgcactccatgcaggccggctacctggagaaggcgcagaagtacacggacaaggccctcatgcagctggagaagctcaagatgctggactgcagccccatcctgtcatccttccaagtgatcctgctggagcacatcatcatgtgccgccttgtcacgggtcacaaggccacggcgctgcaggaggtaaggctggaagcaggaggggcgggaaggcccaggagtttgttgggtctcagcagtgtcagacaagagactgaattcaccaagtgcatactggcaggccagcccatcctgctgtctcgctgtcggccagcgttttacagccctgcatgggcaccactgatcagagaatctcatacaaaaaccagtggaggccgggcgcagtggctcacgcctgtcatcccagcagtttgggaggccgaggcgggtggatcacttgaggccaggagtttgagaccagcctggccaacatggcgaaaccccgcctctactaaaaatataaaaattagccaggtgtggtggcagacacctgtaatcccagttacttgagaggctgaggcaggagaatagcctgaacccaggaggcagaggttgcagtgagccgagatcgcactactgcactccaacctgggcaacagagtgagactccatctcaaaaaaaaaaacccaaaaaactaatgggccatggcccaaaagcttgcacaccaaggggatagcgcacatggtctctggggatttggggggtcctttgacagtgattgttataccccaccctgccattaggaacactctacccccagtacccaccctcctgagagggcatgggggccctcagtaggctggaggtcctttacaacccagacacctgttggacagagtggaagagacgagtaacagacaagggtccctgtccacgatgggatctgggctgccctttgccctcatggtggacgtgtctgctggggctttgtaccccagtttggtcagacaggacatgggctcacccaccagctatggggtctctccattgctgctcagacgccaggtcccaggttgcagtcctgtgatggcagtacactctctcccggcagatctcccaggtctgccagctgtgccagcagtccccccggctcttctccaaccatgcagcacagctgcacacattgctgggcctgtactgtgtctctgtcaactgcatggacaacgcggaagcccagttcaccacggccctgcggctcaccaaccaccaggagctgtgggccttcatcgtcaccaacctggcgagtgtgtatatacgggaaggaaatagacaccaagaggtactctacagtctgctggagaggatcaacccggaccacagcttccctgtcagctcgcactgcctccgagcagccgccttctatgtgcgtgggctcttctccttcttccagggacgctacaacgaggccaagcgatttctgcgggaaactctgaagatgtccaatgctgaggacctgaaccggctcacagcctgctccctcgtgcttctgggccacatcttctatgtgctgggaaaccacagggagagtaacaacatggtggtgcctgccatgcagctcgccagcaagatcccggacatgtcggtacagctgtggtcgtcagcactgctgagagacctgaataaagcctgtgggaacgccatggatgcccatgaagccgcccagatgcaccagaacttctcgcagcagctgctccaggaccacattgaggcctgcagcctccccgaacacaacctcatcacggtacgggtgtgggtgttaggggacgggatcaggactagcgggctccccacctgcaagaggaaggggcaccttggctgtatttctcttttgtccaacaaaccctaactcagcctcaggtgatcccttgatgggggagatggccatgggcacccccacccaagcaagggacccaggtgtctcctcggggcccattggactggggcatggagaacagagtcccggctgtgtgagcagcccaaggaaggcagcattccaacctcttcttccctgggaacggtccacagtgcctcactcgcatgtcctctcctccccacagtggacagacggtccaccccccgtgcagttccaagctcagaatggacccaacaccagcctggccagcctcctgtgaggccttgatggggccatccagctccgcagggcctgcgcgtctccggcttccacccagacggcactcaagcctgcccccgaggcgtgcttccttcctgattgtctctagagcttccaagtcctgggaatgtgcggggccagtccctgccctcccaggaggggtggtagccgttcccacctcgcagcaggacccccagtgcagaggctcacaggtggcacacaggcgctgtctctccagagccatccttcagagtggacctcagtgccagtcctgcctcagcatctgggtcacgtcggccaggagtagggtgcaggcctccagcaggtcctaatcctgtgtgccagggcaggcagtgccccaggggcaccacgcctgactctccatcacccaggccttgatgccgagcgggagtagagtgtttcctctgctcaaggcaatttccagagcccggatgccagtttctggcctgaatttggagggaagaagtaatggccctagtgtgggacgaagcacagatcccagcacttttcccagctttctctccagcatcagtccctgcagcagctggggcctctggtcaggaaccctcagggacccaggaactcagcttccaaacatctgcaccttgaccggactcgccatcccgccgtgggggtgcaggtgattgtaaacacgggtgtgcatgtggatgcacacgggtgtgcggtgaagatctgtggagatggagctgggagctgaggctcctgttgcaccagccaccttcccccatcttgtggctgctgaggggcaggaagcgggggagtgggctcgtctcctaaatttaagatcacctcctcagctagcttagagtgcgtggcacgggccccccgcccccgagatctggagcccagggactttcttcctggcagatctgtggccttccctgctcagcctcttggtccccccactccctccaccgcctcaccttccctgctgggtctctggggcacagtgtgaaacccgcaccctagccaggccccagggagcctccgctgggcccagacagcagcgtttggttttatccacttttcttggataatcaggaggtgccccagtggtcacagtgtggcattccgagttggggcgggtggtcgggtcaagatagcagcagcaggtgtcagggctcaagacaccaccccctccagcttctggggcccaggagcctctccctgctacagggggtgggggtcctgctcagcagggtaggtggtggttttaggtcttgtcaccctcactcagtggaactgcctctgggagctttggcgtctgtgactaaagggacgctggattgctcaggtcagctgctcggggctcccaggctgggtgtgccttagccacaggcagggctgtcaataacccccttcctcactggccaccacctgacatcagcaccagtgacaggctggtcagagggcggggctggtgagggtttgtcctaagaggaccaccgccatctctgggtctccagggggagagcctggccctgtcctttgctacccagggctgcccccaggcccatgaagccaataggagagcgtgtggcactggcccacaaactgtccctgtcctgtcttcctcccgagccatggcctctgctagctccaccttgaaggagccccccacatcctcccctacatcccagagatgccaccacttgtgtctccacaatgtgctcctgcccacccgggttccgcactgtccgacccctgcacaccactcatgtcaccacggcgtgcatcatgttcatccccatctatttatttaagcctttctttgcttgtagggcattttgtatgtagagcagttgaaaacagaacctcagaacttaacatctgtcctgatgttaaagtgcttttcatgaccaccctgttatctatgtatatgtaaagttaaggatgagatcttaagtttacaattaaaaactcagtactcaatatttaatattctactcgagctttatggaagccaaatcatgtgcatgtgtgtgtgtgcgtgtgtgcaagctttgaacctccttccacagccgcatcttctcatgacacaaagcttttgataagtactttcctgtgggtcgctcagggcctcatagcatctcattcaattacaagaatagaggccagacacggtggcgcatgcctgtagtcccagctaactgggaggctgaggcaggaggatcacttgagcccaggagattgaggctgcagtgagcatgatcgcgacactgcactccagcctgggtgacggtgagactttgtctcaaaaaaaaaaaaaaaaacaatggaaggcagacagcaagtccctgaggacacatcacacagtgtcctgtagctaagtgtctaggaaaaaacaaaaactccaaacccttcagtggatgaggacaaggtcgcagaaaggcattctgttgacagatgaacagccgaaagctggccagaccctcctgtatgcctctgcccttgtcctgtgggttgagggggtctgaccaggaggccacctacagcaggaagtgaggctgccatgtttccttgagacacagctgcctctccccagctctgtccctgtagtcacctgccggtgggcgaggatcctctccctgggataagcactcccagccccgtttatcagaaacacaggcaaggaaattggaactgccacccagcccagcatggtggctcaattggttggttgcgttgtcagttgtctcttcgttttgttaaggtttttaataagtacgtttggcataatgtcttttaatgggtttgtaatatttgtaacggttttagcagcctataacttttcagctggtgcttttacttagggaaaaaaacaatttgtaaatacagaacattgtttaaaagacataaccatagaacatagcttcctgtttgtggattttgtttcctatatattcaaagtaaaatgacttacaggagccaaaaaatgtg

SEQ ID NO: 444338 - DNA, 5619 bp, Homo sapiens
aaccaaacggcgtcgcccttttacaccttcccggagcggcagtcatcccaaatacaaactacatgttccaggatgctttgggcggcagatctcgcggaagccgcgaggagagcccggccccgtctcgcgcgcctgcttccgcctccctgtggcggcggcttgttgttgtggaggccaaaatggcggctcaggcggcggcagcggcccaggcggcggcggcccaggctgcgcaggccgaggcggccgactcgtggtacctggcgcttctgggcttcgctgagcacttccgcacttccagcccgcccaaaatccgcctgtgcgtgcactgcctgcaggccgtgttccccttcaagccgccgcagcgcatcgaggcccgtacacacctgcagctgggctccgttctctatcaccacaccaagaacagcgagcaggcgcgcagccacctggagaaggcgtggttgatatcacagcaaatcccacagttcgaagatgttaaatttgaagcagcaagtctgttgtctgaattgtactgtcaagagaattccgttgatgcagcaaagccgctgctgcggaaggcgatccagatctcacagcagaccccatattggcactgccgcctgctcttccagctcgctcaactgcacacgcttgagaaggacctggtgtctgcctgtgacctcctgggtgtaggggccgagtacgcccgggtggtgggatctgaatacacacgggcgctgttcctcctcagcaaggggatgctgctgctgatggagcgaaagctgcaggaggtgcacccgctgctgaccctctgcgggcagatcgtggagaactggcaggggaaccccatccagaaggagtcgctgcgtgtcttcttcctggtgctccaggtcacccactatctggatgccgggcaggtgaagagcgtgaagccgtgtctgaagcagctgcagcagtgcatccagaccatctccacactgcacgatgatgagatcctgcccagcaaccccgctgacctcttccactggctgcccaaggagcacatgtgtgtgcttgtctacctggtgactgtgatgcactccatgcaggccggctacctggagaaggcgcagaagtacacggacaaggccctcatgcagctggagaagctcaagatgctggactgcagccccatcctgtcatccttccaagtgatcctgctggagcacatcatcatgtgccgccttgtcacgggtcacaaggccacggcgctgcaggaggtaaggctggaagcaggaggggcgggaaggcccaggagtttgttgggtctcagcagtgtcagacaagagactgaattcaccaagtgcatactggcaggccagcccatcctgctgtctcgctgtcggccagcgttttacagccctgcatgggcaccactgatcagagaatctcatacaaaaaccagtggaggccgggcgcagtggctcacgcctgtcatcccagcagtttgggaggccgaggcgggtggatcacttgaggccaggagtttgagaccagcctggccaacatggcgaaaccccgcctctactaaaaatataaaaattagccaggtgtggtggcagacacctgtaatcccagttacttgagaggctgaggcaggagaatagcctgaacccaggaggcagaggttgcagtgagccgagatcgcactactgcactccaacctgggcaacagagtgagactccatctcaaaaaaaaaaacccaaaaaactaatgggccatggcccaaaagcttgcacaccaaggggatagcgcacatggtctctggggatttggggggtcctttgacagtgattgttataccccaccctgccattaggaacactctacccccagtacccaccctcctgagagggcatgggggccctcagtaggctggaggtcctttacaacccagacacctgttggacagagtggaagagacgagtaacagacaagggtccctgtccacgatgggatctgggctgccctttgccctcatggtggacgtgtctgctggggctttgtaccccagtttggtcagacaggacatgggctcacccaccagctatggggtctctccattgctgctcagacgccaggtcccaggttgcagtcctgtgatggcagtacactctctcccggcagatctcccaggtctgccagctgtgccagcagtccccccggctcttctccaaccatgcagcacagctgcacacattgctgggcctgtactgtgtctctgtcaactgcatggacaacgcggaagcccagttcaccacggccctgcggctcaccaaccaccaggagctgtgggccttcatcgtcaccaacctggcgagtgtgtatatacgggaaggaaatagacaccaagaggtactctacagtctgctggagaggatcaacccggaccacagcttccctgtcagctcgcactgcctccgagcagccgccttctatgtgcgtgggctcttctccttcttccagggacgctacaacgaggccaagcgatttctgcgggaaactctgaagatgtccaatgctgaggacctgaaccggctcacagcctgctccctcgtgcttctgggccacatcttctatgtgctgggaaaccacagggagagtaacaacatggtggtgcctgccatgcagctcgccagcaagatcccggacatgtcggtacagctgtggtcgtcagcactgctgagagacctgaataaagcctgtgggaacgccatggatgcccatgaagccgcccagatgcaccagaacttctcgcagcagctgctccaggaccacattgaggcctgcagcctccccgaacacaacctcatcacggtacgggtgtgggtgttaggggacgggatcaggactagcgggctccccacctgcaagaggaaggggcaccttggctgtatttctcttttgtccaacaaaccctaactcagcctcaggtgatcccttgatgggggagatggccatgggcacccccacccaagcaagggacccaggtgtctcctcggggcccattggactggggcatggagaacagagtcccggctgtgtgagcagcccaaggaaggcagcattccaacctcttcttccctgggaacggtccacagtgcctcactcgcatgtcctctcctccccacagtggacagacggtccaccccccgtgcagttccaagctcagaatggacccaacaccagcctggccagcctcctgtgaggccttgatggggccatccagctccgcagggcctgcgcgtctccggcttccacccagacggcactcaagcctgcccccgaggcgtgcttccttcctgattgtctctagagcttccaagtcctgggaatgtgcggggccagtccctgccctcccaggaggggtggtagccgttcccacctcgcagcaggacccccagtgcagaggctcacaggtggcacacaggcgctgtctctccagagccatccttcagagtggacctcagtgccagtcctgcctcagcatctgggtcacgtcggccaggagtagggtgcaggcctccagcaggtcctaatcctgtgtgccagggcaggcagtgccccaggggcaccacgcctgactctccatcacccaggccttgatgccgagcgggagtagagtgtttcctctgctcaaggcaatttccagagcccggatgccagtttctggcctgaatttggagggaagaagtaatggccctagtgtgggacgaagcacagatcccagcacttttcccagctttctctccagcatcagtccctgcagcagctggggcctctggtcaggaaccctcagggacccaggaactcagcttccaaacatctgcaccttgaccggactcgccatcccgccgtgggggtgcaggtgattgtaaacacgggtgtgcatgtggatgcacacgggtgtgcggtgaagatctgtggagatggagctgggagctgaggctcctgttgcaccagccaccttcccccatcttgtggctgctgaggggcaggaagcgggggagtgggctcgtctcctaaatttaagatcacctcctcagctagcttagagtgcgtggcacgggccccccgcccccgagatctggagcccagggactttcttcctggcagatctgtggccttccctgctcagcctcttggtccccccactccctccaccgcctcaccttccctgctgggtctctggggcacagtgtgaaacccgcaccctagccaggccccagggagcctccgctgggcccagacagcagcgtttggttttatccacttttcttggataatcaggaggtgccccagtggtcacagtgtggcattccgagttggggcgggtggtcgggtcaagatagcagcagcaggtgtcagggctcaagacaccaccccctccagcttctggggcccaggagcctctccctgctacagggggtgggggtcctgctcagcagggtaggtggtggttttaggtcttgtcaccctcactcagtggaactgcctctgggagctttggcgtctgtgactaaagggacgctggattgctcaggtcagctgctcggggctcccaggctgggtgtgccttagccacaggcagggctgtcaataacccccttcctcactggccaccacctgacatcagcaccagtgacaggctggtcagagggcggggctggtgagggtttgtcctaagaggaccaccgccatctctgggtctccagggggagagcctggccctgtcctttgctacccagggctgcccccaggcccatgaagccaataggagagcgtgtggcactggcccacaaactgtccctgtcctgtcttcctcccgagccatggcctctgctagctccaccttgaaggagccccccacatcctcccctacatcccagagatgccaccacttgtgtctccacaatgtgctcctgcccacccgggttccgcactgtccgacccctgcacaccactcatgtcaccacggcgtgcatcatgttcatccccatctatttatttaagcctttctttgcttgtagggcattttgtatgtagagcagttgaaaacagaacctcagaacttaacatctgtcctgatgttaaagtgcttttcatgaccaccctgttatctatgtatatgtaaagttaaggatgagatcttaagtttacaattaaaaactcagtactcaatatttaatattctactcgagctttatggaagccaaatcatgtgcatgtgtgtgtgtgcgtgtgtgcaagctttgaacctccttccacagccgcatcttctcatgacacaaagcttttgataagtactttcctgtgggtcgctcagggcctcatagcatctcattcaattacaagaatagaggccagacacggtggcgcatgcctgtagtcccagctaactggggccacaggtgtgtgccaccatgctcagctaatttttttatttttggtagagactgggtctccatgttacccagactggtcttgaactcctgagctcgggcgatccacccacttcagcctcccaaagtgctggattgcagcatgacccactgtgcctggccctagagatgctatctctt

SEQ ID NO: 444339 - DNA, 4866 bp, Homo sapiens
aaccaaacggcgtcgcccttttacaccttcccggagcggcagtcatcccaaatacaaactacatgttccaggatgctttgggcggcagatctcgcggaagccgcgaggagagcccggccccgtctcgcgcgcctgcttccgcctccctgtggcggcggcttgttgttgtggaggccaaaatggcggctcaggcggcggcagcggcccaggcggcggcggcccaggctgcgcaggccgaggcggccgactcgtggtacctggcgcttctgggcttcgctgagcacttccgcacttccagcccgcccaaaatccgcctgtgcgtgcactgcctgcaggccgtgttccccttcaagccgccgcagcgcatcgaggcccgtacacacctgcagctgggctccgttctctatcaccacaccaagaacagcgagcaggcgcgcagccacctggagaaggcgtggttgatatcacagcaaatcccacagttcgaagatgttaaatttgaagcagcaagtctgttgtctgaattgtactgtcaagagaattccgttgatgcagcaaagccgctgctgcggaaggcgatccagatctcacagcagaccccatattggcactgccgcctgctcttccagctcgctcaactgcacacgcttgagaaggacctggtgtctgcctgtgacctcctgggtgtaggggccgagtacgcccgggtggtgggatctgaatacacacgggcgctgttcctcctcagcaaggggatgctgctgctgatggagcgaaagctgcaggaggtgcacccgctgctgaccctctgcgggcagatcgtggagaactggcaggggaaccccatccagaaggagtcgctgcgtgtcttcttcctggtgctccaggtcacccactatctggatgccgggcaggtgaagagcgtgaagccgtgtctgaagcagctgcagcagtgcatccagaccatctccacactgcacgatgatgagatcctgcccagcaaccccgctgacctcttccactggctgcccaaggagcacatgtgtgtgcttgtctacctggtgactgtgatgcactccatgcaggccggctacctggagaaggcgcagaagtacacggacaaggccctcatgcagctggagaagctcaagatgctggactgcagccccatcctgtcatccttccaagtgatcctgctggagcacatcatcatgtgccgccttgtcacgggtcacaaggccacggcgctgcaggaggtaaggctggaagcaggaggggcgggaaggcccaggagtttgttgggtctcagcagtgtcagacaagagactgaattcaccaagtgcatactggcaggccagcccatcctgctgtctcgctgtcggccagcgttttacagccctgcatgggcaccactgatcagagaatctcatacaaaaaccagtggaggccgggcgcagtggctcacgcctgtcatcccagcagtttgggaggccgaggcgggtggatcacttgaggccaggagtttgagaccagcctggccaacatggcgaaaccccgcctctactaaaaatataaaaattagccaggtgtggtggcagacacctgtaatcccagttacttgagaggctgaggcaggagaatagcctgaacccaggaggcagaggttgcagtgagccgagatcgcactactgcactccaacctgggcaacagagtgagactccatctcaaaaaaaaaaacccaaaaaactaatgggccatggcccaaaagcttgcacaccaaggggatagcgcacatggtctctggggatttggggggtcctttgacagtgattgttataccccaccctgccattaggaacactctacccccagtacccaccctcctgagagggcatgggggccctcagtaggctggaggtcctttacaacccagacacctgttggacagagtggaagagacgagtaacagacaagggtccctgtccacgatgggatctgggctgccctttgccctcatggtggacgtgtctgctggggctttgtaccccagtttggtcagacaggacatgggctcacccaccagctatggggtctctccattgctgctcagacgccaggtcccaggttgcagtcctgtgatggcagtacactctctcccggcagatctcccaggtctgccagctgtgccagcagtccccccggctcttctccaaccatgcagcacagctgcacacattgctgggcctgtactgtgtctctgtcaactgcatggacaacgcggaagcccagttcaccacggccctgcggctcaccaaccaccaggagctgtgggccttcatcgtcaccaacctggcgagtgtgtatatacgggaaggaaatagacaccaagaggtactctacagtctgctggagaggatcaacccggaccacagcttccctgtcagctcgcactgcctccgagcagccgccttctatgtgcgtgggctcttctccttcttccagggacgctacaacgaggccaagcgatttctgcgggaaactctgaagatgtccaatgctgaggacctgaaccggctcacagcctgctccctcgtgcttctgggccacatcttctatgtgctgggaaaccacagggagagtaacaacatggtggtgcctgccatgcagctcgccagcaagatcccggacatgtcggtacagctgtggtcgtcagcactgctgagagacctgaataaagcctgtgggaacgccatggatgcccatgaagccgcccagatgcaccagaacttctcgcagcagctgctccaggaccacattgaggcctgcagcctccccgaacacaacctcatcacgtggacagacggtccaccccccgtgcagttccaagctcagaatggacccaacaccagcctggccagcctcctgtgaggccttgatggggccatccagctccgcagggcctgcgcgtctccggcttccacccagacggcactcaagcctgcccccgaggcgtgcttccttcctgattgtctctagagcttccaagtcctgggaatgtgcggggccagtccctgccctcccaggaggggtggtagccgttcccacctcgcagcaggacccccagtgcagaggctcacaggtggcacacaggcgctgtctctccagagccatccttcagagtggacctcagtgccagtcctgcctcagcatctgggtcacgtcggccaggagtagggtgcaggcctccagcaggtcctaatcctgtgtgccagggcaggcagtgccccaggggcaccacgcctgactctccatcacccaggccttgatgccgagcgggagtagagtgtttcctctgctcaaggcaatttccagagcccggatgccagtttctggcctgaatttggagggaagaagtaatggccctagtgtgggacgaagcacagatcccagcacttttcccagctttctctccagcatcagtccctgcagcagctggggcctctggtcaggaaccctcagggacccaggaactcagcttccaaacatctgcaccttgaccggactcgccatcccgccgtgggggtgcaggtgattgtaaacacgggtgtgcatgtggatgcacacgggtgtgcggtgaagatctgtggagatggagctgggagctgaggctcctgttgcaccagccaccttcccccatcttgtggctgctgaggggcaggaagcgggggagtgggctcgtctcctaaatttaagatcacctcctcagctagcttagagtgcgtggcacgggccccccgcccccgagatctggagcccagggactttcttcctggcagatctgtggccttccctgctcagcctcttggtccccccactccctccaccgcctcaccttccctgctgggtctctggggcacagtgtgaaacccgcaccctagccaggccccagggagcctccgctgggcccagacagcagcgtttggttttatccacttttcttggataatcaggaggtgccccagtggtcacagtgtggcattccgagttggggcgggtggtcgggtcaagatagcagcagcaggtgtcagggctcaagacaccaccccctccagcttctggggcccaggagcctctccctgctacagggggtgggggtcctgctcagcagggtaggtggtggttttaggtcttgtcaccctcactcagtggaactgcctctgggagctttggcgtctgtgactaaagggacgctggattgctcaggtcagctgctcggggctcccaggctgggtgtgccttagccacaggcagggctgtcaataacccccttcctcactggccaccacctgacatcagcaccagtgacaggctggtcagagggcggggctggtgagggtttgtcctaagaggaccaccgccatctctgggtctccagggggagagcctggccctgtcctttgctacccagggctgcccccaggcccatgaagccaataggagagcgtgtggcactggcccacaaactgtccctgtcctgtcttcctcccgagccatggcctctgctagctccaccttgaaggagccccccacatcctcccctacatcccagagatgccaccacttgtgtctccacaatgtgctcctgcccacccgggttccgcactgtccgacccctgcacaccactcatgtcaccacggcgtgcatcatgttcatccccatctatttatttaagcctttctttgcttgtagggcattttgtatgtagagcagttgaaaacagaacctcagaacttaacatctgtcctgatgttaaagtgcttttcatgaccaccttcctctttacgagggatcctctagaacagct

SEQ ID NO: 444340 - DNA, 4771 bp, Homo sapiens
  misc_feature (4602)..(4602): n is a, c, g, or t
  misc_feature (4608)..(4608): n is a, c, g, or t
  misc_feature (4616)..(4617): n is a, c, g, or t
aaccaaacggcgtcgcccttttacaccttcccggagcggcagtcatcccaaatacaaactacatgttccaggatgctttgggcggcagatctcgcggaagccgcgaggagagcccggccccgtctcgcgcgcctgcttccgcctccctgtggcggcggcttgttgttgtggaggccaaaatggcggctcaggcggcggcagcggcccaggcggcggcggcccaggctgcgcaggccgaggcggccgactcgtggtacctggcgcttctgggcttcgctgagcacttccgcacttccagcccgcccaaaatccgcctgtgcgtgcactgcctgcaggccgtgttccccttcaagccgccgcagcgcatcgaggcccgtacacacctgcagctgggctccgttctctatcaccacaccaagaacagcgagcaggcgcgcagccacctggagaaggcgtggttgatatcacagcaaatcccacagttcgaagatgttaaatttgaagcagcaagtctgttgtctgaattgtactgtcaagagaattccgttgatgcagcaaagccgctgctgcggaaggcgatccagatctcacagcagaccccatattggcactgccgcctgctcttccagctcgctcaactgcacacgcttgagaaggacctggtgtctgcctgtgacctcctgggtgtaggggccgagtacgcccgggtggtgggatctgaatacacacgggcgctgttcctcctcagcaaggggatgctgctgctgatggagcgaaagctgcaggaggtgcacccgctgctgaccctctgcgggcagatcgtggagaactggcaggggaaccccatccagaaggagtcgctgcgtgtcttcttcctggtgctccaggtcacccactatctggatgccgggcaggtgaagagcgtgaagccgtgtctgaagcagctgcagcagtgcatccagaccatctccacactgcacgatgatgagatcctgcccagcaaccccgctgacctcttccactggctgcccaaggagcacatgtgtgtgcttgtctacctggtgactgtgatgcactccatgcaggccggctacctggagaaggcgcagaagtacacggacaaggccctcatgcagctggagaagctcaagatgctggactgcagccccatcctgtcatccttccaagtgatcctgctggagcacatcatcatgtgccgccttgtcacgggtcacaaggccacggcgctgcaggaggtaaggctggaagcaggaggggcgggaaggcccaggagtttgttgggtctcagcagtgtcagacaagagactgaattcaccaagtgcatactggcaggccagcccatcctgctgtctcgctgtcggccagcgttttacagccctgcatgggcaccactgatcagagaatctcatacaaaaaccagtggaggccgggcgcagtggctcacgcctgtcatcccagcagtttgggaggccgaggcgggtggatcacttgaggccaggagtttgagaccagcctggccaacatggcgaaaccccgcctctactaaaaatataaaaattagccaggtgtggtggcagacacctgtaatcccagttacttgagaggctgaggcaggagaatagcctgaacccaggaggcagaggttgcagtgagccgagatcgcactactgcactccaacctgggcaacagagtgagactccatctcaaaaaaaaaaacccaaaaaactaatgggccatggcccaaaagcttgcacaccaaggggatagcgcacatggtctctggggatttggggggtcctttgacagtgattgttataccccaccctgccattaggaacactctacccccagtacccaccctcctgagagggcatgggggccctcagtaggctggaggtcctttacaacccagacacctgttggacagagtggaagagacgagtaacagacaagggtccctgtccacgatgggatctgggctgccctttgccctcatggtggacgtgtctgctggggctttgtaccccagtttggtcagacaggacatgggctcacccaccagctatggggtctctccattgctgctcagacgccaggtcccaggttgcagtcctgtgatggcagtacactctctcccggcagatctcccaggtctgccagctgtgccagcagtccccccggctcttctccaaccatgcagcacagctgcacacattgctgggcctgtactgtgtctctgtcaactgcatggacaacgcggaagcccagttcaccacggccctgcggctcaccaaccaccaggagctgtgggccttcatcgtcaccaacctggcgagtgtgtatatacgggaaggaaatagacaccaagaggtactctacagtctgctggagaggatcaacccggaccacagcttccctgtcagctcgcactgcctccgagcagccgccttctatgtgcgtgggctcttctccttcttccagggacgctacaacgaggccaagcgatttctgcgggaaactctgaagatgtccaatgctgaggacctgaaccggctcacagcctgctccctcgtgcttctgggccacatcttctatgtgctgggaaaccacagggagagtaacaacatggtggtgcctgccatgcagctcgccagcaagatcccggacatgtcggtacagctgtggtcgtcagcactgctgagagacctgaataaagcctgtgggaacgccatggatgcccatgaagccgcccagatgcaccagaacttctcgcagcagctgctccaggaccacattgaggcctgcagcctccccgaacacaacctcatcacgtggacagacggtccaccccccgtgcagttccaagctcagaatggacccaacaccagcctggccagcctcctgtgaggccttgatggggccatccagctccgcagggcctgcgcgtctccggcttccacccagacggcactcaagcctgcccccgaggcgtgcttccttcctgattgtctctagagcttccaagtcctgggaatgtgcggggccagtccctgccctcccaggaggggtggtagccgttcccacctcgcagcaggacccccagtgcagaggctcacaggtggcacacaggcgctgtctctccagagccatccttcagagtggacctcagtgccagtcctgcctcagcatctgggtcacgtcggccaggagtagggtgcaggcctccagcaggtcctaatcctgtgtgccagggcaggcagtgccccaggggcaccacgcctgactctccatcacccaggccttgatgccgagcgggagtagagtgtttcctctgctcaaggcaatttccagagcccggatgccagtttctggcctgaatttggagggaagaagtaatggccctagtgtgggacgaagcacagatcccagcacttttcccagctttctctccagcatcagtccctgcagcagctggggcctctggtcaggaaccctcagggacccaggaactcagcttccaaacatctgcaccttgaccggactcgccatcccgccgtgggggtgcaggtgattgtaaacacgggtgtgcatgtggatgcacacgggtgtgcggtgaagatctgtggagatggagctgggagctgaggctcctgttgcaccagccaccttcccccatcttgtggctgctgaggggcaggaagcgggggagtgggctcgtctcctaaatttaagatcacctcctcagctagcttagagtgcgtggcacgggccccccgcccccgagatctggagcccagggactttcttcctggcagatctgtggccttccctgctcagcctcttggtccccccactccctccaccgcctcaccttccctgctgggtctctggggcacagtgtgaaacccgcaccctagccaggccccagggagcctccgctgggcccagacagcagcgtttggttttatccacttttcttggataatcaggaggtgccccagtggtcacagtgtggcattccgagttggggcgggtggtcgggtcaagatagcagcagcaggtgtcagggctcaagacaccaccccctccagcttctggggcccaggagcctctccctgctacagggggtgggggtcctgctcagcagggtaggtggtggttttaggtcttgtcaccctcactcagtggaactgcctctgggagctttggcgtctgtgactaaagggacgctggattgctcaggtcagctgctcggggctcccaggctgggtgtgccttagccacaggcagggctgtcaataacccccttcctcactggccaccacctgacatcagcaccagtgacaggctggtcagagggcggggctggtgagggtttgtcctaagaggaccaccgccatctctgggtctccagggggagagcctggccctgtcctttgctacccagggctgcccccaggcccatgaagccaataggagagcgtgtggcactggcccacaaactgtccctgtcctgtcttcctcccgagccatggcctctgctagctccaccttgaaggagcccaatctcctaatcaagntgcccntgttccannggtctgcccggtcgattgcgaccgcacctagtccgcggtagttaccattataagccttgggagctggtggagcggaacacaatatcgtcgtaggtcaccgtatttgaggggatacaacctttaaagggaggcggccacgttagaacgatctgtt

SEQ ID NO: 444341 - DNA, 427 bp, Homo sapiens
aaacctggaaccctatatgaatctgcatttctgatcagcccccattgtgggtctagggctaacggccatcagtgctttttctctgcttgaacaggtagaagcccccaaagttgtccattggccatgcccctgtgagggcatgagccagaagtgagggcagtttgtttttcagtgatacttcagagagggccatttgagatgggctctgaggtaagcataggagttcaccagacgcagaaggaggtcacaacctgggctgggttcagtaggtgggttccagattatccccaccccaacctgggctgggttcggcaagtggggtccaggctcctcactcccccttgctgctcttggttgacaggagagtaacaacatggtggtgcctgccatgcagctcgccagcaagatcccggacatgtcggtacag

SEQ ID NO: 444342 - DNA, 103 bp, Homo sapiens
ctttttcgcagtgtctgtacttccttaactggttgatatcacagcaaatcccacagttcgaagatgttaaatttgaagcagcaagtctgttgtctgaattgta

SEQ ID NO: 444343 - DNA, 5002 bp, Homo sapiens
aaccaaacggcgtcgcccttttacaccttcccggagcggcagtcatcccaaatacaaactacatgttccaggatgctttgggcggcagatctcgcggaagccgcgaggagagcccggccccgtctcgcgcgcctgcttccgcctccctgtggcggcggcttgttgttgtggaggccaaaatggcggctcaggcggcggcagcggcccaggcggcggcggcccaggctgcgcaggccgaggcggccgactcgtggtacctggcgcttctgggcttcgctgagcacttccgcacttccagcccgcccaaaatccgcctgtgcgtgcactgcctgcaggccgtgttccccttcaagccgccgcagcgcatcgaggcccgtacacacctgcagctgggctccgttctctatcaccacaccaagaacagcgagcaggcgcgcagccacctggagaaggcgtggttgatatcacagcaaatcccacagttcgaagatgttaaatttgaagcagcaagtctgttgtctgaattgtactgtcaagagaattccgttgatgcagcaaagccgctgctgcggaaggcgatccagatctcacagcagaccccatattggcactgccgcctgctcttccagctcgctcaactgcacacgcttgagaaggacctggtgtctgcctgtgacctcctgggtgtaggggccgagtacgcccgggtggtgggatctgaatacacacgggcgctgttcctcctcagcaaggggatgctgctgctgatggagcgaaagctgcaggaggtgcacccgctgctgaccctctgcgggcagatcgtggagaactggcaggggaaccccatccagaaggagtcgctgcgtgtcttcttcctggtgctccaggtcacccactatctggatgccgggcaggtgaagagcgtgaagccgtgtctgaagcagctgcagcagtgcatccagaccatctccacactgcacgatgatgagatcctgcccagcaaccccgctgacctcttccactggctgcccaaggagcacatgtgtgtgcttgtctacctggtgactgtgatgcactccatgcaggccggctacctggagaaggcgcagaagtacacggacaaggccctcatgcagctggagaagctcaagatgctggactgcagccccatcctgtcatccttccaagtgatcctgctggagcacatcatcatgtgccgccttgtcacgggtcacaaggccacggcgctgcaggagatctcccaggtctgccagctgtgccagcagtccccccggctcttctccaaccatgcagcacagctgcacacattgctgggcctgtactgtgtctctgtcaactgcatggacaacgcggaagcccagttcaccacggccctgcggctcaccaaccaccaggagctgtgggccttcatcgtcaccaacctggcgagtgtgtatatacgggaaggaaatagacaccaagaggtactctacagtctgctggagaggatcaacccggaccacagcttccctgtcagctcgcactgcctccgagcagccgccttctatgtgcgtgggctcttctccttcttccagggacgctacaacgaggccaagcgatttctgcgggaaactctgaagatgtccaatgctgaggacctgaaccggctcacagcctgctccctcgtgcttctgggccacatcttctatgtgctgggaaaccacagggagagtaacaacatggtggtgcctgccatgcagctcgccagcaagatcccggacatgtcggtacagctgtggtcgtcagcactgctgagagacctgaataaagcctgtgggaacgccatggatgcccatgaagccgcccagatgcaccagaacttctcgcagcagctgctccaggaccacattgaggcctgcagcctccccgaacacaacctcatcacgtggacagacggtccaccccccgtgcagttccaagctcagaatggacccaacaccagcctggccagcctcctgtgaggccttgatggggccatccagctccgcagggcctgcgcgtctccggcttccacccagacggcactcaagcctgcccccgaggcgtgcttccttcctgattgtctctagagcttccaagtcctgggaatgtgcggggccagtccctgccctcccaggaggggtggtagccgttcccacctcgcagcaggacccccagtgcagaggctcacaggtggcacacaggcgctgtctctccagagccatccttcagagtggacctcagtgccagtcctgcctcagcatctgggtcacgtcggccaggagtagggtgcaggcctccagcaggtcctaatcctgtgtgccagggcaggcagtgccccaggggcaccacgcctgactctccatcacccaggccttgatgccgagcgggagtagagtgtttcctctgctcaaggcaatttccagagcccggatgccagtttctggcctgaatttggagggaagaagtaatggccctagtgtgggacgaagcacagatcccagcacttttcccagctttctctccagcatcagtccctgcagcagctggggcctctggtcaggaaccctcagggacccaggaactcagcttccaaacatctgcaccttgaccggactcgccatcccgccgtgggggtgcaggtgattgtaaacacgggtgtgcatgtggatgcacacgggtgtgcggtgaagatctgtggagatggagctgggagctgaggctcctgttgcaccagccaccttcccccatcttgtggctgctgaggggcaggaagcgggggagtgggctcgtctcctaaatttaagatcacctcctcagctagcttagagtgcgtggcacgggccccccgcccccgagatctggagcccagggactttcttcctggcagatctgtggccttccctgctcagcctcttggtccccccactccctccaccgcctcaccttccctgctgggtctctggggcacagtgtgaaacccgcaccctagccaggccccagggagcctccgctgggcccagacagcagcgtttggttttatccacttttcttggataatcaggaggtgccccagtggtcacagtgtggcattccgagttggggcgggtggtcgggtcaagatagcagcagcaggtgtcagggctcaagacaccaccccctccagcttctggggcccaggagcctctccctgctacagggggtgggggtcctgctcagcagggtaggtggtggttttaggtcttgtcaccctcactcagtggaactgcctctgggagctttggcgtctgtgactaaagggacgctggattgctcaggtcagctgctcggggctcccaggctgggtgtgccttagccacaggcagggctgtcaataacccccttcctcactggccaccacctgacatcagcaccagtgacaggctggtcagagggcggggctggtgagggtttgtcctaagaggaccaccgccatctctgggtctccagggggagagcctggccctgtcctttgctacccagggctgcccccaggcccatgaagccaataggagagcgtgtggcactggcccacaaactgtccctgtcctgtcttcctcccgagccatggcctctgctagctccaccttgaaggagccccccacatcctcccctacatcccagagatgccaccacttgtgtctccacaatgtgctcctgcccacccgggttccgcactgtccgacccctgcacaccactcatgtcaccacggcgtgcatcatgttcatccccatctatttatttaagcctttctttgcttgtagggcattttgtatgtagagcagttgaaaacagaacctcagaacttaacatctgtcctgatgttaaagtgcttttcatgaccaccctgttatctatgtatatgtaaagttaaggatgagatcttaagtttacaattaaaaactcagtactcaatatttaatattctactcgagctttatggaagccaaatcatgtgcatgtgtgtgtgtgcgtgtgtgcaagctttgaacctccttccacagccgcatcttctcatgacacaaagcttttgataagtactttcctgtgggtcgctcagggcctcatagcatctcattcaattacaagaatagaggccagacacggtggcgcatgcctgtagtcccagctaactgggaggctgaggcaggaggatcacttgagcccaggagattgaggctgcagtgagcatgatcgcgacactgcactccagcctgggtgacggtgagactttgtctcaaaaaaaaaaaaaaaaacaatggaaggcagacagcaagtccctgaggacacatcacacagtgtcctgtagctaagtgtctaggaaaaaacaaaaactccaaacccttcagtggatgaggacaaggtcgcagaaaggcattctgttgacagatgaacagccgaaagctggccagaccctcctgtatgcctctgcccttgtcctgtgggttgagggggtctgaccaggaggccacctacagcaggaagtgaggctgccatgtttccttgagacacagctgcctctccccagctctgtccctgtagtcacctgccggtgggcgaggatcctctccctgggataagcactcccagccccgtttatcagaaacacaggcaaggaaattggaactgccacccagcccagcatggtggctcaattggttggttgcgttgtcagttgtctcttcgttttgttaaggtttttaataagtacgtttggcataatgtcttttaatgggtttgtaatatttgtaacggttttagcagcctataacttttcagctggtgcttttacttagggaaaaaaacaatttgtaaatacagaacattgtttaaaagacataaccatagaacatagcttcctgtttgtggattttgtttcctatatattcaaagtaaaatgacttacaggagccaaaaaatgtg

SEQ ID NO: 444344 - DNA, 4917 bp, Homo sapiens
  misc_feature (34)..(34): n is a, c, g, or t
tggtgatctagaggatctgggctcccacttggtngccaaggagcacatgtgtggtgcttgtctacctggtgactgtgatgcactccatgcaggccggctacctggagaaggcgcagaagtacacggacaaggccctcatgcagctggagaagctcaagatgctggactgcagccccatcctgtcatccttccaagtgatcctgctggagcacatcatcatgtgccgccttgtcacgggtcacaaggccacggcgctgcaggaggtaaggctggaagcaggaggggcgggaaggcccaggagtttgttgggtctcagcagtgtcagacaagagactgaattcaccaagtgcatactggcaggccagcccatcctgctgtctcgctgtcggccagcgttttacagccctgcatgggcaccactgatcagagaatctcatacaaaaaccagtggaggccgggcgcagtggctcacgcctgtcatcccagcagtttgggaggccgaggcgggtggatcacttgaggccaggagtttgagaccagcctggccaacatggcgaaaccccgcctctactaaaaatataaaaattagccaggtgtggtggcagacacctgtaatcccagttacttgagaggctgaggcaggagaatagcctgaacccaggaggcagaggttgcagtgagccgagatcgcactactgcactccaacctgggcaacagagtgagactccatctcaaaaaaaaaaacccaaaaaactaatgggccatggcccaaaagcttgcacaccaaggggatagcgcacatggtctctggggatttggggggtcctttgacagtgattgttataccccaccctgccattaggaacactctacccccagtacccaccctcctgagagggcatgggggccctcagtaggctggaggtcctttacaacccagacacctgttggacagagtggaagagacgagtaacagacaagggtccctgtccacgatgggatctgggctgccctttgccctcatggtggacgtgtctgctggggctttgtaccccagtttggtcagacaggacatgggctcacccaccagctatggggtctctccattgctgctcagacgccaggtcccaggttgcagtcctgtgatggcagtacactctctcccggcagatctcccaggtctgccagctgtgccagcagtccccccggctcttctccaaccatgcagcacagctgcacacattgctgggcctgtactgtgtctctgtcaactgcatggacaacgcggaagcccagttcaccacggccctgcggctcaccaaccaccaggagctgtgggccttcatcgtcaccaacctggcgagtgtgtatatacgggaaggaaatagacaccaagaggtactctacagtctgctggagaggatcaacccggaccacagcttccctgtcagctcgcactgcctccgagcagccgccttctatgtgcgtgggctcttctccttcttccagggacgctacaacgaggccaagcgatttctgcgggaaactctgaagatgtccaatgctgaggacctgaaccggctcacagcctgctccctcgtgcttctgggccacatcttctatgtgctgggaaaccacagggagagtaacaacatggtggtgcctgccatgcagctcgccagcaagatcccggacatgtcggtacagctgtggtcgtcagcactgctgagagacctgaataaagcctgtgggaacgccatggatgcccatgaagccgcccagatgcaccagaacttctcgcagcagctgctccaggaccacattgaggcctgcagcctccccgaacacaacctcatcacgtggacagacggtccaccccccgtgcagttccaagctcagaatggacccaacaccagcctggccagcctcctgtgaggccttgatggggccatccagctccgcagggcctgcgcgtctccggcttccacccagacggcactcaagcctgcccccgaggcgtgcttccttcctgattgtctctagagcttccaagtcctgggaatgtgcggggccagtccctgccctcccaggaggggtggtagccgttcccacctcgcagcaggacccccagtgcagaggctcacaggtggcacacaggcgctgtctctccagagccatccttcagagtggacctcagtgccagtcctgcctcagcatctgggtcacgtcggccaggagtagggtgcaggcctccagcaggtcctaatcctgtgtgccagggcaggcagtgccccaggggcaccacgcctgactctccatcacccaggccttgatgccgagcgggagtagagtgtttcctctgctcaaggcaatttccagagcccggatgccagtttctggcctgaatttggagggaagaagtaatggccctagtgtgggacgaagcacagatcccagcacttttcccagctttctctccagcatcagtccctgcagcagctggggcctctggtcaggaaccctcagggacccaggaactcagcttccaaacatctgcaccttgaccggactcgccatcccgccgtgggggtgcaggtgattgtaaacacgggtgtgcatgtggatgcacacgggtgtgcggtgaagatctgtggagatggagctgggagctgaggctcctgttgcaccagccaccttcccccatcttgtggctgctgaggggcaggaagcgggggagtgggctcgtctcctaaatttaagatcacctcctcagctagcttagagtgcgtggcacgggccccccgcccccgagatctggagcccagggactttcttcctggcagatctgtggccttccctgctcagcctcttggtccccccactccctccaccgcctcaccttccctgctgggtctctggggcacagtgtgaaacccgcaccctagccaggccccagggagcctccgctgggcccagacagcagcgtttggttttatccacttttcttggataatcaggaggtgccccagtggtcacagtgtggcattccgagttggggcgggtggtcgggtcaagatagcagcagcaggtgtcagggctcaagacaccaccccctccagcttctggggcccaggagcctctccctgctacagggggtgggggtcctgctcagcagggtaggtggtggttttaggtcttgtcaccctcactcagtggaactgcctctgggagctttggcgtctgtgactaaagggacgctggattgctcaggtcagctgctcggggctcccaggctgggtgtgccttagccacaggcagggctgtcaataacccccttcctcactggccaccacctgacatcagcaccagtgacaggctggtcagagggcggggctggtgagggtttgtcctaagaggaccaccgccatctctgggtctccagggggagagcctggccctgtcctttgctacccagggctgcccccaggcccatgaagccaataggagagcgtgtggcactggcccacaaactgtccctgtcctgtcttcctcccgagccatggcctctgctagctccaccttgaaggagccccccacatcctcccctacatcccagagatgccaccacttgtgtctccacaatgtgctcctgcccacccgggttccgcactgtccgacccctgcacaccactcatgtcaccacggcgtgcatcatgttcatccccatctatttatttaagcctttctttgcttgtagggcattttgtatgtagagcagttgaaaacagaacctcagaacttaacatctgtcctgatgttaaagtgcttttcatgaccaccctgttatctatgtatatgtaaagttaaggatgagatcttaagtttacaattaaaaactcagtactcaatatttaatattctactcgagctttatggaagccaaatcatgtgcatgtgtgtgtgtgcgtgtgtgcaagctttgaacctccttccacagccgcatcttctcatgacacaaagcttttgataagtactttcctgtgggtcgctcagggcctcatagcatctcattcaattacaagaatagaggccagacacggtggcgcatgcctgtagtcccagctaactgggaggctgaggcaggaggatcacttgagcccaggagattgaggctgcagtgagcatgatcgcgacactgcactccagcctgggtgacggtgagactttgtctcaaaaaaaaaaaaaaaaacaatggaaggcagacagcaagtccctgaggacacatcacacagtgtcctgtagctaagtgtctaggaaaaaacaaaaactccaaacccttcagtggatgaggacaaggtcgcagaaaggcattctgttgacagatgaacagccgaaagctggccagaccctcctgtatgcctctgcccttgtcctgtgggttgagggggtctgaccaggaggccacctacagcaggaagtgaggctgccatgtttccttgagacacagctgcctctccccagctctgtccctgtagtcacctgccggtgggcgaggatcctctccctgggataagcactcccagccccgtttatcagaaacacaggcaaggaaattggaactgccacccagcccagcatggtggctcaattggttggttgcgttgtcagttgtctcttcgttttgttaaggtttttaataagtacgtttggcataatgtcttttaatgggtttgtaatatttgtaacggttttagcagcctataacttttcagctggtgcttttacttagggaaaaaaacaatttgtaaatacagaacattgtttaaaagacataaccatagaacatagcttcctgtttgtggattttgtttcctatatattcaaagtaaaatgacttacaggagccaaaaaatgtg

SEQ ID NO: 444345 - DNA, 4909 bp, Homo sapiens
aaccaaacggcgtcgcccttttacaccttcccggagcggcagtcatcccaaatacaaactacatgttccaggatgctttgggcggcagatctcgcggaagccgcgaggagagcccggccccgtctcgcgcgcctgcttccgcctccctgtggcggcggcttgttgttgtggaggccaaaatggcggctcaggcggcggcagcggcccaggcggcggcggcccaggctgcgcaggccgaggcggccgactcgtggtacctggcgcttctgggcttcgctgagcacttccgcacttccagcccgcccaaaatccgcctgtgcgtgcactgcctgcaggccgtgttccccttcaagccgccgcagcgcatcgaggcccgtacacacctgcagctgggctccgttctctatcaccacaccaagaacagcgagcaggcgcgcagccacctggagaaggcgtggttgatatcacagcaaatcccacagttcgaagatgttaaatttgaagcagcaagtctgttgtctgaattgtactgtcaagagaattccgttgatgcagcaaagccgctgctgcggaaggcgatccagatctcacagcagaccccatattggcactgccgcctgctcttccagctcgctcaactgcacacgcttgagaaggacctggtgtctgcctgtgacctcctgggtgtaggggccgagtacgcccgggtggtgggatctgaatacacacgggcgctgttcctcctcagcaaggggatgctgctgctgatggagcgaaagctgcaggaggtgcacccgctgctgaccctctgcgggcagatcgtggagaactggcaggggaaccccatccagaaggagtcgctgcgtgtcttcttcctggtgctccaggtcacccactatctggatgccgggcaggtgaagagcgtgaagccgtgtctgaagcagctgcagcagtgcatccagaccatctccacactgcacgatgatgagatcctgcccagcaaccccgctgacctcttccactggctgcccaaggagcacatgtgtgtgcttgtctacctggtgactgtgatgcactccatgcaggccggctacctggagaaggcgcagaagtacacggacaaggccctcatgcagctggagaagctcaagatgctggactgcagccccatcctgtcatccttccaagtgatcctgctggagcacatcatcatgtgccgccttgtcacgggtcacaaggccacggcgctgcaggaggtaaggctggaagcaggaggggcgggaaggcccaggagtttgttgggtctcagcagtgtcagacaagagactgaattcaccaagtgcatactggcaggccagcccatcctgctgtctcgctgtcggccagcgttttacagccctgcatgggcaccactgatcagagaatctcatacaaaaaccagtggaggccgggcgcagtggctcacgcctgtcatcccagcagtttgggaggccgaggcgggtggatcacttgaggccaggagtttgagaccagcctggccaacatggcgaaaccccgcctctactaaaaatataaaaattagccaggtgtggtggcagacacctgtaatcccagttacttgagaggctgaggcaggagaatagcctgaacccaggaggcagaggttgcagtgagccgagatcgcactactgcactccaacctgggcaacagagtgagactccatctcaaaaaaaaaaacccaaaaaactaatgggccatggcccaaaagcttgcacaccaaggggatagcgcacatggtctctggggatttggggggtcctttgacagtgattgttataccccaccctgccattaggaacactctacccccagtacccaccctcctgagagggcatgggggccctcagtaggctggaggtcctttacaacccagacacctgttggacagagtggaagagacgagtaacagacaagggtccctgtccacgatgggatctgggctgccctttgccctcatggtggacgtgtctgctggggctttgtaccccagtttggtcagacaggacatgggctcacccaccagctatggggtctctccattgctgctcagacgccaggtcccaggttgcagtcctgtgatggcagtacactctctcccggcagatctcccaggtctgccagctgtgccagcagtccccccggctcttctccaaccatgcagcacagctgcacacattgctgggcctgtactgtgtctctgtcaactgcatggacaacgcggaagcccagttcaccacggccctgcggctcaccaaccaccaggagctgtgggccttcatcgtcaccaacctggcgagtgtgtatatacgggaaggaaatagacaccaagaggtactctacagtctgctggagaggatcaacccggaccacagcttccctgtcagctcgcactgcctccgagcagccgccttctatgtgcgtgggctcttctccttcttccagggacgctacaacgaggccaagcgatttctgcgggaaactctgaagatgtccaatgctgaggacctgaaccggctcacagcctgctccctcgtgcttctgggccacatcttctatgtgctgggaaaccacagggagagtaacaacatggtggtgcctgccatgcagctcgccagcaagatcccggacatgtcggtacagctgtggtcgtcagcactgctgagagacctgaataaagcctgtgggaacgccatggatgcccatgaagccgcccagatgcaccagaacttctcgcagcagctgctccaggaccacattgaggcctgcagcctccccgaacacaacctcatcacgtggacagacggtccaccccccgtgcagttccaagctcagaatggacccaacaccagcctggccagcctcctgtgaggccttgatggggccatccagctccgcagggcctgcgcgtctccggcttccacccagacggcactcaagcctgcccccgaggcgtgcttccttcctgattgtctctagagcttccaagtcctgggaatgtgcggggccagtccctgccctcccaggaggggtggtagccgttcccacctcgcagcaggacccccagtgcagaggctcacaggtggcacacaggcgctgtctctccagagccatccttcagagtggacctcagtgccagtcctgcctcagcatctgggtcacgtcggccaggagtagggtgcaggcctccagcaggtcctaatcctgtgtgccagggcaggcagtgccccaggggcaccacgcctgactctccatcacccaggccttgatgccgagcgggagtagagtgtttcctctgctcaaggcaatttccagagcccggatgccagtttctggcctgaatttggagggaagaagtaatggccctagtgtgggacgaagcacagatcccagcacttttcccagctttctctccagcatcagtccctgcagcagctggggcctctggtcaggaaccctcagggacccaggaactcagcttccaaacatctgcaccttgaccggactcgccatcccgccgtgggggtgcaggtgattgtaaacacgggtgtgcatgtggatgcacacgggtgtgcggtgaagatctgtggagatggagctgggagctgaggctcctgttgcaccagccaccttcccccatcttgtggctgctgaggggcaggaagcgggggagtgggctcgtctcctaaatttaagatcacctcctcagctagcttagagtgcgtggcacgggccccccgcccccgagatctggagcccagggactttcttcctggcagatctgtggccttccctgctcagcctcttggtccccccactccctccaccgcctcaccttccctgctgggtctctggggcacagtgtgaaacccgcaccctagccaggccccagggagcctccgctgggcccagacagcagcgtttggttttatccacttttcttggataatcaggaggtgccccagtggtcacagtgtggcattccgagttggggcgggtggtcgggtcaagatagcagcagcaggtgtcagggctcaagacaccaccccctccagcttctggggcccaggagcctctccctgctacagggggtgggggtcctgctcagcagggtaggtggtggttttaggtcttgtcaccctcactcagtggaactgcctctgggagctttggcgtctgtgactaaagggacgctggattgctcaggtcagctgctcggggctcccaggctgggtgtgccttagccacaggcagggctgtcaataacccccttcctcactggccaccacctgacatcagcaccagtgacaggctggtcagagggcggggctggtgagggtttgtcctaagaggaccaccgccatctctgggtctccagggggagagcctggccctgtcctttgctacccagggctgcccccaggcccatgaagccaataggagagcgtgtggcactggcccacaaactgtccctgtcctgtcttcctcccgagccatggcctctgctagctccaccttgaaggagccccccacatcctcccctacatcccagagatgccaccacttgtgtctccacaatgtgctcctgcccacccgggttccgcactgtccgacccctgcacaccactcatgtcaccacggcgtgcatcatgttcatccccatctatttatttaagcctttctttgcttgtagggcattttgtatgtagagcagttgaaaacagaacctcagaacttaacatctgtcctgatgttaaagtgcttttcatgaccaccctgttatctatgtatatgtaaagttaaggatgagatcttaagtttacaattaaaaactcagtactcaatatttaa

SEQ ID NO: 444346 - DNA, 5888 bp, Homo sapiens
aaccaaacggcgtcgcccttttacaccttcccggagcggcagtcatcccaaatacaaactacatgttccaggatgctttgggcggcagatctcgcggaagccgcgaggagagcccggccccgtctcgcgcgcctgcttccgcctccctgtggcggcggcttgttgttgtggaggccaaaatggcggctcaggcggcggcagcggcccaggcggcggcggcccaggctgcgcaggccgaggcggccgactcgtggtacctggcgcttctgggcttcgctgagcacttccgcacttccagcccgcccaaaatccgcctgtgcgtgcactgcctgcaggccgtgttccccttcaagccgccgcagcgcatcgaggcccgtacacacctgcagctgggctccgttctctatcaccacaccaagaacagcgagcaggcgcgcagccacctggagaaggcgtggttgatatcacagcaaatcccacagttcgaagatgttaaatttgaagcagcaagtctgttgtctgaattgtactgtcaagagaattccgttgatgcagcaaagccgctgctgcggaaggcgatccagatctcacagcagaccccatattggcactgccgcctgctcttccagctcgctcaactgcacacgcttgagaaggacctggtgtctgcctgtgacctcctgggtgtaggggccgagtacgcccgggtggtgggatctgaatacacacgggcgctgttcctcctcagcaaggggatgctgctgctgatggagcgaaagctgcaggaggtgcacccgctgctgaccctctgcgggcagatcgtggagaactggcaggggaaccccatccagaaggagtcgctgcgtgtcttcttcctggtgctccaggtcacccactatctggatgccgggcaggtgaagagcgtgaagccgtgtctgaagcagctgcagcagtgcatccagaccatctccacactgcacgatgatgagatcctgcccagcaaccccgctgacctcttccactggctgcccaaggagcacatgtgtgtgcttgtctacctggtgactgtgatgcactccatgcaggccggctacctggagaaggcgcagaagtacacggacaaggccctcatgcagctggagaagctcaagatgctggactgcagccccatcctgtcatccttccaagtgatcctgctggagcacatcatcatgtgccgccttgtcacgggtcacaaggccacggcgctgcaggaggtaaggctggaagcaggaggggcgggaaggcccaggagtttgttgggtctcagcagtgtcagacaagagactgaattcaccaagtgcatactggcaggccagcccatcctgctgtctcgctgtcggccagcgttttacagccctgcatgggcaccactgatcagagaatctcatacaaaaaccagtggaggccgggcgcagtggctcacgcctgtcatcccagcagtttgggaggccgaggcgggtggatcacttgaggccaggagtttgagaccagcctggccaacatggcgaaaccccgcctctactaaaaatataaaaattagccaggtgtggtggcagacacctgtaatcccagttacttgagaggctgaggcaggagaatagcctgaacccaggaggcagaggttgcagtgagccgagatcgcactactgcactccaacctgggcaacagagtgagactccatctcaaaaaaaaaaacccaaaaaactaatgggccatggcccaaaagcttgcacaccaaggggatagcgcacatggtctctggggatttggggggtcctttgacagtgattgttataccccaccctgccattaggaacactctacccccagtacccaccctcctgagagggcatgggggccctcagtaggctggaggtcctttacaacccagacacctgttggacagagtggaagagacgagtaacagacaagggtccctgtccacgatgggatctgggctgccctttgccctcatggtggacgtgtctgctggggctttgtaccccagtttggtcagacaggacatgggctcacccaccagctatggggtctctccattgctgctcagacgccaggtcccaggttgcagtcctgtgatggcagtacactctctcccggcagatctcccaggtctgccagctgtgccagcagtccccccggctcttctccaaccatgcagcacagctgcacacattgctgggcctgtactgtgtctctgtcaactgcatggacaacgcggaagcccagttcaccacggccctgcggctcaccaaccaccaggagctgtgggccttcatcgtcaccaacctggcgagtgtgtatatacgggaaggaaatagacaccaagaggtactctacagtctgctggagaggatcaacccggaccacagcttccctgtcagctcgcactgcctccgagcagccgccttctatgtgcgtgggctcttctccttcttccagggacgctacaacgaggccaagcgatttctgcgggaaactctgaagatgtccaatgctgaggacctgaaccggctcacagcctgctccctcgtgcttctgggccacatcttctatgtgctgggaaaccacagggagagtaacaacatggtggtgcctgccatgcagctcgccagcaagatcccggacatgtcggtacagctgtggtcgtcagcactgctgagagacctgaataaagcctgtgggaacgccatggatgcccatgaagccgcccagatgcaccagaacttctcgcagcagctgctccaggaccacattgaggcctgcagcctccccgaacacaacctcatcacgtggacagacggtccaccccccgtgcagttccaagctcagaatggacccaacaccagcctggccagcctcctgtgaggccttgatggggccatccagctccgcagggcctgcgcgtctccggcttccacccagacggcactcaagcctgcccccgaggcgtgcttccttcctgattgtctctagagcttccaagtcctgggaatgtgcggggccagtccctgccctcccaggaggggtggtagccgttcccacctcgcagcaggacccccagtgcagaggctcacaggtggcacacaggcgctgtctctccagagccatccttcagagtggacctcagtgccagtcctgcctcagcatctgggtcacgtcggccaggagtagggtgcaggcctccagcaggtcctaatcctgtgtgccagggcaggcagtgccccaggggcaccacgcctgactctccatcacccaggccttgatgccgagcgggagtagagtgtttcctctgctcaaggcaatttccagagcccggatgccagtttctggcctgaatttggagggaagaagtaatggccctagtgtgggacgaagcacagatcccagcacttttcccagctttctctccagcatcagtccctgcagcagctggggcctctggtcaggaaccctcagggacccaggaactcagcttccaaacatctgcaccttgaccggactcgccatcccgccgtgggggtgcaggtgattgtaaacacgggtgtgcggtgaagatctgtggagatggagctgggagctgaggctcctgttgcaccagccaccttcccccatcttgtggctgctgaggggcaggaagcgggggagtgggctcgtctcctaaatttaagatcacctcctcagctagcttagagtgcgtggcacgggccccccgcccccgagatctggagcccagggactttcttcctggcagatctgtggccttccctgctcagcctcttggtccccccactccctccaccgcctcaccttccctgctgggtctctggggcacagtgtgaaacccgcaccctagccaggccccagggagcctccgctgggcccagacagcagcgtttggttttatccacttttcttggataatcaggaggtgccccagtggtcacagtgtggcattccgagttggggcgggtggtcgggtcaagatagcagcagcaggtgtcagggctcaagacaccaccccctccagcttctggggcccaggagcctctccctgctacagggggtgggggtcctgctcagcagggtaggtggtggttttaggtcttgtcaccctcactcagtggaactgcctctgggagctttggcgtctgtgactaaagggacgctggattgctcaggtcagctgctcggggctcccaggctgggtgtgccttagccacaggcagggctgtcaataacccccttcctcactggccaccacctgacatcagcaccagtgacaggctggtcagagggcggggctggtgagggtttgtcctaagaggaccaccgccatctctgggtctccagggggagagcctggccctgtcctttgctacccagggctgcccccaggcccatgaagccaataggagagcgtgtggcactggcccacaaactgtccctgtcctgtcttcctcccgagccatggcctctgctagctccaccttgaaggagccccccacatcctcccctacatcccagagatgccaccacttgtgtctccacaatgtgctcctgcccacccgggttccgcactgtccgacccctgcacaccactcatgtcaccacggcgtgcatcatgttcatccccatctatttatttaagcctttctttgcttgtagggcattttgtatgtagagcagttgaaaacagaacctcagaacttaacatctgtcctgatgttaaagtgcttttcatgaccaccctgttatctatgtatatgtaaagttaaggatgagatcttaagtttacaattaaaaactcagtactcaatatttaatattctactcgagctttatggaagccaaatcatgtgcatgtgtgtgtgtgcgtgtgtgcaagctttgaacctccttccacagccgcatcttctcatgacacaaagcttttgataagtactttcctgtgggtcgctcagggcctcatagcatctcattcaattacaagaatagaggccagacacggtggcgcatgcctgtagtcccagctaactgggaggctgaggcaggaggatcacttgagcccaggagattgaggctgcagtgagcatgatcgcgacactgcactccagcctgggtgacggtgagactttgtctcaaaaaaaaaaaaaaaaacaatggaaggcagacagcaagtccctgaggacacatcacacagtgtcctgtagctaagtgtctaggaaaaaacaaaaactccaaacccttcagtggatgaggacaaggtcgcagaaaggcattctgttgacagatgaacagccgaaagctggccagaccctcctgtatgcctctgcccttgtcctgtgggttgagggggtctgaccaggaggccacctacagcaggaagtgaggctgccatgtttccttgagacacagctgcctctccccagctctgtccctgtagtcacctgccggtgggcgaggatcctctccctgggataagcactcccagccccgtttatcagaaacacaggcaaggaaattggaactgccacccagcccagcatggtggctcaattggttggttgcgttgtcagttgtctcttcgttttgttaaggtttttaataagtacgtttggcataatgtcttttaatgggtttgtaatatttgtaacggttttagcagcctataacttttcagctggtgcttttacttagggaaaaaaacaatttgtaaatacagaacattgtttaaaagacataaccatagaacatagcttcctgtttgtggattttgtttcctatatattcaaagtaaaatgacttacaggagccaaaaaatgtg

SEQ ID NO: 444347 - DNA, 360 bp, Homo sapiens
ttggacagagtggaagagacgagtaacagacaagggtccctgtccacgatgggatctgggctgccctttgccctcatggtggacgtgtctgctggggctttgtaccccagtttggtcagacaggacatgggctcacccaccagctatggggtctctccattgctgctcagacgccaggtcccaggttgcagtcctgtgatggcagtacactctctcccggcagatctcccaggtctgccagctgtgccagcagtccccccggctcttctccaaccatgcagcacagctgcacacattgctggtgagtaaccctgtgacaacaccccgggagaatccagaatgttctcagtaagtaagtac

SEQ ID NO: 444348 - DNA, 2879 bp, Homo sapiens
gctgcaacatagctctgtaccatctgggatgctagcagtcacagcagttagctcagatatctgagctgtctgccacacaaagcctgaggagatcatcattcttcagtttcattcattacttaatgaatgccaaattaattggcaggaagaagaaacactgtgtgatatactgaacaagcctgtgtgcatgaataaggagccactcaaaaagccaattttgagctttatttctccgttgttaacaaatctcaagaaagcctttgttacagtttagctcatgtcatttggttggttttattttctagccctttaacataggaggaaaattgtcatttcatgtataacttgtaacacagaattgaactgatactagtttccttgccttaaattaattatatgtcatcccaagggtctctgttaattctgctttgccaagcaataatgagatctgggtttggcattagaagtatttcataattttggttttttatttaggtttcctccacatctgtaaagtgattgattaaattagaggaggcgtgtagaataaatcccaatcccattgcaactggcagagctttataaatctttataaattcagttacaacaaaggagaggatcctacaccattagagccatgccatcaggtgtttgcaagtgacagctgtagtgtgttgcctcaaataataccaagttataaataataccaagtaattatcaactcactcccaaatttaataagatatcaaagtccaaaaggttacttaggagtagtcttccgtgggggaagataaatttattaaagagtcatgtactgatctttttcttgggattttttttcctttcccagaaaaaaaaattattttggtgactgatcaattgtaaacaattttcttccttacttacaaatcatccgttcagaaaaataaaagtggacttcctttcctaagcattacaattagcctgggcaagaggtgttatgattgtcttattctttaagccggcttactttttggatttgtgtgaaatgtcttttgaaaagaaagtagatagtatagtattaattaactactttgtatagtcttctgcataatttagagttgaaaataatgtaacattttcctgtgaacagattcctttatgcgtacatactttataaatatacatacatacacatacacatacatttttaaaatgctctttttaaagagattcttatcttgctcccactccaaaagctatgtacagttgagttattagcctcagaggaagagtacaggaaagcgaagatgaggacctccttttcttgtgttggtcttgggaacaaacagtattccgtctttcaaatatggcatatttctaaacagtttgggaaagatgttagaattttttaaaagtcagctcttttataaattggaagtactcagtagtcagaaattaagatcccctctgatagagatagattctcaaaaccaaaattggactgaaaattagattgagaagaaagatacaacttcctccatagccaataaaatctgtctttccaagtctgcttattaatgctgtgaatcgctccttctgtttgtgaaaacatctcctggactggaaatgtggtgctgtaaccagctgagccgaaagttggagaatgttaaatatcttatatgggacttacgataaaatgtattgatgttagtgattgtcaaaataggtttatcatttaaaaaactaggaaattactaagtataaagaagaaaaaccagtattaattaagtgatgagacctgttcattttgttttccctgacttatttccattaccaaacatagtaaaggccagaaaagattaaaaaaaaaattaacacagccattccattgttttttaccacatggagaaaggaccaggctggaagcatatgtccccccacccttatttatattcctttgagcattgccgttttctagacagacaatccgaaaataattgtgttgataggtctgtttaagcctgaactctgggtgtaaaatgttatccagaagctatagggagctgccttgctcaggtcattggaaatttcaaccctaagactcattggaatttctaagtccgttatgcaccattatgggcatatggagcatattcataccatgaggaggagtctttgtttatgatggactttttaatatggccataattaaactcacactcaaaaaggatgagctattgtcaaaagccaaaagaaaaacagacaaaatgaacatgaagcaaggagtccataaaacaagagttctttaccacgtttaagcaaatgtctctcaaaaaaaattgtatttctgtgcacattagctgagattcacacattttgcacctcagtagtatttcagatgagactcaatgtgtggagaaaactgctaacttgtttggttctactcttaccccctcttctgtggcaatgtggggtcagggccgtatcctaaagtatccacatggtcttaaatggaaatcatgggactctggaaagctggcatgagctggttggagcttttaaacagaagtgctttatgggtatcagatctcttctgacatcaattgtttcaaatcattgttgggctctgtcgtgttctgcaatcttccccattcccctcatgatctctggcttatcttttatccaatctgtatggactttttaggattttttttttcttatagtacaaataattttcagatcccagctttggtaaatgtgttaattctactttgtgaataaataaatgagtgatctgctaaaaatggcaattgtagaattatgttgtatgtaatgtacatatggagaaagaatgtattttgttcattttcttaataaaatgttatatatggatgcta

SEQ ID NO: 444349 - DNA, 2469 bp, Homo sapiens
ggtggcggccgctacggtgctgacaagatggcggctggcggagctgtcgctgcggcgcccgagtgccggcttctcccctacgcgctacacaagtggagctccttttcctccacctaccttcccgagaacattttagtggacaaaccaaatgaccaatcttcaagatggtcttcagagagcaactatcctccccagtacttgattctaaagctcgaaaggcctgctatagttcagaatatcacatttggaaaatatgagaaaactcatgtttgcaatttgaagaaatttaaagtctttggtggaatgaatgaagaaaatatgacagagctgttgtccagtggcttaaagaatgattataacaaagaaacattcaccttgaagcataaaattgatgaacagatgttcccttgtcgattcattaaaatagttccactcttgtcctggggacccagctttaactttagcatctggtatgttgaacttagtggcattgatgatcctgatatagtacaaccttgtctcaactggtatagcaagtaccgtgaacaggaagctattcgcctttgcctaaaacacttcagacaacacaactatacagaagcttttgagtcactgcaaaagaaaaccaagattgcactggaacatcccatgttaacagatattcatgacaagctggtgttgaagggtgattttgatgcttgcgaagagttgattgaaaaggctgtaaatgatggcttgttcaatcagtatatcagtcaacaggaatataagccacgatggagtcaaatcattcccaaaagtaccaaaggtgatggggaagataaccgtccaggaatgagaggaggccatcagatggttattgatgttcaaacagagactgtttatttgtttggtggctgggatggaacacaagatcttgctgacttctgggcgtacagtgtgaaggagaaccagtggacatgtatctctagagacactgaaaaagagaatggtcctagtgccagatcgtgtcataaaatgtgcattgatattcaacggaggcaaatctacacattggggcgttacttggattcctctgtgaggaacagcaaatctctgaaaagtgacttctatcgttatgacattgatacaaacacatggatgttactaagtgaggatactgctgctgatggagggccgaaattggtgtttgatcatcagatgtgtatggactcagaaaaacatatgatctacacttttggtggtagaattttgacttgtaatggcagcgtagatgacagcagagccagtgaaccacaattcagtggcttgtttgctttcaactgtcaatgtcaaacctggaaacttcttcgagaggactcctgtaatgctgggcctgaggacatccagtctcgaataggacactgcatgttattccactcaaaaaatcgttgcttatatgtatttggtggccagcgatcaaagacctatttgaatgatttctttagttatgatgtggactctgatcatgtagacataatatcagatggcaccaagaaagactctgggatggttccaatgacaggatttacacagagagcaactattgatccagaactgaatgaaatacacgtcttatctggactcagcaaagataaggaaaagagggaagaaaatgttagaaattcattctggatttatgacattgtgaggaatagttggtcttgtgtctataagaatgatcaagctgcaaaggataatccaactaaaagtcttcaggaagaagaaccatgtccaaggtttgcccatcagcttgtatacgatgagctacacaaggttcattacttatttggtgggaatccaggaaaatcttgctctccaaagatgagattagatgacttctggtcactgaagttgtgtagaccttcaaaagattatttactgaggcattgcaagtacctcataagaaaacacaggtttgaagaaaaggcccaagtggatccccttagtgctctgaaatatttacaaaatgatctttatataactgtggatcattcagacccagaagagacaaaagagtttcagctcctggcatcagctctattcaaatctggttcagattttacagctctgggcttttctgatgtggatcacacctatgctcaaagaactcagctctttgacaccttagtaaatttctttcctgacagcatgactcctcctaaaggcaacctggtagacctcatcacactgtaactgaagagtcactggacacagaaatggaaaacaggagtcgattttccgtcttttggattgcagctccactgactgacagtaaagctgcagtgattgaggactgcaccagagttctgaagggatcttaaccatcacaagtttttaccctcttccttcatgcctgacctcaaccccgctctcctcatcctattcctaaattaggctaataaagtgaaattggtatactttccagtt

SEQ ID NO: 444350 - DNA, 2781 bp, Homo sapiens
gctgcaacatagctctgtaccatctgggatgctagcagtcacagcagttagctcagatatctgagctgtctgccacacaaagcctgaggagatcatcattcttcagtttcattcattacttaatgaatgccaaattaattggcaggaagaagaaacactgtgtgatatactgaacaagcctgtgtgcatgaataaggagccactcaaaaagccaattttgagctttatttctccgttgttaacaaatctcaagaaagcctttgttacagtttagctcatgtcatttggttggttttattttctagccctttaacataggaggaaaattgtcatttcatgtataacttgtaacacagaattgaactgatactagtttccttgccttaaattaattatatgtcatcccaagggtctctgttaattctgctttgccaagcaataatgagatctgggtttggcattagaagtatttcataattttggttttttatttaggtttcctccacatctgtaaagtgattgattaaattagaggaggcgtgtagaataaatcccaatcccattgcaactggcagagctttataaatctttataaattcagttacaacaaaggagaggatcctacaccattagagccatgccatcaggtgtttgcaagtgacagctgtagtgtgttgcctcaaataataccaagttataaataataccaagtaattatcaactcactcccaaatttaataagatatcaaagtccaaaaggttacttaggagtagtcttccgtgggggaagataaatttattaaagagtcatgtactgatctttttcttgggattttttttcctttcccagaaaaaaaaattattttggtgactgatcaattgtaaacaattttcttccttacttacaaatcatccgttcagaaaaataaaagtggacttcctttcctaagcattacaattagcctgggcaagaggtgttatgattgtcttattctttaagccggcttactttttggatttgtgtgaaatgtcttttgaaaagaaagtagatagtatagtattaattaactactttgtatagtcttctgcataatttagagttgaaaataatgtaacattttcctgtgaacagattcctttatgcgtacatactttataaatatacatacatacacatacacatacatttttaaaatgctctttttaaagagattcttatcttgctcccactccaaaagctatgtacagttgagttattagcctcagaggaagagtacaggaaagcgaagatgaggacctccttttcttgtgttggtcttgggaacaaacagtattccgtctttcaaatatggcatatttctaaacagtttgggaaagatgttagaattttttaaaagtcagctcttttataaattggaagtactcagtagtcagaaattaagatcccctctgatagagatagattctcaaaaccaaaattggactgaaaattagattgagaagaaagatacaacttcctccatagccaataaaatctgtctttccaagtctgcttattaatgctgtgaatcgctccttctgtttgtgaaaacatctcctggactggaaatgtggtgctgtaaccagctgagccgaaagttggagaatgttaaatatcttatatgggacttacgataaaatgtattgatgttagtgattgtcaaaataggtttatcatttaaaaaactaggaaattactaagtataaagaagaaaaaccagtattaattaagtgatgagacctgttcattttgttttccctgacttatttccattaccaaacatagtaaaggccagaaaagattaaaaaaaaaattaacacagccattccattgttttttaccacatggagaaaggaccaggctggaagcatatgtccccccacccttatttatattcctttgagcattgccgttttctagacagacaatccgaaaataattgtgttgataggtctgtttaagcctgaactctgggtgtaaaatgttatccagaagctatagggagctgccttgctcaggtcattggaaatttcaaccctaagactcattggaatttctaagtccgttatgcaccattatgggcatatggagcatattcataccatgaggaggagtctttgtttatgatggactttttaatatggccataattaaactcacactcaaaaaggatgagctattgtcaaaagccaaaagaaaaacagacaaaatgaacatgaagcaaggagtccataaaacaagagttctttaccacgtttaagcaaatgtctctcaaaaaaaattgtatttctgtgcacattagctgagattcacacattttgcacctcagtagtatttcagatgagactcaatgtgtggagaaaactgctaacttgtttggttctactcttaccccctcttctgtggcaatgtggggtcagggccgtatcctaaagtatccacatggtcttaaatggaaatcatgggactctggaaagctggcatgagctggttggagcttttaaacagaagtgctttatgggtatcagatctcttctgacatcaattgtttcaaatcattgttgggctctgtcgtgttctgcaatcttccccattcccctcatgatctctggcttatcttttatccaatctgtatggactttttaggattttttttttcttatagtacaaataattttcagatcccagctttggtaaatgtgttaattctactttgtgaataaataaatgagtgatctgct

SEQ ID NO: 444351 - DNA, 777 bp, Homo sapiens
tggttcagaagcattaacaagtcagaaaagacaagtggaatttcctcagtggaccagcagagaaaagacctaataaggaaaaaaagagagatcagtattatttgtaactaaagtgccagtccttctgctagacgcttttcatgtaactacatttaatctgcacaataactgtatgaagtaaacaggattatcacatacttacagctgaggaagcaaagtctgaaagccagaaagtctgactaatttatctaagatcacaccacagccaggtagtagaactggggtcagatcagtagtgtctgcctggttttgaagcctgatttgatttctccattataaaatacattgctgctggtctcaactagtttttctgttacatgttttaaacacaatggatgtttctttgtatcttcttcaccaggcttttctgatgtggatcacacctatgctcaaagaactcagctctttgacaccttagtaaatttctttcctgacagcatgactcctcctaaaggcaacctggtagacctcatcacactgtaactgaagagtcactggacacagaaatggaaaacaggagtcgattttccgtcttttggattgcagctccactgactgacagtaaagctgcagtgattgaggactgcaccagagttctgaagggatcttaaccatcacaagtttttaccctcttccttcatgcctgacctcaaccccgctctcctcatcctattcctaaattaggctaataaagtgaaattggtatactttccagtt

SEQ ID NO: 444352 - DNA, 206 bp, Homo sapiens
ggtggcggccgctacggtgctgacaagatggcggctggcggagctgtcgctgcggcgcccgagtgccggcttctcccctacgcgctacacaagtggagctccttttcctccacctaccttcccgaccgcagtggctcaggcctgttgtctggtgcataaggaggcgaggctaggcgttcgaggctagcctgggcaacacagaaacc

SEQ ID NO: 444353 - DNA, 1224 bp, Homo sapiens
  misc_feature (2)..(2): n is a, c, g, or t
  misc_feature (25)..(25): n is a, c, g, or t
anttgcggaacaggcctcgtgcgtngtattgatgttagtgattgtcaaaataggtttatcatttaaaaaactaggaaattactaagtataaagaagaaaaaccagtattaattaagtgatgagacctgttcattttgttttccctgacttatttccattaccaaacatagtaaaggccagaaaagattaaaaaaaaaattaacacagccattccattgttttttaccacatggagaaaggaccaggctggaagcatatgtccccccacccttatttatattcctttgagcattgccgttttctagacagacaatccgaaaataattgtgttgataggtctgtttaagcctgaactctgggtgtaaaatgttatccagaagctatagggagctgccttgctcaggtcattggaaatttcaaccctaagactcattggaatttctaagtccgttatgcaccattatgggcatatggagcatattcataccatgaggaggagtctttgtttatgatggactttttaatatggccataattaaactcacactcaaaaaggatgagctattgtcaaaagccaaaagaaaaacagacaaaatgaacatgaagcaaggagtccataaaacaagagttctttaccacgtttaagcaaatgtctctcaaaaaaaattgtatttctgtgcacattagctgagattcacacattttgcacctcagtagtatttcagatgagactcaatgtgtggagaaaactgctaacttgtttggttctactcttaccccctcttctgtggcaatgtggggtcagggccgtatcctaaagtatccacatggtcttaaatggaaatcatgggactctggaaagctggcatgagctggttggagcttttaaacagaagtgctttatgggtatcagatctcttctgacatcaattgtttcaaatcattgttgggctctgtcgtgttctgcaatcttccccattcccctcatgatctctggcttatcttttatccaatctgtatggactttttaggattttttttttcttatagtacaaataattttcagatcccagctttggtaaatgtgttaattctactttgtgaataaataaatgagtgatctgctaaaaatggcaattgtagaattatgttgtatgtaatgtacatatggagaaagaatgtattttgttcattttcttaataaaatgttatatatggatgcta

SEQ ID NO: 444354 - DNA, 1065 bp, Homo sapiens
ggatggcttcagccaaagaggcagaggttgcggtgagccaggatcgcacaactgcactccaaattgggcaacagagaaaggaccaggctggaagcatatgtccccccacccttatttatattcctttgagcattgccgttttctagacagacaatccgaaaataattgtgttgataggtctgtttaagcctgaactctgggtgtaaaatgttatccagaagctatagggagctgccttgctcaggtcattggaaatttcaaccctaagactcattggaatttctaagtccgttatgcaccattatgggcatatggagcatattcataccatgaggaggagtctttgtttatgatggactttttaatatggccataattaaactcacactcaaaaaggatgagctattgtcaaaagccaaaagaaaaacagacaaaatgaacatgaagcaaggagtccataaaacaagagttctttaccacgtttaagcaaatgtctctcaaaaaaaattgtatttctgtgcacattagctgagattcacacattttgcacctcagtagtatttcagatgagactcaatgtgtggagaaaactgctaacttgtttggttctactcttaccccctcttctgtggcaatgtggggtcagggccgtatcctaaagtatccacatggtcttaaatggaaatcatgggactctggaaagctggcatgagctggttggagcttttaaacagaagtgctttatgggtatcagatctcttctgacatcaattgtttcaaatcattgttgggctctgtcgtgttctgcaatcttccccattcccctcatgatctctggcttatcttttatccaatctgtatggactttttaggattttttttttcttatagtacaaataattttcagatcccagctttggtaaatgtgttaattctactttgtgaataaataaatgagtgatctgctaaaaatggcaattgtagaattatgttgtatgtaatgtacatatggagaaagaatgtattttgttcattttcttaataaaatgttatatatggatgcta

SEQ ID NO: 444355 - DNA, 2784 bp, Homo sapiens
ggtggcggccgctacggtgctgacaagatggcggctggcggagctgtcgctgcggcgcccgagtgccggcttctcccctacgcgctacacaagtggagctccttttcctccacctaccttcccgagaacattttagtggacaaaccaaatgaccaatcttcaagatggtcttcagagagcaactatcctccccagtacttgattctaaagctcgaaaggcctgctatagttcagaatatcacatttggaaaatatgagaaaactcatgtttgcaatttgaagaaatttaaagtctttggtggaatgaatgaagaaaatatgacagagctgttgtccagtggcttaaagaatgattataacaaagaaacattcaccttgaagcataaaattgatgaacagatgttcccttgtcgattcattaaaatagttccactcttgtcctggggacccagctttaactttagcatctggtatgttgaacttagtggcattgatgatcctgatatagtacaaccttgtctcaactggtatagcaagtaccgtgaacaggaagctattcgcctttgcctaaaacacttcagacaacacaactatacagaagcttttgagtcactgcaaaagaaaaccaagattgcactggaacatcccatgttaacagatattcatgacaagctggtgttgaagggtgattttgatgcttgcgaagagttgattgaaaaggctgtaaatgatggcttgttcaatcagtatatcagtcaacaggaatataagccacgatggagtcaaatcattcccaaaagtaccaaaggtgatggggaagataaccgtccaggaatgagaggaggccatcagatggttattgatgttcaaacagagactgtttatttgtttggtggctgggatggaacacaagatcttgctgacttctgggcgtacagtgtgaaggagaaccagtggacatgtatctctagagacactgaaaaagagaatggtcctagtgccagatcgtgtcataaaatgtgcattgatattcaacggaggcaaatctacacattggggcgttacttggattcctctgtgaggaacagcaaatctctgaaaagtgacttctatcgttatgacattgatacaaacacatggatgttactaagtgaggatactgctgctgatggagggccgaaattggtgtttgatcatcagatgtgtatggactcagaaaaacatatgatctacacttttggtggtagaattttgacttgtaatggcagcgtagatgacagcagagccagtgaaccacaattcagtggcttgtttgctttcaactgtcaatgtcaaacctggaaacttcttcgagaggactcctgtaatgctgggcctgaggacatccagtctcgaataggacactgcatgttattccactcaaaaaatcgttgcttatatgtatttggtggccagcgatcaaagacctatttgaatgatttctttagttatgatgtggactctgatcatgtagacataatatcagatggcaccaagaaagactctgggatggttccaatgacaggatttacacagagagcaactattgatccagaactgaatgaaatacacgtcttatctggactcagcaaagataaggaaaagagggaagaaaatgttagaaattcattctggatttatgacattgtgaggaatagttggtcttgtgtctataagaatgatcaagctgcaaaggataatccaactaaaagtcttcaggaagaagaaccatgtccaaggtttgcccatcagcttgtatacgatgagctacacaaggttcattacttatttggtgggaatccaggaaaatcttgctctccaaagatgagattagatgacttctggtcactgaagttgtgtagaccttcaaaagattatttactgaggcattgcaagtacctcataagaaaacacaggtttgaagaaaaggcccaagtggatccccttagtgctctgaaatatttacaaaatgatctttatataactgtggatcattcagacccagaagagacaaaagagtttcagctcctggcatcagctctattcaaatctggttcagattttacagctctgggcttttctgatgtggatcacacctatgctcaaagaactcagctctttgacaccttagtaaatttctttcctgacagcatgactcctcctaaaggcaacctggtagacctcatcacactgtaactgaagagtcactggacacagaaatggaaaacaggagtcgattttccgtcttttggattgcagctccactgactgacagtaaagctgcagtgattgaggactgcaccagagttctgaagggatcttaaccatcacaagtttttaccctcttccttcatgcctgacctcaaccccgctctcctcatcctattcctaaattaggctaataaagtgaaattggtatactttccagttaaatatatatatatatatattttttcttactttatcttttaagaattaatgagtataaaagaaaaattaggcagtttacccttttcagatttttatttcttttttttttaattgggggaaataagcactattaacagattcagcactacaagtattttgaatgttgttgctgttggtcatttggcctgccttttcccttcctatttcactttgcctcccatcacacaactgcgtgtaaatggtgtcacttgttcacctctttacttcattcttaacaagtgtatagttctctaggacagttgatgtatgttaagg

SEQ ID NO: 444356 - DNA, 2393 bp, Homo sapiens
ggtggcggccgctacggtgctgacaagatggcggctggcggagctgtcgctgcggcgcccgagtgccggcttctcccctacgcgctacacaagtggagctccttttcctccacctaccttcccgagaacattttagtggacaaaccaaatgaccaatcttcaagatggtcttcagagagcaactatcctccccagtacttgattctaaagctcgaaaggcctgctatagttcagaatatcacatttggaaaatatgagaaaactcatgtttgcaatttgaagaaatttaaagtctttggtggaatgaatgaagaaaatatgacagagctgttgtccagtggcttaaagaatgattataacaaagaaacattcaccttgaagcataaaattgatgaacagatgttcccttgtcgattcattaaaatagttccactcttgtcctggggacccagctttaactttagcatctggtatgttgaacttagtggcattgatgatcctgatatagtacaaccttgtctcaactggtatagcaagtaccgtgaacaggaagctattcgcctttgcctaaaacacttcagacaacacaactatacagaagcttttgagtcactgcaaaagaaaaccaagattgcactggaacatcccatgttaacagatattcatgacaagctggtgttgaagggtgattttgatgcttgcgaagagttgattgaaaaggctgtaaatgatggcttgttcaatcagtatatcagtcaacaggaatataagccacgatggagtcaaatcattcccaaaagtaccaaaggtgatggggaagataaccgtccaggaatgagaggaggccatcagatggttattgatgttcaaacagagactgtttatttgtttggtggctgggatggaacacaagatcttgctgacttctgggcgtacagtgtgaaggagaaccagtggacatgtatctctagagacactgaaaaagagaatggtcctagtgccagatcgtgtcataaaatgtgcattgatattcaacggaggcaaatctacacattggggcgttacttggattcctctgtgaggaacagcaaatctctgaaaagtgacttctatcgttatgacattgatacaaacacatggatgttactaagtgaggatactgctgctgatggagggccgaaattggtgtttgatcatcagatgtgtatggactcagaaaaacatatgatctacacttttggtggtagaattttgacttgtaatggcagcgtagatgacagcagagccagtgaaccacaattcagtggcttgtttgctttcaactgtcaatgtcaaacctggaaacttcttcgagaggactcctgtaatgctgggcctgaggacatccagtctcgaataggacactgcatgttattccactcaaaaaatcgttgcttatatgtatttggtggccagcgatcaaagacctatttgaatgatttctttagttatgatgtggactctgatcatgtagacataatatcagatggcaccaagaaagactctgggatggttccaatgacaggatttacacagagagcaactattgatccagaactgaatgaaatacacgtcttatctggactcagcaaagataaggaaaagagggaagaaaatgttagaaattcattctggatttatgacattgtgaggaatagttggtcttgtgtctataagaatgatcaagctgcaaaggataatccaactaaaagtcttcaggaagaagaaccatgtccaaggtttgcccatcagcttgtatacgatgagctacacaaggttcattacttatttggtgggaatccaggaaaatcttgctctccaaagatgagattagatgacttctggtcactgaagttgtgtagaccttcaaaagattatttactgaggcattgcaagtacctcataagaaaacacaggtttgaagaaaaggcccaagtggatccccttagtgctctgaaatatttacaaaatgatctttatataactgtggatcattcagacccagaagagacaaaagagtttcagctcctggcatcagctctattcaaatctggttcagattttacagctctggcatgactcctcctaaaggcaacctggtagacctcatcacactgtaactgaagagtcactggacacagaaatggaaaacaggagtcgattttccgtcttttggattgcagctccactgactgacagtaaagctgcagtgattgaggactgcaccagagttctgaagggatcttaaccatcacaagtttttaccctcttccttcatgcctgacctcaaccccgctctcctcatcctattcctaaattaggctaataaagtgaaattggtatactttccagtt

SEQ ID NO: 444357 - DNA, 2685 bp, Homo sapiens
ggtggcggccgctacggtgctgacaagatggcggctggcggagctgtcgctgcggcgcccgagtgccggcttctcccctacgcgctacacaagtggagctccttttcctccacctaccttcccgagaacattttagtggacaaaccaaatgaccaatcttcaagatggtcttcagagagcaactatcctccccagtacttgattctaaagctcgaaaggcctgctatagttcagaatatcacatttggaaaatatgagaaaactcatgtttgcaatttgaagaaatttaaagtctttggtggaatgaatgaagaaaatatgacagagctgttgtccagtggcttaaagaatgattataacaaagaaacattcaccttgaagcataaaattgatgaacagatgttcccttgtcgattcattaaaatagttccactcttgtcctggggacccagctttaactttagcatctggtatgttgaacttagtggcattgatgatcctgatatagtacaaccttgtctcaactggtatagcaagtaccgtgaacaggaagctattcgcctttgcctaaaacacttcagacaacacaactatacagaagcttttgagtcactgcaaaagaaaaccaagattgcactggaacatcccatgttaacagatattcatgacaagctggtgttgaagggtgattttgatgcttgcgaagagttgattgaaaaggctgtaaatgatggcttgttcaatcagtatatcagtcaacaggaatataagccacgatggagtcaaatcattcccaaaagtaccaaaggtgatggggaagataaccgtccaggaatgagaggaggccatcagatggttattgatgttcaaacagagactgtttatttgtttggtggctgggatggaacacaagatcttgctgacttctgggcgtacagtgtgaaggagaaccagtggacatgtatctctagagacactgaaaaagagaatggtcctagtgccagatcgtgtcataaaatgtgcattgatattcaacggaggcaaatctacacattggggcgttacttggattcctctgtgaggaacagcaaatctctgaaaagtgacttctatcgttatgacattgatacaaacacatggatgttactaagtgaggatactgctgctgatggagggccgaaattggtgtttgatcatcagatgtgtatggactcagaaaaacatatgatctacacttttggtggtagaattttgacttgtaatggcagcgtagatgacagcagagccagtgaaccacaattcagtggcttgtttgctttcaactgtcaatgtcaaacctggaaacttcttcgagaggactcctgtaatgctgggcctgaggacatccagtctcgaataggacactgcatgttattccactcaaaaaatcgttgcttatatgtatttggtggccagcgatcaaagacctatttgaatgatttctttagttatgatgtggactctgatcatgtagacataatatcagatggcaccaagaaagactctgggatggttccaatgacaggatttacacagagagcaactattgatccagaactgaatgaaatacacgtcttatctggactcagcaaagataaggaaaagagggaagaaaatgttagaaattcattctggatttatgacattgtgaggaatagttggtcttgtgtctataagaatgatcaagctgcaaaggataatccaactaaaagtcttcaggaagaagaaccatgtccaaggtttgcccatcagcttgtatacgatgagctacacaaggttcattacttatttggtgggaatccaggaaaatcttgctctccaaagatgagattagatgacttctggtcactgaagttgtgtagaccttcaaaagattatttactgaggcattgcaagtacctcataagaaaacacaggtttgaagaaaaggcccaagtggatccccttagtgctctgaaatatttacaaaatgatctttatataactgtggatcattcagacccagaagagacaaaagaggcatccttgttcatctagcaatatctgaactgcagtgcatttgccttccactcacagaattcgtgctgattatatgtagttctgacccttaggtctctttccgtgttagctcctgccttgctttggctttgtaatagcagtatcaagctgtgcccggcatgcttgagcattgacacaggtgtcagatttaatgttgaatcactttcaggctccaggttcattgtactttcaagcaatagaggctgcatgtcttcagcaccataacaaagagatactctttcatagtttcgtactataaaattaagtcctaagtctctcaatattgattatggcccttcagtaggtagagaatctgcaggacatgctttagaacccccatgaagggggacagttaattgtctttccttgagttttcagtcaattcatgacactgtgcaaataggagaaataattatagttttgccaagtggcagaatatgtttgatttaatcttttatgacttataactgtacttagttgtgaagagtccattaatgttaattttgttatgccatgcatttgagagttatgcatagatttccttgtattttctccatattctatgtaaaatagctgtaactgggaaca

SEQ ID NO: 444358 - DNA, 1036 bp, Homo sapiens
ggtggcggccgctacggtgctgacaagatggcggctggcggagctgtcgctgcggcgcccgagtgccggcttctcccctacgcgctacacaagtggagctccttttcctccacctaccttcccgagaacattttagtggacaaaccaaatgaccaatcttcaagatggtcttcagagagcaactatcctccccagtacttgattctaaagctcgaaaggcctgctatagttcagaatatcacatttggaaaatatgagaaaactcatgtttgcaatttgaagaaatttaaagtctttggtggaatgaatgaagaaaatatgacagagctgttgtccagtggcttaaagaatgattataacaaagaaacattcaccttgaagcataaaattgatgaacagatgttcccttgtcgattcattaaaatagttccactcttgtcctggggacccagctttaactttagcatctggtatgttgaacttagtggcattgatgatcctgatatagtacaaccttgtctcaactggtatagcaagtaccgtgaacaggaagctattcgcctttgcctaaaacacttcagacaacacaactatacagaagcttttgagtcactgcaaaagaaaaccaagattgcactggaacatcccatgttaacagatattcatgacaagctggtgttgaagggtgattttgatgcttgcgaagagttgattgaaaaggctgtaaatgatggcttgttcaatcagtatatcagtcaacaggaatataagccacgatggagtcaaatcattcccctcatgatctctggcttatcttttatccaatctgtatggactttttaggattttttttttcttatagtacaaataattttcagatcccagctttggtaaatgtgttaattctactttgtgaataaataaatgagtgatctgctaaaaatggcaattgtagaattatgttgtatgtaatgtacatatggagaaagaatgtattttgttcattttcttaataaaatgttatatatggatgcta

SEQ ID NO: 444359 - DNA, 318 bp, Homo sapiens
gaacattttagtggacaaaccaaatgaccaatcttcaagatggtcttcagagagcaactatcctccccaggtaagattacatgtatcccttaatgctgtttagaagtcaccatttaaataaacactcaattgatactagttatctggaatctactaatagtttattctctttttgagattgtgaggtaaatttttattctctctatttttgcttgtttattaaattttggaagaatttttatctcataggcaaatgcagtgtgagatttgatgaaacatggacttttacttctgtctaccagaacagttacgctcaag

SEQ ID NO: 444360 - DNA, 2434 bp, Homo sapiens
ggtggcggccgctacggtgctgacaagatggcggctggcggagctgtcgctgcggcgcccgagtgccggcttctcccctacgcgctacacaagtggagctccttttcctccacctaccttcccgagaacattttagtggacaaaccaaatgaccaatcttcaagatggtcttcagagagcaactatcctccccagtacttgattctaaagctcgaaaggcctgctatagttcagaatatcacatttggaaaatatgagaaaactcatgtttgcaatttgaagaaatttaaagtctttggtggaatgaatgaagaaaatatgacagagctgttgtccagtggcttaaagaatgattataacaaagaaacattcaccttgaagcataaaattgatgaacagatgttcccttgtcgattcattaaaatagttccactcttgtcctggggacccagctttaactttagcatctggtatgttgaacttagtggcattgatgatcctgatatagtacaaccttgtctcaactggtatagcaagtaccgtgaacaggaagctattcgcctttgcctaaaacacttcagacaacacaactatacagaagcttttgagtcactgcaaaagaaaaccaagattgcactggaacatcccatgttaacagatattcatgacaagctggtgttgaagggtgattttgatgcttgcgaagagttgattgaaaaggctgtaaatgatggcttgttcaatcagtatatcagtcaacaggaatataagccacgatggagtcaaatcattcccaaaagtaccaaaggtgatggggaagataaccgtccaggaatgagaggaggccatcagatggttattgatgttcaaacagagactgtttatttgtttggtggctgggatggaacacaagatcttgctgacttctgggcgtacagtgtgaaggagaaccagtggacatgtatctctagagacactgaaaaagagaatggtcctagtgccagatcgtgtcataaaatgtgcattgatattcaacggaggcaaatctacacattggggcgttacttggattcctctgtgaggaacagcaaatctctgaaaagtgacttctatcgttatgacattgatacaaacacatggatgttactaagtgaggatactgctgctgatggagggccgaaattggtgtttgatcatcagatgtgtatggactcagaaaaacatatgatctacacttttggtggtagaattttgacttgtaatggcagcgtagatgacagcagagccagtgaaccacaattcagtggcttgtttgctttcaactgtcaatgtcaaacctggaaacttcttcgagaggactcctgtaatgctgggcctgaggacatccagtctcgaataggacactgcatgttattccactcaaaaaatcgttgcttatatgtatttggtggccagcgatcaaagacctatttgaatgatttctttagttatgatgtggactctgatcatgtagacataatatcagatggcaccaagaaagactctgggatggttccaatgacaggatttacacagagagcaactattgatccagaactgaatgaaatacacgtcttatctggactcagcaaagataaggaaaagagggaagaaaatgttagaaattcattctggatttatgacattgtgaggaatagttggtcttgtgtctataagaatgatcaagctgcaaaggataatccaactaaaagtcttcaggaagaagaaccatgtccaaggtttgcccatcagcttgtatacgatgagctacacaaggttcattacttatttggtgggaatccaggaaaatcttgctctccaaagatgagattagatgacttctggtcactgaagttgtgtagaccttcaaaagattatttactgaggcattgcaagtacctcataagaaaacacaggtttgaagaaaaggcccaagtggatccccttagtgctctgaaatatttacaaaatgatctttatataatttcagctcctggcatcagctctattcaaatctggttcagattttacagctctgggcttttctgatgtggatcacacctatgctcaaagaactcagctctttgacaccttagtaaatttctttcctgacagcatgactcctcctaaaggcaacctggtagacctcatcacactgtaactgaagagtcactggacacagaaatggaaaacaggagtcgattttccgtcttttggattgcagctccactgactgacagtaaagctgcagtgattgaggactgcaccagagttctgaagggatcttaaccatcacaagtttttaccctcttccttcatgcctgacctcaaccccgctctcctcatcctattcctaaattaggctaataaagtgaaattggtatactttccagtt

SEQ ID NO: 444361 - DNA, 2564 bp, Homo sapiens
ggtggcggccgctacggtgctgacaagatggcggctggcggagctgtcgctgcggcgcccgagtgccggcttctcccctacgcgctacacaagtggagctccttttcctccacctaccttcccgagaacattttagtggacaaaccaaatgaccaatcttcaagatggtcttcagagagcaactatcctccccagtacttgattctaaagctcgaaaggcctgctatagttcagaatatcacatttggaaaatatgagaaaactcatgtttgcaatttgaagaaatttaaagtctttggtggaatgaatgaagaaaatatgacagagctgttgtccagtggcttaaagaatgattataacaaagaaacattcaccttgaagcataaaattgatgaacagatgttcccttgtcgattcattaaaatagttccactcttgtcctggggacccagctttaactttagcatctggtatgttgaacttagtggcattgatgatcctgatatagtacaaccttgtctcaactggtatagcaagtaccgtgaacaggaagctattcgcctttgcctaaaacacttcagacaacacaactatacagaagcttttgagtcactgcaaaagaaaaccaagattgcactggaacatcccatgttaacagatattcatgacaagctggtgttgaagggtgattttgatgcttgcgaagagttgattgaaaaggctgtaaatgatggcttgttcaatcagtatatcagtcaacaggaatataagccacgatggagtcaaatcattcccaaaagtaccaaaggtgatggggaagataaccgtccaggaatgagaggaggccatcagatggttattgatgttcaaacagagactgtttatttgtttggtggctgggatggaacacaagatcttgctgacttctgggcgtacagtgtgaaggagaaccagtggacatgtatctctagagacactgaaaaagagaatggtcctagtgccagatcgtgtcataaaatgtgcattgatattcaacggaggcaaatctacacattggggcgttacttggattcctctgtgaggaacagcaaatctctgaaaagtgacttctatcgttatgacattgatacaaacacatggatgttactaagtgaggatactgctgctgatggagggccgaaattggtgtttgatcatcagatgtgtatggactcagaaaaacatatgatctacacttttggtggtagaattttgacttgtaatggcagcgtagatgacagcagagccagtgaaccacaattcagtggcttgtttgctttcaactgtcaatgtcaaacctggaaacttcttcgagaggactcctgtaatgctgggcctgaggacatccagtctcgaataggacactgcatgttattccactcaaaaaatcgttgcttatatgtatttggtggccagcgatcaaagacctatttgaatgatttctttagttatgatgtggactctgatcatgtagacataatatcagatggcaccaagaaagactctgggatggttccaatgacaggatttacacagagagcaactattgatccagaactgaatgaaatacacgtcttatctggactcagcaaagataaggaaaagagggaagaaaatgttagaaattcattctggatttatgacattgtgaggaatagttggtcttgtgtctataagaatgatcaagctgcaaaggataatccaactaaaagtcttcaggaagaagaaccatgtccaaggtttgcccatcagcttgtatacgatgagctacacaaggttcattacttatttggtgggaatccaggaaaatcttgctctccaaagatgagattagatgacttctggtcactgaagttgtgtagaccttcaaaagattatttactgaggcattgcaagtacctcataagaaaacacaggtttgaagaaaaggcccaagtggatccccttagtgctctgaaatatttacaaaatgatctttatataactgtggatcattcagacccagaagagacaaaagagtttcagctcctggcatcagctctattcaaatctggttcagattttacagctctgggcttttctgatgtggatcacacctatgctcaaagaactcagctctttgacaccttagtaaatttctttcctgacagcatgactcctcctaaaggcaacctggtagacctcatcacactgtaactgaagagtcactggacacagaaatggaaaacaggagtcgattttccgtcttttggattgcagctccactgactgacagtaaagctgcagtgattgaggactgcaccagagttctgaagggatcttaaccatcacaagtttttaccctcttccttcatgcctgacctcaaccccgctctcctcatcctattcctaaattaggctaataaagtgaaattggtatactttccagttgaacaattttaatgcattgacaagtgaacctcgagggggggcccggaccccaattctgcctatagtgagtggaattacaatttactggccggctt

SEQ ID NO: 444362 - DNA, 2491 bp, Homo sapiens
ggtggcggccgctacggtgctgacaagatggcggctggcggagctgtcgctgcggcgcccgagtgccggcttctcccctacgcgctacacaagtggagctccttttcctccacctaccttcccgagaacattttagtggacaaaccaaatgaccaatcttcaagatggtcttcagagagcaactatcctccccagtacttgattctaaagctcgaaaggcctgctatagttcagaatatcacatttggaaaatatgagaaaactcatgtttgcaatttgaagaaatttaaagtctttggtggaatgaatgaagaaaatatgacagagctgttgtccagtggcttaaagaatgattataacaaagaaacattcaccttgaagcataaaattgatgaacagatgttcccttgtcgattcattaaaatagttccactcttgtcctggggacccagctttaactttagcatctggtatgttgaacttagtggcattgatgatcctgatatagtacaaccttgtctcaactggtatagcaagtaccgtgaacaggaagctattcgcctttgcctaaaacacttcagacaacacaactatacagaagcttttgagtcactgcaaaagaaaaccaagattgcactggaacatcccatgttaacagatattcatgacaagctggtgttgaagggtgattttgatgcttgcgaagagttgattgaaaaggctgtaaatgatggcttgttcaatcagtatatcagtcaacaggaatataagccacgatggagtcaaatcattcccaaaagtaccaaaggtgatggggaagataaccgtccaggaatgagaggaggccatcagatggttattgatgttcaaacagagactgtttatttgtttggtggctgggatggaacacaagatcttgctgacttctgggcgtacagtgtgaaggagaaccagtggacatgtatctctagagacactgaaaaagagaatggtcctagtgccagatcgtgtcataaaatgtgcattgatattcaacggaggcaaatctacacattggggcgttacttggattcctctgtgaggaacagcaaatctctgaaaagtgacttctatcgttatgacattgatacaaacacatggatgttactaagtgaggatactgctgctgatggagggccgaaattggtgtttgatcatcagatgtgtatggactcagaaaaacatatgatctacacttttggtggtagaattttgacttgtaatggcagcgtagatgacagcagagccagtgaaccacaattcagtggcttgtttgctttcaactgtcaatgtcaaacctggaaacttcttcgagaggactcctgtaatgctgggcctgaggacatccagtctcgaataggacactgcatgttattccactcaaaaaatcgttgcttatatgtatttggtggccagcgatcaaagacctatttgaatgatttctttagttatgatgtggactctgatcatgtagacataatatcagatggcaccaagaaagactctgggatggttccaatgacaggatttacacagagagcaactattgatccagaactgaatgaaatacacgtcttatctggactcagcaaagataaggaaaagagggaagaaaatgttagaaattcattctggatttatgacattgtgaggaatagttggtcttgtgtctataagaatgatcaagctgcaaaggataatccaactaaaagtcttcaggaagaagaaccatgtccaaggtttgcccatcagcttgtatacgatgagctacacaaggttcattacttatttggtgggaatccaggaaaatcttgctctccaaagatgagattagatgacttctggtcactgaagttgtgtagaccttcaaaagattatttactgaggcattgcaagtacctcataagaaaacacaggtttgaagaaaaggcccaagtggatccccttagtgctctgaaatatttacaaaatgatctttatataactgtggatcattcagacccagaagagacaaaagaggtaaagaaaggtggtaataaatttcagaaattaagtatttttaaatgtcttcctaacttatatttaatgattttgctcttgagtgtgtaaaggaaaacgaagaaaatatgatgacatcagtaatctttaaaatgtcacagagcaggtgaaataaaaattgaataggcatgttttcgtgtgataagattcaagtcaccaaaaacccttggtccattcagaaaaggattatcaggtataaagttttaacttagttttgtgttttggaaagcaaatagaaatttttactttgtccatagtcccatgattattttacttaaggattacataatggttcaatataaacttttctgtggatagttaagatcccccaagagaggaaagaaaactcccctgttgcttagggagaaaatgaagagaggttggtgggagttag

SEQ ID NO: 444363 - DNA, 4403 bp, Homo sapiens
ttgggcggcggcgcggagcgggcggcgagctgtgcgggaggggcggccccgaggggcggggcgggccgacgccgcgtgtcccgccgcagccgcggagtccggctcctagatggggcccggcgcgtagaggtgcctcccgctcgttgccgcgtcctacccgcaccgtgcgcggctcgagctgaggacaccaacggccgcgactccccggcgagaccaggccggagcgtggacggcgcgcgcgccccgcgagggagggcgctgaggcgcgcgccggaagcgggagcgggagcgggagcgcggcggcggcggcgaaggtgcgggcggccgagcggggggcggggctgcggtgcctgcagaaccttggacagaagctccctagctgccgccgccgccgccgccgccgtcgccgccgccgagcgcgagcccagccgatccccgccgagcgcccccgagcgccgccgagcgccgggaccgcggcggcggggccgcggcgcgcattgcggagggcgcggagcgcaggagctgccgcctgccgggcagatccaagggggcagcacgcttcccgggagcgcccccgcctcctctccggggccgccgcaggctcggtgagcggttttatccctccggccggcaggctgggcgcgcaggggcgcgagcccccgcccggcgcgcagcagcaccatgggcacggtgctgtccctgtctcccagctaccggaaggccacgctgtttgaggatggcgcggccaccgtgggccactatacggccgtacagaacagcaagaacgccaaggacaagaacctgaagcgccactccatcatctccgtgctgccttggaagagaatcgtggccgtgtcggccaagaagaagaactccaagaaggtgcagcccaacagcagctaccagaacaacatcacgcacctcaacaatgagaacctgaagaagtcgctgtcgtgcgccaacctgtccacattcgcccagcccccaccggcccagccgcctgcacccccggccagccagctctcgggttcccagaccgggggctcctcctcagtcaagaaagcccctcaccctgccgtcacctccgcagggacgcccaaacgggtcatcgtccaggcgtccaccagtgagctgcttcgctgcctgggtgagtttctctgccgccggtgctaccgcctgaagcacctgtcccccacggaccccgtgctctggctgcgcagcgtggaccgctcgctgcttctgcagggctggcaggaccagggcttcatcacgccggccaacgtggtcttcctctacatgctctgcagggatgttatctcctccgaggtgggctcggatcacgagctccaggccgtcctgctgacatgcctgtacctctcctactcctacatgggcaacgagatctcctacccgctcaagcccttcctggtggagagctgcaaggaggccttttgggaccgttgcctctctgtcatcaacctcatgagctcaaagatgctgcagataaatgccgacccacactacttcacacaggtcttctccgacctgaagaacgagagcggccaggaggacaagaagcggctcctcctaggcctggatcggtgagcactgtagcctgcgtcatggctcaaggattcaatgcatttttaagaatttattattaaatcagttttgtgtacagtatgtgtctagcaaagccaccaagggcctcacctttcccacagtctctccctggggtttttttcatccctgccaagaactctgggcacttttgaactcacgagccttgcgcaaaacccagaagatgtattcagagccacccaggccactgacctcccactttggggaactcaaaggactgacctgcccctgccgcctgtgcccttgctgggtccagggtaggcaaggctgccggctgcaccctgtatggagctagagaggggcctctggctgcctggcccagggaggaattggggtttctggttggaggcccttttctggctcctgtgtggagttattcactctcccagaggctcctggagccagccaccctaactgagctgccagtggggtcgtgaggcaagatccccgccacccggggacatcttcaatctaggcgaggcgaagctgagcgggtctagtggaaagattgtgtctggtcgtttgaccacacaccgccctgatttgctgttttctttttttagggagaagggcttttctttagtggagaaatggaactcgcccccctacccccttgtctgctgctcccagccacgttggtggtattggccgatgagctggtttgactcattaatttctctcaatttgggtcccagctaaagaggtggggtgaagctggggacagctttcctgggtgagtttttcttttgaataatgtagtgcagtcaccctgtggcaaatgccaggacagctgcaggtgcccattagcaacgcctgccttctgggcaaggtgagggatgccataccttgagaccaagccggtgcccacctaagggctaaggcctcttgctggtgcacatgacatttgtcctgcagagctggggggaaggcgatgtggtgaccccacccccacccgttaatttaaagctgtttctaaacagttgagtttcttctaaagaggaagccttgcccagcaaggaccagtgagacagccggatcttggagacaattacaagacggggagtgagactcctgattgctctggaagcctgctgatttctacaactgatcatttgcagctgctggttttggtttccaccttaccctactggctgtaaaaacacaaatgtgtactttattgattttctttctaattctcccgcattggtggcttgggacttgggagagggagcaagccttcctccatggcccatcactcggctgtggagaacaaagaccaatgtgaagacactacagaggattctgtcttccaggcccagtccactggggagtgctggaatggggacctggggtggggaggcagagggtcactttacataggattaagttcgaggtggctaccgatttcagcacatgcactactgaaatttacacaaaaagaaagctgtgaaattgaagtcccaatttaagagtcctgaggcagaacctggtggctggaggcattcccagaggtggggaagagagcctgcccggccggagaacatctgccttgctgcacctgaggcccagcagagccgttcctgggactgtcagataatcggtgcagcggtggaaggagcctgcggctgctggcacagacttcacacagcacctcctctctgctgggtttccacacagcctgtcttcagatcctgctgccgcgtgcgaccagaggtgggaggcccctggtggcatggaagagggagggtcagtgccaagtctcaggaggagggcgcatgtgtgtatcaccctcagctggcggaacctggctgcgaactgtgcagttacgttgcatccacaggattccagttgcgtgtctgtttccttctctttctccgtatttatttttttattcttcggaggaggtggacatttcggaagtggtggggactaagggaagaactctctagttccctcagtgtgaagcctgtcgtgttctctccccttgcactggtcatcagtattgtgtaaaggaacaactgatatacttgagtgtgcaagcaaagaacccatttgccatgctgctatgaagactacttttagatcaacaataaaaaaaaacctacaaaaaaacctttattctttaattgttgcttttacggtgatattgtgcatgcaaaccaggagcattttgtgtcttaagaaaaataatcttagaacagatggctgtgaaaattacacccatgcacagaacaagccacaggaataatagttcaggatttggtttttctctttttcttgtaaacctggagggttgatatattctttccatgcagttattagaacttagttttgttccaacagttaaacttgcaatgaaaagaaaatgtgccatttttttcactcagaattattcatagctgtatatttgaaactgctaattacacacgtgtgatgtatgttggttttttagtgcaatttcttctgtagctattctttgaccaaactgtgggtattgttaatattaatttatatttgtctcattttgtatgtatgtgtagtgtgtttgtgagtatgtgtggtttataatctgacaaagtcatgaagctcagtttggctgtaatttaattccccttcccttatttttatttatttttgtactgtgctgattcaataaaatgcactgaccatccattaaaaaaaaacacaacaaaaacaaaagcagaaatactatatgtctacattttaaaatcagaattagtatatatacttacacacatact

SEQ ID NO: 444364 - DNA, 4157 bp, Homo sapiens
ttgggcggcggcgcggagcgggcggcgagctgtgcgggaggggcggccccgaggggcggggcgggccgacgccgcgtgtcccgccgcagccgcggagtccggctcctagatggggcccggcgcgtagaggtgcctcccgctcgttgccgcgtcctacccgcaccgtgcgcggctcgagctgaggacaccaacggccgcgactccccggcgagaccaggccggagcgtggacggcgcgcgcgccccgcgagggagggcgctgaggcgcgcgccggaagcgggagcgggagcgggagcgcggcggcggcggcgaaggtgcgggcggccgagcggggggcggggctgcggtgcctgcagaaccttggacagaagctccctagctgccgccgccgccgccgccgccgtcgccgccgccgagcgcgagcccagccgatccccgccgagcgcccccgagcgccgccgagcgccgggaccgcggcggcggggccgcggcgcgcattgcggagggcgcggagcgcaggagctgccgcctgccgggcagatccaagggggcagcacgcttcccgggagcgcccccgcctcctctccggggccgccgcaggctcggtgagcggttttatccctccggccggcaggctgggcgcgcaggggcgcgagcccccgcccggcgcgcagcagcaccatgggcacggtgctgtccctgtctcccagctaccggaaggccacgctgtttgaggatggcgcggccaccgtgggccactatacggccgtacagaacagcaagaacgccaaggacaagaacctgaagcgccactccatcatctccgtgctgccttggaagagaatcgtggccgtgtcggccaagaagaagaactccaagaaggtgcagcccaacagcagctaccagaacaacatcacgcacctcaacaatgagaacctgaagaagtcgctgtcgtgcgccaacctgtccacattcgcccagcccccaccggcccagccgcctgcacccccggccagccagctctcgggttcccagaccgggggctcctcctcagtcaagaaagcccctcaccctgccgtcacctccgcagggacgcccaaacgggtcatcgtccaggcgtccaccagtgagctgcttcgctgcctggggatgttatctcctccgaggtgggctcggatcacgagctccaggccgtcctgctgacatgcctgtacctctcctactcctacatgggcaacgagatctcctacccgctcaagcccttcctggtggagagctgcaaggaggccttttgggaccgttgcctctctgtcatcaacctcatgagctcaaagatgctgcagataaatgccgacccacactacttcacacaggtcttctccgacctgaagaacgagagcggccaggaggacaagaagcggctcctcctaggcctggatcggtgagcactgtagcctgcgtcatggctcaaggattcaatgcatttttaagaatttattattaaatcagttttgtgtacagtatgtgtctagcaaagccaccaagggcctcacctttcccacagtctctccctggggtttttttcatccctgccaagaactctgggcacttttgaactcacgagccttgcgcaaaacccagaagatgtattcagagccacccaggccactgacctcccactttggggaactcaaaggactgacctgcccctgccgcctgtgcccttgctgggtccagggtaggcaaggctgccggctgcaccctgtatggagctagagaggggcctctggctgcctggcccagggaggaattggggtttctggttggaggcccttttctggctcctgtgtggagttattcactctcccagaggctcctggagccagccaccctaactgagctgccagtggggtcgtgaggcaagatccccgccacccggggacatcttcaatctaggcgaggcgaagctgagcgggtctagtggaaagattgtgtctggtcgtttgaccacacaccgccctgatttgctgttttctttttttagggagaagggcttttctttagtggagaaatggaactcgcccccctacccccttgtctgctgctcccagccacgttggtggtattggccgatgagctggtttgactcattaatttctctcaatttgggtcccagctaaagaggtggggtgaagctggggacagctttcctgggtgagtttttcttttgaataatgtagtgcagtcaccctgtggcaaatgccaggacagctgcaggtgcccattagcaacgcctgccttctgggcaaggtgagggatgccataccttgagaccaagccggtgcccacctaagggctaaggcctcttgctggtgcacatgacatttgtcctgcagagctggggggaaggcgatgtggtgaccccacccccacccgttaatttaaagctgtttctaaacagttgagtttcttctaaagaggaagccttgcccagcaaggaccagtgagacagccggatcttggagacaattacaagacggggagtgagactcctgattgctctggaagcctgctgatttctacaactgatcatttgcagctgctggttttggtttccaccttaccctactggctgtaaaaacacaaatgtgtactttattgattttctttctaattctcccgcattggtggcttgggacttgggagagggagcaagccttcctccatggcccatcactcggctgtggagaacaaagaccaatgtgaagacactacagaggattctgtcttccaggcccagtccactggggagtgctggaatggggacctggggtggggaggcagagggtcactttacataggattaagttcgaggtggctaccgatttcagcacatgcactactgaaatttacacaaaaagaaagctgtgaaattgaagtcccaatttaagagtcctgaggcagaacctggtggctggaggcattcccagaggtggggaagagagcctgcccggccggagaacatctgccttgctgcacctgaggcccagcagagccgttcctgggactgtcagataatcggtgcagcggtggaaggagcctgcggctgctggcacagacttcacacagcacctcctctctgctgggtttccacacagcctgtcttcagatcctgctgccgcgtgcgaccagaggtgggaggcccctggtggcatggaagagggagggtcagtgccaagtctcaggaggagggcgcatgtgtgtatcaccctcagctggcggaacctggctgcgaactgtgcagttacgttgcatccacaggattccagttgcgtgtctgtttccttctctttctccgtatttatttttttattcttcggaggaggtggacatttcggaagtggtggggactaagggaagaactctctagttccctcagtgtgaagcctgtcgtgttctctccccttgcactggtcatcagtattgtgtaaaggaacaactgatatacttgagtgtgcaagcaaagaacccatttgccatgctgctatgaagactacttttagatcaacaataaaaaaaaacctacaaaaaaacctttattctttaattgttgcttttacggtgatattgtgcatgcaaaccaggagcattttgtgtcttaagaaaaataatcttagaacagatggctgtgaaaattacacccatgcacagaacaagccacaggaataatagttcaggatttggtttttctctttttcttgtaaacctggagggttgatatattctttccatgcagttattagaacttagttttgttccaacagttaaacttgcaatgaaaagaaaatgtgccatttttttcactcagaattattcatagctgtatatttgaaactgctaattacacacgtgtgatgtatgttggttttttagtgcaatttcttctgtagctattctttgaccaaactgtgggtattgttaatattaatttatatttgtctcattttgtatgtatgtgtagtgtgtttgtgagtatgtgtggtttataatctgacaaagtcatgaagctcagtttggctgtaatttaattccccttcccttatttttatttatttttgtactgtgctgattcaataaaatgcactgaccatccatta

SEQ ID NO: 444365 - DNA, 1320 bp, Homo sapiens
gcattcccagaggtggggaagagagcctgcccggccggagaacatctgcctcagcacatgcactactgaaatttacacaaaaagaaagctgtgaaattgaagtcccaatttaagagtcctgaggcagaacctggtggctggaggcattcccagaggtggggaagagagcctgcccggccggagaacatctgccttgctgcacctgaggcccagcagagccgttcctgggactgtcagataatcggtgcagcggtggaaggagcctgcggctgctggcacagacttcacacagcacctcctctctgctgggtttccacacagcctgtcttcagatcctgctgccgcgtgcgaccagaggtgggaggcccctggtggcatggaagagggagggtcagtgccaagtctcaggaggagggcgcatgtgtgtatcaccctcagctggcggaacctggctgcgaactgtgcagttacgttgcatccacaggattccagttgcgtgtctgtttccttctctttctccgtatttatttttttattcttcggaggaggtggacatttcggaagtggtggggactaagggaagaactctctagttccctcagtgtgaagcctgtcgtgttctctccccttgcactggtcatcagtattgtgtaaaggaacaactgatatacttgagtgtgcaagcaaagaacccatttgccatgctgctatgaagactacttttagatcaacaataaaaaaaaacctacaaaaaaacctttattctttaattgttgcttttacggtgatattgtgcatgcaaaccaggagcattttgtgtcttaagaaaaataatcttagaacagatggctgtgaaaattacacccatgcacagaacaagccacaggaataatagttcaggatttggtttttctctttttcttgtaaacctggagggttgatatattctttccatgcagttattagaacttagttttgttccaacagttaaacttgcaatgaaaagaaaatgtgccatttttttcactcagaattattcatagctgtatatttgaaactgctaattacacacgtgtgatgtatgttggttttttagtgcaatttcttctgtagctattctttgaccaaactgtgggtattgttaatattaatttatatttgtctcattttgtatgtatgtgtagtgtgtttgtgagtatgtgtggtttataatctgacaaagtcatgaagctcagtttggctgtaatttaattccccttcccttatttttatttatttttgtactgtgctgattcaataaaatgcactgaccatccatta

SEQ ID NO: 444366 - DNA, 4317 bp, Homo sapiens
ttgggcggcggcgcggagcgggcggcgagctgtgcgggaggggcggccccgaggggcggggcgggccgacgccgcgtgtcccgccgcagccgcggagtccggctcctagatggggcccggcgcgtagaggtgcctcccgctcgttgccgcgtcctacccgcaccgtgcgcggctcgagctgaggacaccaacggccgcgactccccggcgagaccaggccggagcgtggacggcgcgcgcgccccgcgagggagggcgctgaggcgcgcgccggaagcgggagcgggagcgggagcgcggcggcggcggcgaaggtgcgggcggccgagcggggggcggggctgcggtgcctgcagaaccttggacagaagctccctagctgccgccgccgccgccgccgccgtcgccgccgccgagcgcgagcccagccgatccccgccgagcgcccccgagcgccgccgagcgccgggaccgcggcggcggggccgcggcgcgcattgcggagggcgcggagcgcaggagctgccgcctgccgggcagatccaagggggcagcacgcttcccgggagcgcccccgcctcctctccggggccgccgcaggctcggtgagcggttttatccctccggccggcaggctgggcgcgcaggggcgcgagcccccgcccggcgcgcagcagcaccatgggcacggtgctgtccctgtctcccagctaccggaaggccacgctgtttgaggatggcgcggccaccgtgggccactatacggccgtacagaacagcaagaacgccaaggacaagaacctgaagcgccactccatcatctccgtgctgccttggaagagaatcgtggccgtgtcggccaagaagaagaactccaagaaggtgcagcccaacagcagctaccagaacaacatcacgcacctcaacaatgagaacctgaagaagtcgctgtcgtgcgccaacctgtccacattcgcccagcccccaccggcccagccgcctgcacccccggccagccagctctcgggttcccagaccgggggctcctcctcagtcaagaaagcccctcaccctgccgtcacctccgcagggacgcccaaacgggtcatcgtccaggcgtccaccagtgagctgcttcgctgcctgggtgagtttctctgccgccggtgctaccgcctgaagcacctgtcccccacggaccccgtgctctggctgcgcagcgtggaccgctcgctgcttctgcagggctggcaggaccagggcttcatcacgccggccaacgtggtcttcctctacatgctctgcagggatgttatctcctccgaggtgggctcggatcacgagctccaggccgtcctgctgacatgcctgtacctctcctactcctacatgggcaacgagatctcctacccgctcaagcccttcctggtggagagctgcaaggaggccttttgggaccgttgcctctctgtcatcaacctcatgagctcaaagatgctgcagataaatgccgacccacactacttcacacaggtcttctccgacctgaagaacgagagcggccaggaggacaagaagcggctcctcctaggcctggatcggtgagcactgtagcctgcgtcatggctcaaggattcaatgcatttttaagaatttattattaaatcagttttgtgtacagtatgtgtctagcaaagccaccaagggcctcacctttcccacagtctctccctggggtttttttcatccctgccaagaactctgggcacttttgaactcacgagccttgcgcaaaacccagaagatgtattcagagccacccaggccactgacctcccactttggggaactcaaaggactgacctgcccctgccgcctgtgcccttgctgggtccagggtaggcaaggctgccggctgcaccctgtatggagctagagaggggcctctggctgcctggcccagggaggaattggggtttctggttggaggcccttttctggctcctgtgtggagttattcactctcccagaggctcctggagccagccaccctaactgagctgccagtggggtcgtgaggcaagatccccgccacccggggacatcttcaatctaggcgaggcgaagctgagcgggtctagtggaaagattgtgtctggtcgtttgaccacacaccgccctgatttgctgttttctttttttagggagaagggcttttctttagtggagaaatggaactcgcccccctacccccttgtctgctgctcccagccacgttggtggtattggccgatgagctggtttgactcattaatttctctcaatttgggtcccagctaaagaggtggggtgaagctggggacagctttcctgggtgagtttttcttttgaataatgtagtgcagtcaccctgtggcaaatgccaggacagctgcaggtgcccattagcaacgcctgccttctgggcaaggtgagggatgccataccttgagaccaagccggtgcccacctaagggctaaggcctcttgctggtgcacatgacatttgtcctgcagagctggggggaaggcgatgtggtgaccccacccccacccgttaatttaaagctgtttctaaacagttgagtttcttctaaagaggaagccttgcccagcaaggaccagtgagacagccggatcttggagacaattacaagacggggagtgagactcctgattgctctggaagcctgctgatttctacaactgatcatttgcagctgctggttttggtttccaccttaccctactggctgtaaaaacacaaatgtgtactttattgattttctttctaattctcccgcattggtggcttgggacttgggagagggagcaagccttcctccatggcccatcactcggctgtggagaacaaagaccaatgtgaagacactacagaggattctgtcttccaggcccagtccactggggagtgctggaatggggacctggggtggggaggcagagggtcactttacataggattaagttcgaggtggctaccgatttcagcacatgcactactgaaatttacacaaaaagaaagctgtgaaattgaagtcccaatttaagagtcctgaggcagaacctggtggctggaggcattcccagaggtggggaagagagcctgcccggccggagaacatctgccttgctgcacctgaggcccagcagagccgttcctgggactgtcagataatcggtgcagcggtggaaggagcctgcggctgctggcacagacttcacacagcacctcctctctgctgggtttccacacagcctgtcttcagatcctgctgccgcgtgcgaccagaggtgggaggcccctggtggcatggaagagggagggtcagtgccaagtctcaggaggagggcgcatgtgtgtatcaccctcagctggcggaacctggctgcgaactgtgcagttacgttgcatccacaggattccagttgcgtgtctgtttccttctctttctccgtatttatttttttattcttcggaggaggtggacatttcggaagtggtggggactaagggaagaactctctagttccctcagtgtgaagcctgtcgtgttctctccccttgcactggtcatcagtattgtgtaaaggaacaactgatatacttgagtgtgcaagcaaagaacccatttgccatgctgctatgaagactacttttagatcaacaataaaaaaaaacctacaaaaaaacctttattctttaattgttgcttttacggtgatattgtgcatgcaaaccaggagcattttgtgtcttaagaaaaataatcttagaacagatggctgtgaaaattacacccatgcacagaacaagccacaggaataatagttcaggatttggtttttctctttttcttgtaaacctggagggttgatatattctttccatgcagttattagaacttagttttgttccaacagttaaacttgcaatgaaaagaaaatgtgccatttttttcactcagaattattcatagctgtatatttgaaactgctaattacacacgtgtgatgtatgttggttttttagtgcaatttcttctgtagctattctttgaccaaactgtgggtattgttaatattaatttatatttgtctcattttgtatgtatgtgtagtgtgtttgtgagtatgtgtggtttataatctgacaaagtcatgaagctcagtttggctgtaatttaattccccttcccttatttttatttatttttgtactgtgctgattcaataaaatgcactgaccatccatta

SEQ ID NO: 444367 - DNA, 4264 bp, Homo sapiens
ttgggcggcggcgcggagcgggcggcgagctgtgcgggaggggcggccccgaggggcggggcgggccgacgccgcgtgtcccgccgcagccgcggagtccggctcctagatggggcccggcgcgtagaggtgcctcccgctcgttgccgcgtcctacccgcaccgtgcgcggctcgagctgaggacaccaacggccgcgactccccggcgagaccaggccggagcgtggacggcgcgcgcgccccgcgagggagggcgctgaggcgcgcgccggaagcgggagcgggagcgggagcgcggcggcggcggcgaaggtgcgggcggccgagcggggggcggggctgcggtgcctgcagaaccttggacagaagctccctagctgccgccgccgccgccgccgccgtcgccgccgccgagcgcgagcccagccgatccccgccgagcgcccccgagcgccgccgagcgccgggaccgcggcggcggggccgcggcgcgcattgcggagggcgcggagcgcaggagctgccgcctgccgggcagatccaagggggcagcacgcttcccgggagcgcccccgcctcctctccggggccgccgcaggctcggtgagcggttttatccctccggccggcaggctgggcgcgcaggggcgcgagcccccgcccggcgcgcagcagcaccatgggcacggtgctgtccctgtctcccagctaccggaaggccacgctgtttgaggatggcgcggccaccgtgggccactatacggccgtacagaacagcaagaacgccaaggacaagaacctgaagcgccactccatcatctccgtgctgccttggaagagaatcgtggccgtgtcggccaagaagaagaactccaagaaggtgcagcccaacagcagctaccagaacaacatcacgcacctcaacaatgagaacctgaagaagtcgctgtcgtgcgccaacctgtccacattcgcccagcccccaccggcccagccgcctgcacccccggccagccagctctcgggttcccagaccgggggctcctcctcagtcaagaaagcccctcaccctgccgtcacctccgcagggacgcccaaacgggtcatcgtccaggcgtccaccagtgagctgcttcgctgcctgggtgagtttctctgccgccggtgctaccgcctgaagcacctgtcccccacggaccccgtgctctggctgcgcagcgtggaccgctcgctgcttctgcagggctggcaggaccagggcttcatcacgccggccaacgtggtcttcctctacatgctctgcagggatgttatctcctccgaggtgggctcggatcacgagctccaggccgtcctgctgacatgcctgtacctctcctactcctacatgggcaacgagatctcctacccgctcaagcccttcctggtggagagctgcaaggaggccttttgggaccgttgcctctctgtcatcaacctcatgagctcaaagatgctgcagataaatgccgacccacactacttcacacaggtcttctccgacctgaagaacgagagcggccaggaggacaagaagcggctcctcctaggcctggatcggtgagcactgtagcctgcgtcatggctcaaggattcaatgcatttttaagaatttattattaaatcagttttgtgtacagtatgtgtctagcaaagccaccaagggcctcacctttcccacagtctctccctggggtttttttcatccctgccaagaactctgggcacttttgaactcacgagccttgcgcaaaacccagaagatgtattcagagccacccaggccactgacctcccactttggggaactcaaaggactgacctgcccctgccgcctgtgcccttgctgggtccagggtaggcaaggctgccggctgcaccctgtatggagctagagaggggcctctggctgcctggcccagggaggaattggggtttctggttggaggcccttttctggctcctgtgtggagttattcactctcccagaggctcctggagccagccaccctaactgagctgccagtggggtcgtgaggcaagatccccgccacccggggacatcttcaatctaggcgaggcgaagctgagcgggtctagtggaaagattgtgtctggtcgtttgaccacacaccgccctgatttgctgttttctttttttagggagaagggcttttctttagtggagaaatggaactcgcccccctacccccttgtctgctgctcccagccacgttggtggtattggccgatgagctggtttgactcattaatttctctcaatttgggtcccagctaaagaggtggggtgaagctggggacagctttcctgggtgagtttttcttttgaataatgtagtgcagtcaccctgtggcaaatgccaggacagctgcaggtgcccattagcaacgcctgccttctgggcaaggtgagggatgccataccttgagaccaagccggtgcccacctaagggctaaggcctcttgctggtgcacatgacatttgtcctgcagagctggggggaaggcgatgtggtgaccccacccccacccgttaatttaaagctgtttctaaacagttgagtttcttctaaagaggaagccttgcccagcaaggaccagtgagacagccggatcttggagacaattacaagacggggagtgagactcctgattgctctggaagcctgctgatttctacaactgatcatttgcagctgctggttttggtttccaccttaccctactggctgtaaaaacacaaatgtgtactttattgattttctttctaattctcccgcattggtggcttgggacttgggagagggagcaagccttcctccatggcccatcactcggctgtggagaacaaagaccaatgtgaagacactacagaggattctgtcttccaggcccagtccactggggagtgctggaatggggacctggggtggggaggcagagggtcactttacataggattaagttcgaggtggctaccgatttcagcacatgcactactgaaatttacacaaaaagaaagctgtgaaattgaagtcccaatttaagagtcctgaggcagaacctggtggctggaggcattcccagaggtggggaagagagcctgcccggccggagaacatctgccttgctgcacctgaggcccagcagagccgttcctgggactgtcagataatcggtgcagcggtggaaggagcctgcggctgctggcacagacttcacacagcacctcctctctgctgggtttccacacagcctgtcttcagatcctgctgccgcgtgcgaccagaggtgggaggcccctggtggcatggaagagggagggtcagtgccaagtctcaggaggagggcgcatgtgtgtatcaccctcagctggcggaacctggctgcgaactgtgcagttacgttgcatccacaggattccagttgcgtgtctgtttccttctctttctccgtatttatttttttattcttcggaggaggtggacatttcggaagtggtggggactaagggaagaactctctagttccctcagtgtgaagcctgtcgtgttctctccccttgcactggtcatcagtattgtgtaaaggaacaactgatatacttgagtgtgcaagcaaagaacccatttgccatgctgctatgaagactacttttagatcaacaataaaaaaaaacctacaaaaaaacctttattctttaattgttgcttttacggtgatattgtgcatgcaaaccaggagcattttgtgtcttaagaaaaataatcttagaacagatggctgtgtttttctctttttcttgtaaacctggagggttgatatattctttccatgcagttattagaacttagttttgttccaacagttaaacttgcaatgaaaagaaaatgtgccatttttttcactcagaattattcatagctgtatatttgaaactgctaattacacacgtgtgatgtatgttggttttttagtgcaatttcttctgtagctattctttgaccaaactgtgggtattgttaatattaatttatatttgtctcattttgtatgtatgtgtagtgtgtttgtgagtatgtgtggtttataatctgacaaagtcatgaagctcagtttggctgtaatttaattccccttcccttatttttatttatttttgtactgtgctgattcaataaaatgcactgaccatccatta

SEQ ID NO: 444368 - DNA, 1737 bp, Homo sapiens
ggaatataggcaataaggtagagacctggtgattaatcggacagaggactaaggtgcgctgcgagcgcgcgcggaccgcgcacaggcggcggagccggtatgggcccgcctggccctgggcgccgcgccgcacgagcaccagcctagagccaggactgaagcttcaagatggctgaccaggaccctgcgggcatcagccccctccagcaaatggtggcctcaggcaccggggctgtggttacctctctcttcatgacacccctggacgtggtgaaggttcgcctgcagtctcagcggccctccatggccagcgagctgatgccttcctccagactgtggagcctctcctataccaaatggaagtgcctcctgtattgcaatggtgtcctggagcctctgtacctgtgcccaaatggtgcccgctgtgccacctggtttcaagaccctacccgcttcactggcaccatggatgccttcgtgaagatcgtgaggcacgagggcaccaggaccctctggagcggcctccccgccaccctggtgatgactgtgccagctaccgccatctacttcactgcctatgaccaactgaaggccttcctgtgtggtcgagccctgacctctgacctctacgcacccatggtggctggcgcgctggcccgcctgggcaccgtgactgtgatcagccccctggagcttatgcggacaaagctgcaggctcagcatgtgtcgtaccgggagctgggtgcctgtgttcgaactgcagtggctcagggtggctggcgctcactgtggctgggctggggccccactgcccttcgagatgtgcccttctcagccctgtactggttcaactatgagctggtgaagagctggctcaatgggctcaggccgaaggaccagacttctgtgggcatgagctttgtggctggtggcatctcagggacggtggctgcagtgctgactctaccctttgacgtggtaaagacccaacgccaggtcgctctgggagcgatggaggctgtgagagtgaaccccctgcatgtggactccacctggctgctgctgcggaggatccgggccgagtcgggcaccaagggactctttgcaggcttccttcctcggatcatcaaggctgccccctcctgtgccatcatgatcagcacctatgagttcggcaaaagcttcttccagaggctgaaccaggaccggcttctgggcggctgaaaggggcaaggaggcaaggaccccgtctctcccacggatggggagagggcaggaggagacccagccaagtgccttttcctcagcactgagggagggggcttgtttcccttccctcccggcgacaagctccagggcagggctgtccctctgggcggcccagcacttcctcagacacaacttcttcctgctgctccagtcgtggggatcatcacttacccaccccccaagttcaagaccaaatcttccagctgcccccttcgtgtttccctgtgtttgctgtagctgggcatgtctccaggaaccaagaagccctcagcctggtgtagtctccctgacccttgttaattccttaagtctaaagatgatgaacttcaaaaaaaaaaaaaaaaaaaaaaaaaaaaaccggggggtttatgggcgggggggaaagggatgaagggctggcaaagggtccgagcccattttggtaccaggggaacgggggccccaaaggggggaaaccgaaacgggacg

SEQ ID NO: 444369 - DNA, 1960 bp, Homo sapiens
  misc_feature (1607)..(1608): n is a, c, g, or t
ggaatataggcaataaggtagagacctggtgattaatcggacagaggactaaggtgcgctgcgagcgcgcgcggaccgcgcacaggcggcggagccggtatgggcccgcctggccctgggcgccgcgccgcacgagcaccagcctagagccaggactgaagcttcaagatggctgaccaggaccctgcgggcatcagccccctccagcaaatggtggcctcaggcaccggggctgtggttacctctctcttcatgacacccctggacgtggtgaaggttcgcctgcagtctcagcggccctccatggccagcgagctgatgccttcctccagactgtggagcctctcctataccaaatggaagtgcctcctgtattgcaatggtgtcctggagcctctgtacctgtgcccaaatggtgcccgctgtgccacctggtttcaagaccctacccgcttcactggcaccatggatgccttcgtgaagatcgtgaggcacgagggcaccaggaccctctggagcggcctccccgccaccctggtgatgactgtgccagctaccgccatctacttcactgcctatgaccaactgaaggccttcctgtgtggtcgagccctgacctctgacctctacgcacccatggtggctggcgcgctggcccgcctgggcaccgtgactgtgatcagccccctggagcttatgcggacaaagctgcaggctcagcatgtgtcgtaccgggagctgggtgcctgtgttcgaactgcagtggctcagggtggctggcgctcactgtggctgggctggggccccactgcccttcgagatgtgcccttctcagccctgtactggttcaactatgagctggtgaagagctggctcaatgggctcaggccgaaggaccagacttctgtgggcatgagctttgtggctggtggcatctcagggacggtggctgcagtgctgactctaccctttgacgtggtaaagacccaacgccaggtcgctctgggagcgatggaggctgtgagagtgaaccccctgcatgtggactccacctggctgctgctgcggaggatccgggccgagtcgggcaccaagggactctttgcaggcttccttcctcggatcatcaaggctgccccctcctgtgccatcatgatcagcacctatgagttcggcaaaagcttcttccagaggctgaaccaggaccggcttctgggcggctgaaaggggcaaggaggcaaggaccccgtctctcccacggatggggagagggcaggaggagacccagccaagtgccttttcctcagcactgagggagggggcttgtttcccttccctcccggcgacaagctccagggcagggctgtccctctgggcggcccagcacttcctcagacacaacttcttcctgctgctccagtcgtggggatcatcacttacccaccccccaagttcaagaccaaatcttccagctgcccccttcgtgtttccctgtgtttgctgtagctgggcatgtctccaggaaccaagaagccctcagcctggtgtagtctccctgacccttgttaattccttaagtctaaagatgatgaacttcacacaacaannaaccaacacaacaaaacaaaaaagaacacaacaacgggggggacacaagaaggaataccagagggggagcaaaagaaaccgagacaccacggaaagaagaaaagagggagccaccaacagcagaaaaaaaacaaaagagaacgaccacagaaaaaaacacgccggacaacgagacaacagagccaaaagacacaacgaaaacaaggagaggcaaaaagggggccagcagaacacgacacccaaagaacagcagaccaccgcaaaagacagggcaccacgcgaacccaaccgaaggaaggagagaaaacaagcacaaagacacgcacagaaaataaccacggcgagaagcgct

SEQ ID NO: 444370 - DNA, 2869 bp, Homo sapiens
ggaatataggcaataaggtagagacctggtgattaatcggacagaggactaaggtgcgctgcgagcgcgcgcggaccgcgcacaggcggcggagccggtatgggcccgcctggccctgggcgccgcgccgcacgagcaccagcctagagccaggtaggcggcactgggccggggctgggggcggagacggaagcgggggtctccgggcggccgtgcgagccaggcaggtgctggggccgtcgagctggcgtggtccccctcacctggcggctctccgccgttcggggccgggagtgtcgccgagggtcggggagacgtcctggtcctacgttcctacttcccgctctcccggctgcgccccgggcctgcattttggggcgggaacccagagactgctctttctctccgggccccgggtctggcccgtccggccgggcggggagggccgggcatcccagcccgcagtcctgaggaggcgacgggcccttcttggtcaccggatctgtttacacgtcaccctcgatgcccggccgtccctccacgcccagtaacttgggctctcaggtgcctgcccggggccttggtgctggagtgggggctgtgggggcagcacaggtactctgattttggggccacgagggccaaatccgcgcctgcacgtaggaggtgcgcagtggacacgtgcgaggtggacgagggaaggaccctggctcctactgcattcgagcgataggtctggcaccctagcttccttcggaaccactcctgagtgaccttgggcaggccacctcgtctccccgagccttagttttccccggcggaggggggcggacagtccctgctttagaggtcattgccagggttgttgaggcaacagatgtttcgagggcggtggatgagggttgggttaaagtctcacagtgggccgggtgcggtggctcacgcctgtaatcccagtgctttgggaggctgaggcgggcggatcacgaggtcaggagatcgagatcatcttggccaacatggtgaaaccctgtctctactaaaaatgcaaaaattaactaggcgtggtggtgcgcgcctgtagtcccagctacttgggaggctgaagcaagagaaccgcttgaacgggggtggatgttgcagtgagccaagatggtgccactgcactccagcctggcaacagtgcgcagagcgagacgccgtctcaaaacaaaagtctcacagtggcccagcctcctttcctgccatccctggagttgtggtctgtttgaggtttggttttcaggactgaagcttcaagatggctgaccaggaccctgcgggcatcagccccctccagcaaatggtggcctcaggcaccggggctgtggttacctctctcttcatgacacccctggacgtggtgaaggttcgcctgcagtctcagcggccctccatggccagcgagctgatgccttcctccagactgtggagcctctcctataccaaatggaagtgcctcctgtattgcaatggtgtcctggagcctctgtacctgtgcccaaatggtgcccgctgtgccacctggtttcaagaccctacccgcttcactggcaccatggatgccttcgtgaagatcgtgaggcacgagggcaccaggaccctctggagcggcctccccgccaccctggtgatgactgtgccagctaccgccatctacttcactgcctatgaccaactgaaggccttcctgtgtggtcgagccctgacctctgacctctacgcacccatggtggctggcgcgctggcccgcctgggcaccgtgactgtgatcagccccctggagcttatgcggacaaagctgcaggctcagcatgtgtcgtaccgggagctgggtgcctgtgttcgaactgcagtggctcagggtggctggcgctcactgtggctgggctggggccccactgcccttcgagatgtgcccttctcagccctgtactggttcaactatgagctggtgaagagctggctcaatgggctcaggccgaaggaccagacttctgtgggcatgagctttgtggctggtggcatctcagggacggtggctgcagtgctgactctaccctttgacgtggtaaagacccaacgccaggtcgctctgggagcgatggaggctgtgagagtgaaccccctgcatgtggactccacctggctgctgctgcggaggatccgggccgagtcgggcaccaagggactctttgcaggcttccttcctcggatcatcaaggctgccccctcctgtgccatcatgatcagcacctatgagttcggcaaaagcttcttccagaggctgaaccaggaccggcttctgggcggctgaaaggggcaaggaggcaaggaccccgtctctcccacggatggggagagggcaggaggagacccagccaagtgccttttcctcagcactgagggagggggcttgtttcccttccctcccggcgacaagctccagggcagggctgtccctctgggcggcccagcacttcctcagacacaacttcttcctgctgctccagtcgtggggatcatcacttacccaccccccaagttcaagaccaaatcttccagctgcccccttcgtgtttccctgtgtttgctgtagctgggcatgtctccaggaaccaagaagccctcagcctggtgtagtctccctgacccttgttaattccttaagtctaaagatgatgaacttcaaaaaaaaaaaaaaaaaaaaaaaaaaaaaccggggggtttatgggcgggggggaaagggatgaagggctggcaaagggtccgagcccattttggtaccaggggaacgggggccccaaaggggggaaaccgaaacgggacg

SEQ ID NO: 444371 - DNA, 1850 bp, Homo sapiens
ggaatataggcaataaggtagagacctggtgattaatcggacagaggactaaggtgcgctgcgagcgcgcgcggaccgcgcacaggcggcggagccggtatgggcccgcctggccctgggcgccgcgccgcacgagcaccagcctagagccagcctggcaacagtgcgcagagcgagacgccgtctcaaaacaaaagtctcacagtggcccagcctcctttcctgccatccctggagttgtggtctgtttgaggtttggttttcaggactgaagcttcaagatggctgaccaggaccctgcgggcatcagccccctccagcaaatggtggcctcaggcaccggggctgtggttacctctctcttcatgacacccctggacgtggtgaaggttcgcctgcagtctcagcggccctccatggccagcgagctgatgccttcctccagactgtggagcctctcctataccaaatggaagtgcctcctgtattgcaatggtgtcctggagcctctgtacctgtgcccaaatggtgcccgctgtgccacctggtttcaagaccctacccgcttcactggcaccatggatgccttcgtgaagatcgtgaggcacgagggcaccaggaccctctggagcggcctccccgccaccctggtgatgactgtgccagctaccgccatctacttcactgcctatgaccaactgaaggccttcctgtgtggtcgagccctgacctctgacctctacgcacccatggtggctggcgcgctggcccgcctgggcaccgtgactgtgatcagccccctggagcttatgcggacaaagctgcaggctcagcatgtgtcgtaccgggagctgggtgcctgtgttcgaactgcagtggctcagggtggctggcgctcactgtggctgggctggggccccactgcccttcgagatgtgcccttctcagccctgtactggttcaactatgagctggtgaagagctggctcaatgggctcaggccgaaggaccagacttctgtgggcatgagctttgtggctggtggcatctcagggacggtggctgcagtgctgactctaccctttgacgtggtaaagacccaacgccaggtcgctctgggagcgatggaggctgtgagagtgaaccccctgcatgtggactccacctggctgctgctgcggaggatccgggccgagtcgggcaccaagggactctttgcaggcttccttcctcggatcatcaaggctgccccctcctgtgccatcatgatcagcacctatgagttcggcaaaagcttcttccagaggctgaaccaggaccggcttctgggcggctgaaaggggcaaggaggcaaggaccccgtctctcccacggatggggagagggcaggaggagacccagccaagtgccttttcctcagcactgagggagggggcttgtttcccttccctcccggcgacaagctccagggcagggctgtccctctgggcggcccagcacttcctcagacacaacttcttcctgctgctccagtcgtggggatcatcacttacccaccccccaagttcaagaccaaatcttccagctgcccccttcgtgtttccctgtgtttgctgtagctgggcatgtctccaggaaccaagaagccctcagcctggtgtagtctccctgacccttgttaattccttaagtctaaagatgatgaacttcaaaaaaaaaaaaaaaaaaaaaaaaaaaaaccggggggtttatgggcgggggggaaagggatgaagggctggcaaagggtccgagcccattttggtaccaggggaacgggggccccaaaggggggaaaccgaaacgggacg

SEQ ID NO: 444372 - DNA, 1632 bp, Homo sapiens
ggaatataggcaataaggtagagacctggtgattaatcggacagaggactaaggtgcgctgcgagcgcgcgcggaccgcgcacaggcggcggagccggtatgggcccgcctggccctgggcgccgcgccgcacgagcaccagcctagagccaggactgaagcttcaagatggctgaccaggaccctgcgggcatcagccccctccagcaaatggtggcctcaggcaccggggctgtggttacctctctcttcaggaagtgcctcctgtattgcaatggtgtcctggagcctctgtacctgtgcccaaatggtgcccgctgtgccacctggtttcaagaccctacccgcttcactggcaccatggatgccttcgtgaagatcgtgaggcacgagggcaccaggaccctctggagcggcctccccgccaccctggtgatgactgtgccagctaccgccatctacttcactgcctatgaccaactgaaggccttcctgtgtggtcgagccctgacctctgacctctacgcacccatggtggctggcgcgctggcccgcctgggcaccgtgactgtgatcagccccctggagcttatgcggacaaagctgcaggctcagcatgtgtcgtaccgggagctgggtgcctgtgttcgaactgcagtggctcagggtggctggcgctcactgtggctgggctggggccccactgcccttcgagatgtgcccttctcagccctgtactggttcaactatgagctggtgaagagctggctcaatgggctcaggccgaaggaccagacttctgtgggcatgagctttgtggctggtggcatctcagggacggtggctgcagtgctgactctaccctttgacgtggtaaagacccaacgccaggtcgctctgggagcgatggaggctgtgagagtgaaccccctgcatgtggactccacctggctgctgctgcggaggatccgggccgagtcgggcaccaagggactctttgcaggcttccttcctcggatcatcaaggctgccccctcctgtgccatcatgatcagcacctatgagttcggcaaaagcttcttccagaggctgaaccaggaccggcttctgggcggctgaaaggggcaaggaggcaaggaccccgtctctcccacggatggggagagggcaggaggagacccagccaagtgccttttcctcagcactgagggagggggcttgtttcccttccctcccggcgacaagctccagggcagggctgtccctctgggcggcccagcacttcctcagacacaacttcttcctgctgctccagtcgtggggatcatcacttacccaccccccaagttcaagaccaaatcttccagctgcccccttcgtgtttccctgtgtttgctgtagctgggcatgtctccaggaaccaagaagccctcagcctggtgtagtctccctgacccttgttaattccttaagtctaaagatgatgaacttcaaaaaaaaaaaaaaaaaaaaaaaaaaaaaccggggggtttatgggcgggggggaaagggatgaagggctggcaaagggtccgagcccattttggtaccaggggaacgggggccccaaaggggggaaaccgaaacgggacg

SEQ ID NO: 444373 - DNA, 1486 bp, Homo sapiens
ggaatataggcaataaggtagagacctggtgattaatcggacagaggactaaggtgcgctgcgagcgcgcgcggaccgcgcacaggcggcggagccggtatgggcccgcctggccctgggcgccgcgccgcacgagcaccagcctagagccaggactgaagcttcaagatggctgaccaggaccctgcgggcatcagccccctccagcaaatggtggcctcaggcaccggggctgtggttacctctctcttcatgacacccctggacgtggtgaaggttcgcctgcagtctcagcggccctccatggccagcgagctgatgccttcctccagactgtggagcctctcctataccaaatggaagtgcctcctgtattgcaatggtgtcctggagcctctgtacctgtgcccaaatggtgcccgctgtgccacctggtttcaagaccctacccgcttcactggcaccatggatgccttcgtgaagatcgtgaggcacgagggcaccaggaccctctggagcggcctccccgccaccctggtgatgactgtgccagctaccgccatctacttcactgcctatgaccaactgaaggccttcctgtgtggtcgagccctgacctctgacctctacgcacccatggtggctggcgcgctggcccgcctgggcaccgtgactgtgatcagccccctggagcttatgcggacaaagctgcaggctcagcatgtgtcgtaccgggagctgggtgcctgtgttcgaactgcagtggctcagggtggctggcgctcactgtggctgggctggggccccactgcccttcgagatgtgcccttctcagccctgtactggttcaactatgagctggtgaagagctggctcaatgggctcaggccgaaggaccagacttctgtgggcatgagctttgtggctggtggcatctcagggacggtggctgcagtgctgactctaccctttgacgtggtaaagacccaacgccaggtcgctctgggagcgatggaggctgtgagagtgaaccccctgcatgtggactccacctggctgctgctgcggaggatccgggccgagtcgggcaccaagggactctttgcaggcttccttcctcggatcatcaaggctgccccctcctgtgccatcatgatcagcacctatgagttcggcaaaagcttcttccagaggctgaaccaggaccggcttctgggcggctgaaaggggcaaggaggcaaggaccccgtctctcccacggatggggagagggcaggaggagacccagccaagtgccttttcctcagcactgagggagggggcttgtttggttcccttcctccgggaaagtccacgagggtggcctatgggggccgcattctcgcgaaatttcctgtgtccacgtggtcatacttacaccccagttaaaacatttcacgcccttgttcctgtgtgacgggtttccgcaccacccacggttcccgta

SEQ ID NO: 444374 - DNA, 1755 bp, Homo sapiens
ggaatataggcaataaggtagagacctggtgattaatcggacagaggactaaggtgcgctgcgagcgcgcgcggaccgcgcacaggcggcggagccggtatgggcccgcctggccctgggcgccgcgccgcacgagcaccagcctagagccaggactgaagcttcaagatggctgaccaggaccctgcgggcatcagccccctccagcaaatggtggcctcaggcaccggggctgtggttacctctctcttcatgacacccctggacgtggtgaaggttcgcctgcagtctcagcggccctccatggccagcgagctgatgccttcctccagactgtggagcctctcctataccaaatggaagtgcctcctgtattgcaatggtgtcctggagcctctgtacctgtgcccaaatggtgcccgctgtgccacctggtttcaagaccctacccgcttcactggcaccatggatgccttcgtgaagatcgtgaggcacgagggcaccaggaccctctggagcggcctccccgccaccctggtgatgactgtgccagctaccgccatctacttcactgcctatgaccaactgaaggccttcctgtgtggtcgagccctgacctctgacctctacgcacccatggtggctggcgcgctggcccgcctgggcaccgtgactgtgatcagccccctggagcttatgcggacaaagctgcaggctcagcatgtgtcgtaccgggagctgggtgcctgtgttcgaactgcagtggctcagggtggctggcgctcactgtggctgggctggggccccactgcccttcgagatgtgcccttctcagtgcatcccccaccccaagccctgtactggttcaactatgagctggtgaagagctggctcaatgggctcaggccgaaggaccagacttctgtgggcatgagctttgtggctggtggcatctcagggacggtggctgcagtgctgactctaccctttgacgtggtaaagacccaacgccaggtcgctctgggagcgatggaggctgtgagagtgaaccccctgcatgtggactccacctggctgctgctgcggaggatccgggccgagtcgggcaccaagggactctttgcaggcttccttcctcggatcatcaaggctgccccctcctgtgccatcatgatcagcacctatgagttcggcaaaagcttcttccagaggctgaaccaggaccggcttctgggcggctgaaaggggcaaggaggcaaggaccccgtctctcccacggatggggagagggcaggaggagacccagccaagtgccttttcctcagcactgagggagggggcttgtttcccttccctcccggcgacaagctccagggcagggctgtccctctgggcggcccagcacttcctcagacacaacttcttcctgctgctccagtcgtggggatcatcacttacccaccccccaagttcaagaccaaatcttccagctgcccccttcgtgtttccctgtgtttgctgtagctgggcatgtctccaggaaccaagaagccctcagcctggtgtagtctccctgacccttgttaattccttaagtctaaagatgatgaacttcaaaaaaaaaaaaaaaaaaaaaaaaaaaaaccggggggtttatgggcgggggggaaagggatgaagggctggcaaagggtccgagcccattttggtaccaggggaacgggggccccaaaggggggaaaccgaaacgggacg

SEQ ID NO: 444375 - DNA, 1669 bp, Homo sapiens
ggaatataggcaataaggtagagacctggtgattaatcggacagaggactaaggtgcgctgcgagcgcgcgcggaccgcgcacaggcggcggagccggtatgggcccgcctggccctgggcgccgcgccgcacgagcaccagcctagagccaggactgaagcttcaagatggctgaccaggaccctgcgggcatcagccccctccagcaaatggtggcctcaggcaccggggctgtggttacctctctcttcatgacacccctggacgtggtgaaggttcgcctgcagtctcagcggccctccatggccagcgagctgatgccttcctccagactgtggagcctctcctataccaaatggaagtgcctcctgtattgcaatggtgtcctggagcctctgtacctgtgcccaaatggtgcccgctgtgccacctggtttcaagaccctacccgcttcactggcaccatgggtgatgactgtgccagctaccgccatctacttcactgcctatgaccaactgaaggccttcctgtgtggtcgagccctgacctctgacctctacgcacccatggtggctggcgcgctggcccgcctgggcaccgtgactgtgatcagccccctggagcttatgcggacaaagctgcaggctcagcatgtgtcgtaccgggagctgggtgcctgtgttcgaactgcagtggctcagggtggctggcgctcactgtggctgggctggggccccactgcccttcgagatgtgcccttctcagccctgtactggttcaactatgagctggtgaagagctggctcaatgggctcaggccgaaggaccagacttctgtgggcatgagctttgtggctggtggcatctcagggacggtggctgcagtgctgactctaccctttgacgtggtaaagacccaacgccaggtcgctctgggagcgatggaggctgtgagagtgaaccccctgcatgtggactccacctggctgctgctgcggaggatccgggccgagtcgggcaccaagggactctttgcaggcttccttcctcggatcatcaaggctgccccctcctgtgccatcatgatcagcacctatgagttcggcaaaagcttcttccagaggctgaaccaggaccggcttctgggcggctgaaaggggcaaggaggcaaggaccccgtctctcccacggatggggagagggcaggaggagacccagccaagtgccttttcctcagcactgagggagggggcttgtttcccttccctcccggcgacaagctccagggcagggctgtccctctgggcggcccagcacttcctcagacacaacttcttcctgctgctccagtcgtggggatcatcacttacccaccccccaagttcaagaccaaatcttccagctgcccccttcgtgtttccctgtgtttgctgtagctgggcatgtctccaggaaccaagaagccctcagcctggtgtagtctccctgacccttgttaattccttaagtctaaagatgatgaacttcaaaaaaaaaaaaaaaaaaaaaaaaaaaaaccggggggtttatgggcgggggggaaagggatgaagggctggcaaagggtccgagcccattttggtaccaggggaacgggggccccaaaggggggaaaccgaaacgggacg

SEQ ID NO: 444376 - DNA, 1939 bp, Homo sapiens
ggaatataggcaataaggtagagacctggtgattaatcggacagaggactaaggtgcgctgcgagcgcgcgcggaccgcgcacaggcggcggagccggtatgggcccgcctggccctgggcgccgcgccgcacgagcaccagcctagagccaggactgaagcttcaagatggctgaccaggaccctgcgggcatcagccccctccagcaaatggtggcctcaggcaccggggctgtggttacctctctcttcatgacacccctggacgtggtgaaggttcgcctgcagtctcagcggccctccatggccagcgagctgatgccttcctccagactgtggagcctctcctataccaaatggaagtgcctcctgtattgcaatggtgtcctggagcctctgtacctgtgcccaaatggtgcccgctgtgccacctggtttcaagaccctacccgcttcactggcaccatggatgccttcgtgaagatcgtgaggcacgagggcaccaggaccctctggagcggcctccccgccaccctggtgatgactgtgccagctaccgccatctacttcactgcctatgaccaactgaaggccttcctgtgtggtcgagccctgacctctgacctctacgcacccatggtggctggcgcgctggcccgccgtgagcatagtcttgggcctttgacctccctctgtccccacctcggcccaaacccagtcagtcccagctcccagccccaacctctgccagcctagggataggggggtgttctaggtccccagacctgggacagcaggtaggtgatgccatgtaagacctgtgatctcacttctccccattgtcacccccaatccccacacagtgggcaccgtgactgtgatcagccccctggagcttatgcggacaaagctgcaggctcagcatgtgtcgtaccgggagctgggtgcctgtgttcgaactgcagtggctcagggtggctggcgctcactgtggctgggctggggccccactgcccttcgagatgtgcccttctcagccctgtactggttcaactatgagctggtgaagagctggctcaatgggctcaggccgaaggaccagacttctgtgggcatgagctttgtggctggtggcatctcagggacggtggctgcagtgctgactctaccctttgacgtggtaaagacccaacgccaggtcgctctgggagcgatggaggctgtgagagtgaaccccctgcatgtggactccacctggctgctgctgcggaggatccgggccgagtcgggcaccaagggactctttgcaggcttccttcctcggatcatcaaggctgccccctcctgtgccatcatgatcagcacctatgagttcggcaaaagcttcttccagaggctgaaccaggaccggcttctgggcggctgaaaggggcaaggaggcaaggaccccgtctctcccacggatggggagagggcaggaggagacccagccaagtgccttttcctcagcactgagggagggggcttgtttcccttccctcccggcgacaagctccagggcagggctgtccctctgggcggcccagcacttcctcagacacaacttcttcctgctgctccagtcgtggggatcatcacttacccaccccccaagttcaagaccaaatcttccagctgcccccttcgtgtttccctgtgtttgctgtagctgggcatgtctccaggaaccaagaagccctcagcctggtgtagtctccctgacccttgttaattccttaagtctaaagatgatgaacttcaaaaaaaaaaaaaaaaaaaaaaaaaaaaaccggggggtttatgggcgggggggaaagggatgaagggctggcaaagggtccgagcccattttggtaccaggggaacgggggccccaaaggggggaaaccgaaacgggacg

SEQ ID NO: 444377 - DNA, 2265 bp, Homo sapiens
ggaatataggcaataaggtagagacctggtgattaatcggacagaggactaaggtgcgctgcgagcgcgcgcggaccgcgcacaggcggcggagccggtatgggcccgcctggccctgggcgccgcgccgcacgagcaccagcctagagccaggactgaagcttcaagatggctgaccaggaccctgcgggcatcagccccctccagcaaatggtggcctcaggcaccggggctgtggttacctctctcttcatgacacccctggacgtggtgaaggttcgcctgcagtctcagcggccctccatggccagcgagctgatgccttcctccagactgtggagcctctcctataccaaatggaagtgcctcctgtattgcaatggtgtcctggagcctctgtacctgtgcccaaatggtgcccgctgtgccacctggtttcaagaccctacccgcttcactggcaccatggatgccttcgtgaagatcgtgaggcacgagggcaccaggaccctctggagcggcctccccgccaccctggtgatgactgtgccagctaccgccatctacttcactgcctatgaccaactgaaggccttcctgtgtggtcgagccctgacctctgacctctacgcacccatggtggctggcgcgctggcccgccgtgagcatagtcttgggcctttgacctccctctgtccccacctcggcccaaacccagtcagtcccagctcccagccccaacctctgccagcctagggataggggggtgttctaggtccccagacctgggacagcaggtaggtgatgccatgtaagacctgtgatctcacttctccccattgtcacccccaatccccacacagtgggcaccgtgactgtgatcagccccctggagcttatgcggacaaagctgcaggctcagcatgtgtcgtaccgggagctgggtgcctgtgttcgaactgcagtggctcagggtggctggcgctcactgtggctgggctggggccccactgcccttcgagatgtgcccttctcaggtaggcacccaagctgcagggggtgggtgagggaaccctggggtgatgcacaaagggtctacagccaagtcccagctttgtgactagtgaccatgaagttacttagcttttctgagccatgggtttctcatctgtgaagtgggcctagcaggtagagtatttgcccaggcggtcaggagattaattcctacagagtgcctgcttctgagcctgcatgtagcagacaagactcacagctgggagggagtggtggcagtgaaaggtggacggtctggggccacttccttgcccttcccgtctctaatcagtgcatcccccaccccaagccctgtactggttcaactatgagctggtgaagagctggctcaatgggctcaggccgaaggaccagacttctgtgggcatgagctttgtggctggtggcatctcagggacggtggctgcagtgctgactctaccctttgacgtggtaaagacccaacgccaggtcgctctgggagcgatggaggctgtgagagtgaaccccctgcatgtggactccacctggctgctgctgcggaggatccgggccgagtcgggcaccaagggactctttgcaggcttccttcctcggatcatcaaggctgccccctcctgtgccatcatgatcagcacctatgagttcggcaaaagcttcttccagaggctgaaccaggaccggcttctgggcggctgaaaggggcaaggaggcaaggaccccgtctctcccacggatggggagagggcaggaggagacccagccaagtgccttttcctcagcactgagggagggggcttgtttcccttccctcccggcgacaagctccagggcagggctgtccctctgggcggcccagcacttcctcagacacaacttcttcctgctgctccagtcgtggggatcatcacttacccaccccccaagttcaagaccaaatcttccagctgcccccttcgtgtttccctgtgtttgctgtagctgggcatgtctccaggaaccaagaagccctcagcctggtgtagtctccctgacccttgttaattccttaagtctaaagatgatgaacttcaaaaaaaaaaaaaaaaaaaaaaaaaaaaaccggggggtttatgggcgggggggaaagggatgaagggctggcaaagggtccgagcccattttggtaccaggggaacgggggccccaaaggggggaaaccgaaacgggacg

SEQ ID NO: 444378 - DNA, 1699 bp, Homo sapiens
ggaatataggcaataaggtagagacctggtgattaatcggacagaggactaaggtgcgctgcgagcgcgcgcggaccgcgcacaggcggcggagccggtatgggcccgcctggccctgggcgccgcgccgcacgagcaccagcctagagccaggactgaagcttcaagatggctgaccaggaccctgcgggcatcagccccctccagcaaatggtggcctcaggcaccggggctgtggttacctctctcttcatgacacccctggacgtggtgaaggttcgcctgcagtctcagcggccctccatggccagcgagctgatgccttcctccagactgtggagcctctcctataccaaatggaagtgcctcctgtattgcaatggtgtcctggagcctctgtacctgtgcccaaatggtgcccgctgtgccacctggtttcaagaccctacccgcttcactggcaccatggatgccttcgtgaagatcgtgaggcacgagggcaccaggaccctctggagcggcctccccgccaccctggtgatgactgtgccagctaccgccatctacttcactgcctatgaccaactgaaggccttcctgtgtggtcgagccctgacctctgacctctacgcacccatggtggctggcgcgctggcccgccgtgagcatagtcttgggcctttgacctccctctgtccccacctcggcccaaacccagtcagtcccagctcccagccccaacctctgccagcctagggataggggggtgttctaggtccccagacctgggacagcagccctgtactggttcaactatgagctggtgaagagctggctcaatgggctcaggccgaaggaccagacttctgtgggcatgagctttgtggctggtggcatctcagggacggtggctgcagtgctgactctaccctttgacgtggtaaagacccaacgccaggtcgctctgggagcgatggaggctgtgagagtgaaccccctgcatgtggactccacctggctgctgctgcggaggatccgggccgagtcgggcaccaagggactctttgcaggcttccttcctcggatcatcaaggctgccccctcctgtgccatcatgatcagcacctatgagttcggcaaaagcttcttccagaggctgaaccaggaccggcttctgggcggctgaaaggggcaaggaggcaaggaccccgtctctcccacggatggggagagggcaggaggagacccagccaagtgccttttcctcagcactgagggagggggcttgtttcccttccctcccggcgacaagctccagggcagggctgtccctctgggcggcccagcacttcctcagacacaacttcttcctgctgctccagtcgtggggatcatcacttacccaccccccaagttcaagaccaaatcttccagctgcccccttcgtgtttccctgtgtttgctgtagctgggcatgtctccaggaaccaagaagccctcagcctggtgtagtctccctgacccttgttaattccttaagtctaaagatgatgaacttcaaaaaaaaaaaaaaaaaaaaaaaaaaaaaccggggggtttatgggcgggggggaaagggatgaagggctggcaaagggtccgagcccattttggtaccaggggaacgggggccccaaaggggggaaaccgaaacgggacg

SEQ ID NO: 444379 - DNA, 1497 bp, Homo sapiens
ggaatataggcaataaggtagagacctggtgattaatcggacagaggactaaggtgcgctgcgagcgcgcgcggaccgcgcacaggcggcggagccggtatgggcccgcctggccctgggcgccgcgccgcacgagcaccagcctagagccaggactgaagcttcaagatggctgaccaggaccctgcgggcatcagccccctccagcaaatggtggcctcaggcaccggggctgtggttacctctctcttcatgacacccctggacgtggtgaaggttcgcctgcagtctcagcggccctccatggccagcgagctgatgccttcctccagactgtggagcctctcctataccaaatggaagtgcctcctgtattgcaatggtgtcctggagcctctgtacctgtgcccaaatggtgcccgctgtgccacctggtttcaagaccctacccgcttcactggcaccatggatgccttcgtgaagatcgtgaggcacgagggcaccaggaccctctggagcggcctccccgccaccctggtgatgactgtgccagctaccgccatctacttcactgcctatgaccaactgaaggccttcctgtgtggtcgagccctgacctctgacctctacgcacccatggtggctggcgcgctggcccgcctgggcaccgtgactgtgatcagccccctggagcttatgcggacagtggctgcagtgctgactctaccctttgacgtggtaaagacccaacgccaggtcgctctgggagcgatggaggctgtgagagtgaaccccctgcatgtggactccacctggctgctgctgcggaggatccgggccgagtcgggcaccaagggactctttgcaggcttccttcctcggatcatcaaggctgccccctcctgtgccatcatgatcagcacctatgagttcggcaaaagcttcttccagaggctgaaccaggaccggcttctgggcggctgaaaggggcaaggaggcaaggaccccgtctctcccacggatggggagagggcaggaggagacccagccaagtgccttttcctcagcactgagggagggggcttgtttcccttccctcccggcgacaagctccagggcagggctgtccctctgggcggcccagcacttcctcagacacaacttcttcctgctgctccagtcgtggggatcatcacttacccaccccccaagttcaagaccaaatcttccagctgcccccttcgtgtttccctgtgtttgctgtagctgggcatgtctccaggaaccaagaagccctcagcctggtgtagtctccctgacccttgttaattccttaagtctaaagatgatgaacttcaaaaaaaaaaaaaaaaaaaaaaaaaaaaaccggggggtttatgggcgggggggaaagggatgaagggctggcaaagggtccgagcccattttggtaccaggggaacgggggccccaaaggggggaaaccgaaacgggacg

SEQ ID NO: 444380 - DNA, 1521 bp, Homo sapiens
ggaatataggcaataaggtagagacctggtgattaatcggacagaggactaaggtgcgctgcgagcgcgcgcggaccgcgcacaggcggcggagccggtatgggcccgcctggccctgggcgccgcgccgcacgagcaccagcctagagccaggactgaagcttcaagatggctgaccaggaccctgcgggcatcagccccctccagcaaatggtggcctcaggcaccggggctgtggttacctctctcttcatgacacccctggacgtggtgaaggttcgcctgcagtctcagcggccctccatggccagcgagctgatgccttcctccagactgtggagcctctcctataccaaattgccctcctctctccaatccacagggaagtgcctcctgtattgcaatggtgtcctggagcctctgtacctgtgcccaaatggtgcccgctgtgccacctggtttcaagaccctacccgcttcactggcaccatggatgccttcgtgaagatcgtgaggcacgagggcaccaggaccctctggagcggcctccccgccaccctggtgatgactgtgccagctaccgccatctacttcactgcctatgaccaactgaaggccttcctgtgtggtcgagccctgacctctgacctctacgcacccatggtggctggcgcgctggcccgcctgggcaccgtgactgtgatcagccccctggagcttatgcggacagtggctgcagtgctgactctaccctttgacgtggtaaagacccaacgccaggtcgctctgggagcgatggaggctgtgagagtgaaccccctgcatgtggactccacctggctgctgctgcggaggatccgggccgagtcgggcaccaagggactctttgcaggcttccttcctcggatcatcaaggctgccccctcctgtgccatcatgatcagcacctatgagttcggcaaaagcttcttccagaggctgaaccaggaccggcttctgggcggctgaaaggggcaaggaggcaaggaccccgtctctcccacggatggggagagggcaggaggagacccagccaagtgccttttcctcagcactgagggagggggcttgtttcccttccctcccggcgacaagctccagggcagggctgtccctctgggcggcccagcacttcctcagacacaacttcttcctgctgctccagtcgtggggatcatcacttacccaccccccaagttcaagaccaaatcttccagctgcccccttcgtgtttccctgtgtttgctgtagctgggcatgtctccaggaaccaagaagccctcagcctggtgtagtctccctgacccttgttaattccttaagtctaaagatgatgaacttcaaaaaaaaaaaaaaaaaaaaaaaaaaaaaccggggggtttatgggcgggggggaaagggatgaagggctggcaaagggtccgagcccattttggtaccaggggaacgggggccccaaaggggggaaaccgaaacgggacg

SEQ ID NO: 444381 - DNA, 432 bp, Homo sapiens
  misc_feature (304)..(304): n is a, c, g, or t
ggaatataggcaataaggtagagacctggtgattaatcggacagaggactaaggtgcgctgcgagcgcgcgcggaccgcgcacaggcggcggagccggtatgggcccgcctggccctgggcgccgcgccgcacgagcaccagcctagagccaggactgaagcttcaagatggctgaccaggaccctgcgggcatcagccccctccagcaaatggtggcctcaggcaccggggctgtggttacctctctcttcatgacacccctggacgtggtgatgagtcgactcttagcgtcactggtgctancattccaagataactgatgcctttcttcaggattgtggtagcactctgctagtctctaactgtaaaagtggtctcaatagggcttgaaaaagcagtttcatggatgatctttttgagacctagaaccc

SEQ ID NO: 444382 - DNA, 1867 bp, Homo sapiens
ggaatataggcaataaggtagagacctggtgattaatcggacagaggactaaggtgcgctgcgagcgcgcgcggaccgcgcacaggcggcggagccggtatgggcccgcctggccctgggcgccgcgccgcacgagcaccagcctagagccaggactgaagcttcaagatggctgaccaggaccctgcgggcatcagccccctccagcaaatggtggcctcaggcaccggggctgtggttacctctctcttcatgacacccctggacgtggtgaaggttcgcctgcagtctcagcggccctccatggccagcgagctgatgccttcctccagactgtggagcctctcctataccaaatggaagtgcctcctgtattgcaatggtgtcctggagcctctgtacctgtgcccaaatggtgcccgctgtgccacctggtttcaagaccctacccgcttcactggcaccatggatgccttcgtgaagatcgtgaggcacgagggcaccaggaccctctggagcggcctccccgccaccctggtgatgactgtgccagctaccgccatctacttcactgcctatgaccaactgaaggccttcctgtgtggtcgagccctgacctctgacctctacgcacccatggtggctggcgcgctggcccgcctgggcaccgtgactgtgatcagccccctggagcttatgcggacaaagctgcaggctcagcatgtgtcgtaccgggagctgggtgcctgtgttcgaactgcagtggctcagggtggctggcgctcactgtggctgggctggggccccactgcccttcgagatgtgcccttctcagccctgtactggttcaactatgagctggtgaagagctggctcaatgggctcaggccgaaggaccagacttctgtgggcatgagctttgtggctggtggcatctcagggacggtggctgcagtgctgactctaccctttgacgtggtaaagacccaacgccaggtcgctctgggagcgatggaggctgtgagagtgaaccccctgcatgtggactccacctggctgctgctgcggaggatccgggccgagtcgggcaccaagggactctttgcaggcttccttcctcggatcatcaaggctgccccctcctgtgccatcatgatcagcacctatgagttcggcaaaagcttcttccagaggctgaaccaggaccggcttctgggcggctgaaaggggcaaggaggcaaggaccccgtctctcccacggatggggagagggcaggaggagacccagccaagtgccttttcctcagcactgagggagggggcttgtttcccttccctcccggcgacaagctccagggcagggctgtccctctgggcggcccagcacttcctcagacacaacttcttcctgctgctccagtcgtggggatcatcacttacccaccccccaagttcaagaccaaatcttccagctgcccccttcgtgtttccctgtgtttgctgtagctgggcatgtctccaggaaccaagaagccctcagcctggtgtagtctccctgacccttgttaattccttaagtctaaagatgatgaacttcaaaaaaaaaaaaaaaaaaaaaaaaaaaaaaaaaaaaaaaaaaaaaaaagaagaagaaaaaagaaagaaaaccacgaaaaaaggaacacaagagaaaaacaaagaaacacaaaacataaatatgcagcagacaacgaaggccccacgaaacaaagaagacaagcaccatataagagggcgaggaccgccgggcgcccacctctacaccaccacacgcgccggaagtgccggaaagccggcacccccgagagtttgggggcaggaccctgtt

SEQ ID NO: 444383 - DNA, 1761 bp, Homo sapiens
ggaatataggcaataaggtagagacctggtgattaatcggacagaggactaaggtgcgctgcgagcgcgcgcggaccgcgcacaggcggcggagccggtatgggcccgcctggccctgggcgccgcgccgcacgagcaccagcctagagccaggactgaagcttcaagatggctgaccaggaccctgcgggcatcagccccctccagcaaatggtggcctcaggcaccggggctgtggttacctctctcttcatgacacccctggacgtggtgaaggttcgcctgcagtctcagcggccctccatggccagcgagctgatgccttcctccagactgtggagcctctcctataccaaattgccctcctctctccaatccacagggaagtgcctcctgtattgcaatggtgtcctggagcctctgtacctgtgcccaaatggtgcccgctgtgccacctggtttcaagaccctacccgcttcactggcaccatggatgccttcgtgaagatcgtgaggcacgagggcaccaggaccctctggagcggcctccccgccaccctggtgatgactgtgccagctaccgccatctacttcactgcctatgaccaactgaaggccttcctgtgtggtcgagccctgacctctgacctctacgcacccatggtggctggcgcgctggcccgcctgggcaccgtgactgtgatcagccccctggagcttatgcggacaaagctgcaggctcagcatgtgtcgtaccgggagctgggtgcctgtgttcgaactgcagtggctcagggtggctggcgctcactgtggctgggctggggccccactgcccttcgagatgtgcccttctcagccctgtactggttcaactatgagctggtgaagagctggctcaatgggctcaggccgaaggaccagacttctgtgggcatgagctttgtggctggtggcatctcagggacggtggctgcagtgctgactctaccctttgacgtggtaaagacccaacgccaggtcgctctgggagcgatggaggctgtgagagtgaaccccctgcatgtggactccacctggctgctgctgcggaggatccgggccgagtcgggcaccaagggactctttgcaggcttccttcctcggatcatcaaggctgccccctcctgtgccatcatgatcagcacctatgagttcggcaaaagcttcttccagaggctgaaccaggaccggcttctgggcggctgaaaggggcaaggaggcaaggaccccgtctctcccacggatggggagagggcaggaggagacccagccaagtgccttttcctcagcactgagggagggggcttgtttcccttccctcccggcgacaagctccagggcagggctgtccctctgggcggcccagcacttcctcagacacaacttcttcctgctgctccagtcgtggggatcatcacttacccaccccccaagttcaagaccaaatcttccagctgcccccttcgtgtttccctgtgtttgctgtagctgggcatgtctccaggaaccaagaagccctcagcctggtgtagtctccctgacccttgttaattccttaagtctaaagatgatgaacttcaaaaaaaaaaaaaaaaaaaaaaaaaaaaaccggggggtttatgggcgggggggaaagggatgaagggctggcaaagggtccgagcccattttggtaccaggggaacgggggccccaaaggggggaaaccgaaacgggacg

SEQ ID NO: 444384 - DNA, 2218 bp, Homo sapiens
ggaatataggcaataaggtagagacctggtgattaatcggacagaggactaaggtgcgctgcgagcgcgcgcggaccgcgcacaggcggcggagccggtatgggcccgcctggccctgggcgccgcgccgcacgagcaccagcctagagccaggtaggcggcactgggccggggctgggggcggagacggaagcgggggtctccgggcggccgtgcgagccaggcaggtgctggggccgtcgagctggcgtggtccccctcacctggcggctctccgccgttcggggccgggagtgtcgccgagggtcggggagacgtcctggtcctacgttcctacttcccgctctcccggctgcgccccgggcctgcattttggggcgggaacccagagactgctctttctctccgggccccgggtctggcccgtccggccgggcggggagggccgggcatcccagcccgcagtcctgaggaggcgacgggcccttcttggtcaccggatctgtttacacgtcaccctcgatgcccggccgtccctccacgcccagtaacttgggctctcaggaggtgcgcagtggacacgtgcgaggtggacgagggaaggaccctggctcctactgcattcgagcgataggactgaagcttcaagatggctgaccaggaccctgcgggcatcagccccctccagcaaatggtggcctcaggcaccggggctgtggttacctctctcttcatgacacccctggacgtggtgaaggttcgcctgcagtctcagcggccctccatggccagcgagctgatgccttcctccagactgtggagcctctcctataccaaatggaagtgcctcctgtattgcaatggtgtcctggagcctctgtacctgtgcccaaatggtgcccgctgtgccacctggtttcaagaccctacccgcttcactggcaccatggatgccttcgtgaagatcgtgaggcacgagggcaccaggaccctctggagcggcctccccgccaccctggtgatgactgtgccagctaccgccatctacttcactgcctatgaccaactgaaggccttcctgtgtggtcgagccctgacctctgacctctacgcacccatggtggctggcgcgctggcccgcctgggcaccgtgactgtgatcagccccctggagcttatgcggacaaagctgcaggctcagcatgtgtcgtaccgggagctgggtgcctgtgttcgaactgcagtggctcagggtggctggcgctcactgtggctgggctggggccccactgcccttcgagatgtgcccttctcagccctgtactggttcaactatgagctggtgaagagctggctcaatgggctcaggccgaaggaccagacttctgtgggcatgagctttgtggctggtggcatctcagggacggtggctgcagtgctgactctaccctttgacgtggtaaagacccaacgccaggtcgctctgggagcgatggaggctgtgagagtgaaccccctgcatgtggactccacctggctgctgctgcggaggatccgggccgagtcgggcaccaagggactctttgcaggcttccttcctcggatcatcaaggctgccccctcctgtgccatcatgatcagcacctatgagttcggcaaaagcttcttccagaggctgaaccaggaccggcttctgggcggctgaaaggggcaaggaggcaaggaccccgtctctcccacggatggggagagggcaggaggagacccagccaagtgccttttcctcagcactgagggagggggcttgtttcccttccctcccggcgacaagctccagggcagggctgtccctctgggcggcccagcacttcctcagacacaacttcttcctgctgctccagtcgtggggatcatcacttacccaccccccaagttcaagaccaaatcttccagctgcccccttcgtgtttccctgtgtttgctgtagctgggcatgtctccaggaaccaagaagccctcagcctggtgtagtctccctgacccttgttaattccttaagtctaaagatgatgaacttcaaaaaaaaaaaaaaaaaaaaaaaaaaaaaccggggggtttatgggcgggggggaaagggatgaagggctggcaaagggtccgagcccattttggtaccaggggaacgggggccccaaaggggggaaaccgaaacgggacg

SEQ ID NO: 444385 - DNA, 1434 bp, Homo sapiens
ggaatataggcaataaggtagagacctggtgattaatcggacagaggactaaggtgcgctgcgagcgcgcgcggaccgcgcacaggcggcggagccggtatgggcccgcctggccctgggcgccgcgccgcacgagcaccagcctagagccaggactgaagcttcaagatggctgaccaggaccctgcgggcatcagccccctccagcaaatggtggcctcaggcaccggggctgtggttacctctctcttcatgacacccctggacgtggtgaaggttcgcctgcagtctcagcggccctccatggccagcgagctgatgccttcctccagactgtggagcctctcctataccaaatggaagtgcctcctgtattgcaatggtgtcctggagcctctgtacctgtgcccaaatggtgcccgctgtgccacctggtttcaagaccctacccgcttcactggcaccatggatgccttcgtgaagatcgtgaggcacgagggcaccaggaccctctggagcggcctccccgccaccctggtgatgactgtgccagctaccgccatctacttcactgcctatgaccaactgaaggccttcctgtgtggtcgagccctgacctctgacctctacgcacccatggtggctggcgcgctggcccgcctgggcaccgtgactgtgatcagccccctggagcttatgcggacaaagctgcaggctcagcatgtgtcgtaccgggagctgggtgcctgtgttcgaactgcagtggctcagggtggctggcgctcactgtggctgggctggggccccactgcccttcgagatgtgcccttctcagccctgtactggttcaactatgagctggtgaagagctggctcaatgggctcaggccgaaggaccagacttctgtgggcatgagctttgtggctggtggcatctcagggacggtggctgcagtgctgactctaccctttgacgtggtaaagacccaacgccaggtcgctctgggagcgatggaggctgtgagagtgaaccccctgcatgtggactccacctggctgctgctgcggaggatccgggccgagtcgggcaccaagggactctttgcaggcttccttcctcggatcatcaaggctgccccctcctgtgccatcatgatcagcacctatgagttcggcaaaagcttcttccagaggctgaaccaggaccggcttctgggcggctgaaaggggcaaggaggcaaggaccccgtctctcccacggatggggagagggcaggaggagacccagccaagtgccttttcctcagcactgagggagggggcttgtttcccttccctcccggcgacaagctccagggcagggctgtccctctgggcacgtcctgatgaacttggtccacggggttccactggccatgctggctagaaaggatc

SEQ ID NO: 444386 - DNA, 1804 bp, Homo sapiens
ggaatataggcaataaggtagagacctggtgattaatcggacagaggactaaggtgcgctgcgagcgcgcgcggaccgcgcacaggcggcggagccggtatgggcccgcctggccctgggcgccgcgccgcacgagcaccagcctagagccaggactgaagcttcaagatggctgaccaggaccctgcgggcatcagccccctccagcaaatggtggcctcaggcaccggggctgtggttacctctctcttcatgacacccctggacgtggtgaaggttcgcctgcagtctcagcggccctccatggccagcgagctgatgccttcctccagactgtggagcctctcctataccaaatggaagtgcctcctgtattgcaatggtgtcctggagcctctgtacctgtgcccaaatggtgcccgctgtgccacctggtttcaagaccctacccgcttcactggcaccatggatgccttcgtgaagatcgtgaggcacgagggcaccaggaccctctggagcggcctccccgccaccctggtgatgactgtgccagctaccgccatctacttcactgcctatgaccaactgaaggccttcctgtgtggtcgagccctgacctctgacctctacgcacccatggtggctggcgcgctggcccgcctgggcaccgtgactgtgatcagccccctggagcttatgcggacaaagctgcaggctcagcatgtgtcgtaccgggagctgggtgcctgtgttcgaactgcagtggctcagggtggctggcgctcactgtggctgggctggggccccactgcccttcgagatgtgcccttctcagccctgtactggttcaactatgagctggtgaagagctggctcaatgggctcaggccgaaggaccagacttctgtgggcatgagctttgtggctggtggcatctcagggacggtggctgcagtgctgactctaccctttgacgtggtaaagacccaacgccaggtcgctctgggagcgatggaggctgtgagagtgaaccccctgcatgtggactccacctggctgctgctgcggaggatccgggccgagtcgggcaccaagggactctttgcaggcttccttcctcggatcatcaaggctgccccctcctgtgccatcatgatcagcacctatgagttcggcaaaagccccgtctctcccacggatggggagagggcaggaggagacccagccaagtgccttttcctcagcactgagggagggggcttgtttcccttccctcccggcgacaagctccagggcagggctgtccctctgggcggcccagcacttcctcagacacaacttcttcctgctgctccagtcgtggggatcatcacttacccaccccccaagttcaagaccaaatcttccagctgcccccttcgtgtttccctgtgtttgctgtagctgggcatgtctccaggaaccaagaagccctcagcctggtgtagtctccctgacccttgttaattccttaagtctaaagatgatgaacttcaaaaaaaaaaaaaaaaaaaaaaaaaaaaaaaaaaaaaaaaaaaaaaaagaagaagaaaaaagaaagaaaaccacgaaaaaaggaacacaagagaaaaacaaagaaacacaaaacataaatatgcagcagacaacgaaggccccacgaaacaaagaagacaagcaccatataagagggcgaggaccgccgggcgcccacctctacaccaccacacgcgccggaagtgccggaaagccggcacccccgagagtttgggggcaggaccctgtt

SEQ ID NO: 444387 - DNA, 2063 bp, Homo sapiens
ggaatataggcaataaggtagagacctggtgattaatcggacagaggactaaggtgcgctgcgagcgcgcgcggaccgcgcacaggcggcggagccggtatgggcccgcctggccctgggcgccgcgccgcacgagcaccagcctagagccaggactgaagcttcaagatggctgaccaggaccctgcgggcatcagccccctccagcaaatggtggcctcaggcaccggggctgtggttacctctctcttcatgacacccctggacgtggtgaaggttcgcctgcagtctcagcggccctccatggccagcgagctgatgccttcctccagactgtggagcctctcctataccaaatggaagtgcctcctgtattgcaatggtgtcctggagcctctgtacctgtgcccaaatggtgcccgctgtgccacctggtttcaagaccctacccgcttcactggcaccatggatgccttcgtgaagatcgtgaggcacgagggcaccaggaccctctggagcggcctccccgccaccctggtgatgactgtgccagctaccgccatctacttcactgcctatgaccaactgaaggccttcctgtgtggtcgagccctgacctctgacctctacgcacccatggtggctggcgcgctggcccgcctgggcaccgtgactgtgatcagccccctggagcttatgcggacaaagctgcaggctcagcatgtgtcgtaccgggagctgggtgcctgtgttcgaactgcagtggctcagggtggctggcgctcactgtggctgggctggggccccactgcccttcgagatgtgcccttctcaggtaggcacccaagctgcagggggtgggtgagggaaccctggggtgatgcacaaagggtctacagccaagtcccagctttgtgactagtgaccatgaagttacttagcttttctgagccatgggtttctcatctgtgaagtgggcctagcaggtagagtatttgcccaggcggtcaggagattaattcctacagagtgcctgcttctgagcctgcatgtagcagacaagactcacagctgggagggagtggtggcagtgaaaggtggacggtctggggccacttccttgcccttcccgtctctaatcagtgcatcccccaccccaagccctgtactggttcaactatgagctggtgaagagctggctcaatgggctcaggccgaaggaccagacttctgtgggcatgagctttgtggctggtggcatctcagggacggtggctgcagtgctgactctaccctttgacgtggtaaagacccaacgccaggtcgctctgggagcgatggaggctgtgagagtgaaccccctgcatgtggactccacctggctgctgctgcggaggatccgggccgagtcgggcaccaagggactctttgcaggcttccttcctcggatcatcaaggctgccccctcctgtgccatcatgatcagcacctatgagttcggcaaaagcttcttccagaggctgaaccaggaccggcttctgggcggctgaaaggggcaaggaggcaaggaccccgtctctcccacggatggggagagggcaggaggagacccagccaagtgccttttcctcagcactgagggagggggcttgtttcccttccctcccggcgacaagctccagggcagggctgtccctctgggcggcccagcacttcctcagacacaacttcttcctgctgctccagtcgtggggatcatcacttacccaccccccaagttcaagaccaaatcttccagctgcccccttcgtgtttccctgtgtttgctgtagctgggcatgtctccaggaaccaagaagccctcagcctggtgtagtctccctgacccttgttaattccttaagtctaaagatgatgaacttcaaaaaaaaaaaaaaaaaaaaaaaaaaaaaccggggggtttatgggcgggggggaaagggatgaagggctggcaaagggtccgagcccattttggtaccaggggaacgggggccccaaaggggggaaaccgaaacgggacg

SEQ ID NO: 444388 - DNA, 1707 bp, Homo sapiens
ggaatataggcaataaggtagagacctggtgattaatcggacagaggactaaggtgcgctgcgagcgcgcgcggaccgcgcacaggcggcggagccggtatgggcccgcctggccctgggcgccgcgccgcacgagcaccagcctagagccaggactgaagcttcaagatggctgaccaggaccctgcgggcatcagccccctccagcaaatggtggcctcaggcaccggggctgtggttacctctctcttcatgacacccctggacgtggtgaaggttcgcctgcagtctcagcggccctccatggccagcgagctgatgccttcctccagactgtggagcctctcctataccaaatggaagtgcctcctgtattgcaatggtgtcctggagcctctgtacctgtgcccaaatggtgcccgctgtgccacctggtttcaagaccctacccgcttcactggcaccatggatgccttcgtgaagatcgtgaggcacgagggcaccaggaccctctggagcggcctccccgccaccctggtgatgactgtgccagctaccgccatctacttcactgcctatgaccaactgaaggccttcctgtgtggtcgagccctgacctctgacctctacgtgggcaccgtgactgtgatcagccccctggagcttatgcggacaaagctgcaggctcagcatgtgtcgtaccgggagctgggtgcctgtgttcgaactgcagtggctcagggtggctggcgctcactgtggctgggctggggccccactgcccttcgagatgtgcccttctcagccctgtactggttcaactatgagctggtgaagagctggctcaatgggctcaggccgaaggaccagacttctgtgggcatgagctttgtggctggtggcatctcagggacggtggctgcagtgctgactctaccctttgacgtggtaaagacccaacgccaggtcgctctgggagcgatggaggctgtgagagtgaaccccctgcatgtggactccacctggctgctgctgcggaggatccgggccgagtcgggcaccaagggactctttgcaggcttccttcctcggatcatcaaggctgccccctcctgtgccatcatgatcagcacctatgagttcggcaaaagcttcttccagaggctgaaccaggaccggcttctgggcggctgaaaggggcaaggaggcaaggaccccgtctctcccacggatggggagagggcaggaggagacccagccaagtgccttttcctcagcactgagggagggggcttgtttcccttccctcccggcgacaagctccagggcagggctgtccctctgggcggcccagcacttcctcagacacaacttcttcctgctgctccagtcgtggggatcatcacttacccaccccccaagttcaagaccaaatcttccagctgcccccttcgtgtttccctgtgtttgctgtagctgggcatgtctccaggaaccaagaagccctcagcctggtgtagtctccctgacccttgttaattccttaagtctaaagatgatgaacttcaaaaaaaaaaaaaaaaaaaaaaaaaaaaaccggggggtttatgggcgggggggaaagggatgaagggctggcaaagggtccgagcccattttggtaccaggggaacgggggccccaaaggggggaaaccgaaacgggacg

SEQ ID NO: 444389 - DNA, 1521 bp, Homo sapiens
ggaatataggcaataaggtagagacctggtgattaatcggacagaggactaaggtgcgctgcgagcgcgcgcggaccgcgcacaggcggcggagccggtatgggcccgcctggccctgggcgccgcgccgcacgagcaccagcctagagccaggactgaagcttcaagatggctgaccaggaccctgcgggcatcagccccctccagcaaatggtggcctcaggcaccggggctgtggttacctctctcttcatgacacccctggacgtggtgaaggttcgcctgcagtctcagcggccctccatggccagcgagctgatgccttcctccagactgtggagcctctcctataccaaatggaagtgcctcctgtattgcaatggtgtcctggagcctctgtacctgtgcccaaatggtgcccgctgtgccacctggtttcaagaccctacccgcttcactggcaccatggatgccttcgtgaagatcgtgaggcacgagggcaccaggaccctctggagcggcctccccgccaccctggtgatgactgtgccagctaccgccatctacttcatgtggctgggctggggccccactgcccttcgagatgtgcccttctcagccctgtactggttcaactatgagctggtgaagagctggctcaatgggctcaggccgaaggaccagacttctgtgggcatgagctttgtggctggtggcatctcagggacggtggctgcagtgctgactctaccctttgacgtggtaaagacccaacgccaggtcgctctgggagcgatggaggctgtgagagtgaaccccctgcatgtggactccacctggctgctgctgcggaggatccgggccgagtcgggcaccaagggactctttgcaggcttccttcctcggatcatcaaggctgccccctcctgtgccatcatgatcagcacctatgagttcggcaaaagcttcttccagaggctgaaccaggaccggcttctgggcggctgaaaggggcaaggaggcaaggaccccgtctctcccacggatggggagagggcaggaggagacccagccaagtgccttttcctcagcactgagggagggggcttgtttcccttccctcccggcgacaagctccagggcagggctgtccctctgggcggcccagcacttcctcagacacaacttcttcctgctgctccagtcgtggggatcatcacttacccaccccccaagttcaagaccaaatcttccagctgcccccttcgtgtttccctgtgtttgctgtagctgggcatgtctccaggaaccaagaagccctcagcctggtgtagtctccctgacccttgttaattccttaagtctaaagatgatgaacttcaaaaaaaaaaaaaaaaaaaaaaaaaaaaaccggggggtttatgggcgggggggaaagggatgaagggctggcaaagggtccgagcccattttggtaccaggggaacgggggccccaaaggggggaaaccgaaacgggacg

SEQ ID NO: 444390 - DNA, 1687 bp, Homo sapiens
ggaatataggcaataaggtagagacctggtgattaatcggacagaggactaaggtgcgctgcgagcgcgcgcggaccgcgcacaggcggcggagccggtatgggcccgcctggccctgggcgccgcgccgcacgagcaccagcctagagccaggactgaagcttcaagatggctgaccaggaccctgcgggcatcagccccctccagcaaatggtggcctcaggcaccggggctgtggttacctctctcttcatgacacccctggacgtggtgaaggttcgcctgcagtctcagcggccctccatggccagcgagctgatgccttcctccagactgtggagcctctcctataccaaatggaagtgcctcctgtattgcaatggtgtcctggagcctctgtacctgtgcccaaatggtgcccgctgtgccacctggtttcaagaccctacccgcttcactggcaccatgggtgatgactgtgccagctaccgccatctacttcactgcctatgaccaactgaaggccttcctgtgtggtcgagccctgacctctgacctctacgcacccatggtggctggcgcgctggcccgcctgggcaccgtgactgtgatcagccccctggagcttatgcggacaaagctgcaggctcagcatgtgtcgtaccgggagctgggtgcctgtgttcgaactgcagtggctcagggtggctggcgctcactgtggctgggctggggccccactgcccttcgagatgtgcccttctcagtgcatcccccaccccaagccctgtactggttcaactatgagctggtgaagagctggctcaatgggctcaggccgaaggaccagacttctgtgggcatgagctttgtggctggtggcatctcagggacggtggctgcagtgctgactctaccctttgacgtggtaaagacccaacgccaggtcgctctgggagcgatggaggctgtgagagtgaaccccctgcatgtggactccacctggctgctgctgcggaggatccgggccgagtcgggcaccaagggactctttgcaggcttccttcctcggatcatcaaggctgccccctcctgtgccatcatgatcagcacctatgagttcggcaaaagcttcttccagaggctgaaccaggaccggcttctgggcggctgaaaggggcaaggaggcaaggaccccgtctctcccacggatggggagagggcaggaggagacccagccaagtgccttttcctcagcactgagggagggggcttgtttcccttccctcccggcgacaagctccagggcagggctgtccctctgggcggcccagcacttcctcagacacaacttcttcctgctgctccagtcgtggggatcatcacttacccaccccccaagttcaagaccaaatcttccagctgcccccttcgtgtttccctgtgtttgctgtagctgggcatgtctccaggaaccaagaagccctcagcctggtgtagtctccctgacccttgttaattccttaagtctaaagatgatgaacttcaaaaaaaaaaaaaaaaaaaaaaaaaaaaaccggggggtttatgggcgggggggaaagggatgaagggctggcaaagggtccgagcccattttggtaccaggggaacgggggccccaaaggggggaaaccgaaacgggacg

SEQ ID NO: 444391 - DNA, 1104 bp, Homo sapiens
  misc_feature (803)..(803): n is a, c, g, or t
  misc_feature (808)..(809): n is a, c, g, or t
ggaatataggcaataaggtagagacctggtgattaatcggacagaggactaaggtgcgctgcgagcgcgcgcggaccgcgcacaggcggcggagccggtatgggcccgcctggccctgggcgccgcgccgcacgagcaccagcctagagccaggactgaagcttcaagatggctgaccaggaccctgcgggcatcagccccctccagcaaatggtggcctcaggcaccggggctgtggttacctctctcttcatgacacccctggacgtggtgaaggttcgcctgcagtctcagcggccctccatggccagcgggaagtgcctcctgtattgcaatggtgtcctggagcctctgtacctgtgcccaaatggtgcccgctgtgccacctggtttcaagaccctacccgcttcactggcaccatggatgccttcgtgaagatcgtgaggcacgagggcaccaggaccctctggagcggcctccccgccaccctggtgatgactgtgccagctaccgccatctacttcactgcctatgaccaactgaaggccttcctgtgtggtcgagccctgacctctgacctctacgcacccatggtggctggcgcgctggcccgcctgggcaccgtgactgtgatcagccccctggagcttatgcggacaaagctgcaggctcagcatgtgtcgtaccgggagctgggtgcctgtgttcgaactgcagtggctcagggtggctggcgctcactgtggctgggctggggccccactgcccttcgagatgtgcccttctcagcctgtactgttcnactannagctgttgcagaccgtggctcaaggggctcaggccgatgagccgactcctggtgggccaattaactttggaggcgcgctggggccactccgggaccacggcctgcgagggatgcacctaacccctgttgaggcgtgtaacaccacgcgagatgttactactagccacgtaggagcgttagagaacccccagtagtgtgcacagccgacggtcagcgccagagtactagcgcaatcacaagaacgcttggtggcacctcacaatagtgcgcaccgtccaaactagacatctgtaca

SEQ ID NO: 444392 - DNA, 1054 bp, Homo sapiens
gctagctctgggcgcagaggtttctgggagccaagagtggtaatggcgtctgtatgatcttcggagcctgctgcatcggacctcggccagtcataaaagatgacaacagcagccaggccaacctttgaacctgccagaggtggaaggggaaaaggagaaggtgatttgagccaactttcaaagcagtattcaagcagagacctaccctctcatacaaagataaaatacagacagactactcaggatgcccctgaagaggttcgtaaccgtgacttcaggagagagttggaagaaagagagagagctgctgcaagagagaaaaatagggatcgtccaacccgagaacatacaacctcctcttcagtgtcaaaaaagccacggttagaccagattcctgccgccaaccttgatgcagatgaccctctaacagatgaggaagatgaagattttgaagaagaaagtgatgatgatgatactgcagctcttcttgcagaactggaaaaaattaaaaaagaaagagctgaagagcaggccaggaaggaacaagaacaaaaagctgaagaagagaggattcgtatggaaaacattctgagcggaaaccctctccttaatctcactggcccatcccagcctcaggccaacttcaaagttaaaagaaggtgggatgatgacgttgtcttcaagaactgtgcaaaaggtgtagatgaccagaagaaagacaaaagatttgtaaatgacacactgcgatctgaatttcacaaaaagttcatggagaaatatattaaatagtacagttttatgtgcttaattaaagactgtaaaacgtaaaggatcattctgactttttttatgagtttttttttttcttttcccctgtctaaattgtgtgtgggcttccccagttttaaactcctatctttttctttagtgataccttacttgataatggacttgggaataggtttaacccagtttgcattctccaaatgtttccagtgatatgttttcctgggaaaagcaaatctgcctgtaataaatatttttaatctaaata

SEQ ID NO: 444393 - DNA, 641 bp, Homo sapiens
  misc_feature (591)..(592): n is a, c, g, or t
  misc_feature (641)..(641): n is a, c, g, or t
aactgataaaagaggaatatctacaatccccaaaaccacataaactacattaaattgattggctactatcatgtacagatgcctacactaatattagggtagtcctcggtgctgcttctttctattagacctaaaaacattaaatatttatgcaattaaaatctatatatttctattttttaactcaaaagtttcttttactggagaaataataagaatgttttaatgttctaagtaggaattgccattcttgctataagaaagcaagattatatattaaggatgacattattcttttgagtgtaattgctgcatcagatgatacacatgttgagcatctttctgtgtaactgactaagccttgcagtgcatgtagtattcttgtctcctgatacaaacattttcagacgttctgtttgcttttttttcctcaggtgggatgatgacgttgtcttcaagaactgtgcaaaaggtgtagatgaccagaagaaagacaaaagatttgtaaatgacacactgcgatctgaatttcacaaaaagttcatggagaaatatattaaatagtacagttttatgtgcttaattagacannattcggcctatagtagagtcgtattacatttcaactgcccgccggttan

SEQ ID NO: 444394 - DNA, 1786 bp, Homo sapiens
gctagctctgggcgcagaggtttctgggagccaagagtggtaatggcgtctgtatgatcttcggagcctgctgcatcggacctcggccagtgtgagcggcaagaggataggagattatctttcttatcgcgatgggacgggaaagggcagttggggtcggagtcggcggcagagtgcagagcgcgggcggtggaggccctggagcagcgggctaggggcggaaccgagtgcctgtcaggcgcgtctggagctcttgggcccgccgaggagatcgcagcgtacaggcagctcgcctactgcgtaaagcgaaccccagcataaaagatgacaacagcagccaggccaacctttgaacctgccagaggtggaaggggaaaaggagaaggtgatttgagccaactttcaaagcagtattcaagcagagacctaccctctcatacaaagataaaatacagacagactactcaggatgcccctgaagaggttcgtaaccgtgacttcaggagagagttggaagaaagagagagagctgctgcaagagagaaaaatagggatcgtccaacccgagaacatacaacctcctcttcagtgtcaaaaaagccacggttagaccagattcctgccgccaaccttgatgcagatgaccctctaacagatgaggaagatgaagattttgaagaagaaagtgatgatgatgatactgcagctcttcttgcagaactggaaaaaattaaaaaagaaagagctgaagagcaggccaggaaggaacaagaacaaaaagctgaagaagagaggattcgtatggaaaacattctgagcggaaaccctctccttaatctcactggcccatcccagcctcaggccaacttcaaagttaaaagaaggtgggatgatgacgttgtcttcaagaactgtgcaaaaggtgtagatgaccagaagaaagacaaaagatttgtaaatgacacactgcgatctgaatttcacaaaaagttcatggagaaatatattaaatagtacagttttatgtgcttaattaaagactgtaaaacgtaaaggatcattctgactttttttatgagtttttttttttcttttcccctgtctaaattgtgtgtgggcttccccagttttaaactcctatctttttctttagtgataccttacttgataatggacttgggaataggtttaacccagtttgcattctccaaatgtttccagtgatatgttttcctgggaaaagcaaatctgcctgtaataaatatttttaatctaaataaccaaatctgggtgcccaactttttgttggaatttatgctgctagtaatacattccataatatcttttgaaaagaaaaattaccattgtgtattgtgcttgtgcattaacttgtccttttccccctgtttctctcacatttaagatgagttaattcatattttctctgcattttttaaaagagtgtaatggaagatgagagggattctattttggaccacatgttggtgtggaggagtgtcattgacagtaagcaccccaggcgtgtgtctgggagagcattgggtatcgctcacttctgcaggtacttgtttttttttctcatggccgaagaggagagctctgtaagcattcttttaaagtatacggtactcacttgtgttctggatactcaactgccatgtttcctttgaaagagattgaatatgcacctgacatgcatttagtgcaaagcctgagaaagcttcaaacaatatataaaataaaacctttggaaataacagttttg

SEQ ID NO: 444395 - DNA, 1754 bp, Homo sapiens
gctagctctgggcgcagaggtttctgggagccaagagtggtaatggcgtctgtatgatcttcggagcctgctgcatcggacctcggccagtgtgagcggcaagaggataggagattatctttcttatcgcgatgggacgggaaagggcagttggggtcggagtcggcggcagagtgcagagcgcgggcggtggaggccctggagcagcgggctaggggcggaaccgagtgcctgtcaggcgcgtctggagctcttgggcccgccgaggagatcgcagcgtacagcataaaagatgacaacagcagccaggccaacctttgaacctgccagaggtggaaggggaaaaggagaaggtgatttgagccaactttcaaagcagtattcaagcagagacctaccctctcatacaaagataaaatacagacagactactcaggatgcccctgaagaggttcgtaaccgtgacttcaggagagagttggaagaaagagagagagctgctgcaagagagaaaaatagggatcgtccaacccgagaacatacaacctcctcttcagtgtcaaaaaagccacggttagaccagattcctgccgccaaccttgatgcagatgaccctctaacagatgaggaagatgaagattttgaagaagaaagtgatgatgatgatactgcagctcttcttgcagaactggaaaaaattaaaaaagaaagagctgaagagcaggccaggaaggaacaagaacaaaaagctgaagaagagaggattcgtatggaaaacattctgagcggaaaccctctccttaatctcactggcccatcccagcctcaggccaacttcaaagttaaaagaaggtgggatgatgacgttgtcttcaagaactgtgcaaaaggtgtagatgaccagaagaaagacaaaagatttgtaaatgacacactgcgatctgaatttcacaaaaagttcatggagaaatatattaaatagtacagttttatgtgcttaattaaagactgtaaaacgtaaaggatcattctgactttttttatgagtttttttttttcttttcccctgtctaaattgtgtgtgggcttccccagttttaaactcctatctttttctttagtgataccttacttgataatggacttgggaataggtttaacccagtttgcattctccaaatgtttccagtgatatgttttcctgggaaaagcaaatctgcctgtaataaatatttttaatctaaataaccaaatctgggtgcccaactttttgttggaatttatgctgctagtaatacattccataatatcttttgaaaagaaaaattaccattgtgtattgtgcttgtgcattaacttgtccttttccccctgtttctctcacatttaagatgagttaattcatattttctctgcattttttaaaagagtgtaatggaagatgagagggattctattttggaccacatgttggtgtggaggagtgtcattgacagtaagcaccccaggcgtgtgtctgggagagcattgggtatcgctcacttctgcaggtacttgtttttttttctcatggccgaagaggagagctctgtaagcattcttttaaagtatacggtactcacttgtgttctggatactcaactgccatgtttcctttgaaagagattgaatatgcacctgacatgcatttagtgcaaagcctgagaaagcttcaaacaatatataaaataaaacctttggaaataacagttttg

SEQ ID NO: 444396 - DNA, 1870 bp, Homo sapiens
gctagctctgggcgcagaggtttctgggagccaagagtggtaatggcgtctgtatgatcttcggagcctgctgcatcggacctcggccagtcataaaagatgacaacagcagccaggccaacctttgaacctgccagaggtggaaggggaaaaggagaaggtgatttgagccaactttcaaagcagtattcaagcagagacctaccctctcatacaaagataaaatacagacagactactcaggatgcccctgaagaggttcgtaaccgtgacttcaggagagagttggaagaaagagagagagctgctgcaagagagaaaaatagggatcgtccaacccgaggtaccaacactatccaagacatttgtctcataaaattatgttgttgatagtttttctttatgtagcaattggaaaatgttaaccatttgtttacttttacagattgatgtgagctgtactactttcttaggtcattagagataataacaacaaatatttaccaaaggcttatttgcccaggcactgtggatgtgagttcactgtggataatgcttttaatgtgggctccttgtgctcacaggtccctaaaacattttaagaaatgaagtatttgttttactaagttaaatgatttttgtttccccccagaacatacaacctcctcttcagtgtcaaaaaagccacggttagaccagattcctgccgccaaccttgatgcagatgaccctctaacagatgaggaagatgaagattttgaagaagaaagtgatgatgatgatactgcagctcttcttgcagaactggaaaaaattaaaaaagaaagagctgaagagcaggccaggaaggaacaagaacaaaaagctgaagaagagaggattcgtatggaaaacattctgagcggaaaccctctccttaatctcactggcccatcccagcctcaggccaacttcaaagttaaaagaaggtgggatgatgacgttgtcttcaagaactgtgcaaaaggtgtagatgaccagaagaaagacaaaagatttgtaaatgacacactgcgatctgaatttcacaaaaagttcatggagaaatatattaaatagtacagttttatgtgcttaattaaagactgtaaaacgtaaaggatcattctgactttttttatgagtttttttttttcttttcccctgtctaaattgtgtgtgggcttccccagttttaaactcctatctttttctttagtgataccttacttgataatggacttgggaataggtttaacccagtttgcattctccaaatgtttccagtgatatgttttcctgggaaaagcaaatctgcctgtaataaatatttttaatctaaataaccaaatctgggtgcccaactttttgttggaatttatgctgctagtaatacattccataatatcttttgaaaagaaaaattaccattgtgtattgtgcttgtgcattaacttgtccttttccccctgtttctctcacatttaagatgagttaattcatattttctctgcattttttaaaagagtgtaatggaagatgagagggattctattttggaccacatgttggtgtggaggagtgtcattgacagtaagcaccccaggcgtgtgtctgggagagcattgggtatcgctcacttctgcaggtacttgtttttttttctcatggccgaagaggagagctctgtaagcattcttttaaagtatacggtactcacttgtgttctggatactcaactgccatgtttcctttgaaagagattgaatatgcacctgacatgcatttagtgcaaagcctgagaaagcttcaaacaatatataaaataaaacctttggaaataacagttttg

SEQ ID NO: 444397 - DNA, 1503 bp, Homo sapiens
gctagctctgggcgcagaggtttctgggagccaagagtggtaatggcgtctgtatgatcttcggagcctgctgcatcggacctcggccagtcataaaagatgacaacagcagccaggccaacctttgaacctgccagaggtggaaggggaaaaggagaaggtgatttgagccaactttcaaagcagtattcaagcagagacctaccctctcatacaaagataaaatacagacagactactcaggatgcccctgaagaggttcgtaaccgtgacttcaggagagagttggaagaaagagagagagctgctgcaagagagaaaaatagggatcgtccaacccgagaacatacaacctcctcttcagtgtcaaaaaagaggaagatgaagattttgaagaagaaagtgatgatgatgatactgcagctcttcttgcagaactggaaaaaattaaaaaagaaagagctgaagagcaggccaggaaggaacaagaacaaaaagctgaagaagagaggattcgtatggaaaacattctgagcggaaaccctctccttaatctcactggcccatcccagcctcaggccaacttcaaagttaaaagaaggtgggatgatgacgttgtcttcaagaactgtgcaaaaggtgtagatgaccagaagaaagacaaaagatttgtaaatgacacactgcgatctgaatttcacaaaaagttcatggagaaatatattaaatagtacagttttatgtgcttaattaaagactgtaaaacgtaaaggatcattctgactttttttatgagtttttttttttcttttcccctgtctaaattgtgtgtgggcttccccagttttaaactcctatctttttctttagtgataccttacttgataatggacttgggaataggtttaacccagtttgcattctccaaatgtttccagtgatatgttttcctgggaaaagcaaatctgcctgtaataaatatttttaatctaaataaccaaatctgggtgcccaactttttgttggaatttatgctgctagtaatacattccataatatcttttgaaaagaaaaattaccattgtgtattgtgcttgtgcattaacttgtccttttccccctgtttctctcacatttaagatgagttaattcatattttctctgcattttttaaaagagtgtaatggaagatgagagggattctattttggaccacatgttggtgtggaggagtgtcattgacagtaagcaccccaggcgtgtgtctgggagagcattgggtatcgctcacttctgcaggtacttgtttttttttctcatggccgaagaggagagctctgtaagcattcttttaaagtatacggtactcacttgtgttctggatactcaactgccatgtttcctttgaaagagattgaatatgcacctgacatgcatttagtgcaaagcctgagaaagcttcaaacaatatataaaataaaacctttggaaataacagttttg

SEQ ID NO: 444398 - DNA, 1420 bp, Homo sapiens
gctagctctgggcgcagaggtttctgggagccaagagtggtaatggcgtctgtatgatcttcggagcctgctgcatcggacctcggccagtcataaaagatgacaacagcagccaggccaacctttgaacctgccagaggtggaaggggaaaaggagaaggtgatttgagccaactttcaaagcagtattcaagcagagacctaccctctcatacaaagataaaatacagacagactactcaggatgcccctgaagaggttcgtaaccgtgacttcaggagagagttggaagaaagagagagagctgctgcaagagagaaaaatagggatcgtccaacccgagaacatacaacctcctcttcagtgtcaaaaaagccacggttagaccagattcctgccgccaaccttgatgcagatgaccctctaacagatgtatgttttgtttcctcctttcatctctaataattgatttaccatgtttttctaaaatacttgttatgtctttgctttaagaagtgacatatatttatgtttagttactgttattcaaatatagccctgacctcagtgctaaactttatagttgattttaaaatcaaaagtattattttgtgggactttaagaacaagtttgatctctagagaaccaaatatggaaggaatctataaaaggatatgctttcccccaaaataatgtcctgtactaaactactgcactactgctgtgttacacacctctccagggcactcttcatactgggcttcctataaacagtgccctctagagttgtacctggaggcctttccatattagatatgtccccttctataagtgcaatacacttaatggttccctctgtgcttagggagggaagtaatctaagcagaaggtttttaaggattagcacatcagttaatgttaaaattctgtgggaccctagagcctataatcaatttgcagttttctacatacaggacagtgaaaaacctgagtggcatccaatgagtgatatctaactatgtatacatatcagcagttaattctagagttaattgatggagttactcataatagttaaaacaggaaacctaatttcaactgaaatttaatgattattcatttgaaattattttcttctgagaatttagcacacttttttgcacttttgagtatctttgctgctagcttaaagttgttttgagctacataaaattgttttgactttcttagggtgatacgttgtacatatgtactgtgttttggtagtgtgtattttccctccaatcttctgggctctcactgttcttttaggaggaagatgaagattttgaagaagaaagtgatgatgatgatactgcagctcttgtcacaataagcgcattgttctaatggtgtgtagataatcggagtagatagaga

SEQ ID NO: 444399 - DNA, 1336 bp, Homo sapiens
aactgataaaagaggaatatctacaatccccaaaaccacataaactacattaaattgattggctactatcatgtacagatgcctacactaatattagggtagtcctcggtgctgcttctttctattagacctaaaaacattaaatatttatgcaattaaaatctatatatttctattttttaactcaaaagtttcttttactggagaaataataagaatgttttaatgttctaagtaggaattgccattcttgctataagaaagcaagattatatattaaggatgacattattcttttgagtgtaattgctgcatcagatgatacacatgttgagcatctttctgtgtaactgactaagccttgcagtgcatgtagtattcttgtctcctgatacaaacattttcagacgttctgtttgcttttttttcctcaggtgggatgatgacgttgtcttcaagaactgtgcaaaaggtgtagatgaccagaagaaagacaaaagatttgtaaatgacacactgcgatctgaatttcacaaaaagttcatggagaaatatattaaatagtacagttttatgtgcttaattaaagactgtaaaacgtaaaggatcattctgactttttttatgagtttttttttttcttttcccctgtctaaattgtgtgtgggcttccccagttttaaactcctatctttttctttagtgataccttacttgataatggacttgggaataggtttaacccagtttgcattctccaaatgtttccagtgatatgttttcctgggaaaagcaaatctgcctgtaataaatatttttaatctaaataaccaaatctgggtgcccaactttttgttggaatttatgctgctagtaatacattccataatatcttttgaaaagaaaaattaccattgtgtattgtgcttgtgcattaacttgtccttttccccctgtttctctcacatttaagatgagttaattcatattttctctgcattttttaaaagagtgtaatggaagatgagagggattctattttggaccacatgttggtgtggaggagtgtcattgacagtaagcaccccaggcgtgtgtctgggagagcattgggtatcgctcacttctgcaggtacttgtttttttttctcatggccgaagaggagagctctgtaagcattcttttaaagtatacggtactcacttgtgttctggatactcaactgccatgtttcctttgaaagagattgaatatgcacctgacatgcatttagtgcaaagcctgagaaagcttcaaacaatatataaaataaaacctttggaaataacagttttg

SEQ ID NO: 444400 - DNA, 523 bp, Homo sapiens
agctctgggcgcagaggtttctgggagccaagagtggtaatggcgtctgtatgatcttcggagcctgctgcatcggacctcggccagtgtgagcggcaagaggataggagattatctttcttatcgcgatgggacgggaaagggcagttggggtcggagtcggcggcagagtgcagagcgcgggcggtggaggccctggagcagcgggctaggggcggaaccgagtgcctgtcaggcgcgtctggagctcttgggcccgccgaggagatcgcagcgtacaggcagctcgcctactgcgtaaagcgaaccccaggtcctcccttcactacccttcgcacccctgcagtgctgggcacgggtgaagaggcagcgagtttctggttatagccaaagactagctcacgggaggccggagtgataattccgtgggtgtgtgggaaggggcggcgcccccagcgccagataaccctgttttcttctttgtatacatgtctctaccctttttgaaagttgagagaattag

SEQ ID NO: 444401 - DNA, 1561 bp, Homo sapiens
gctagctctgggcgcagaggtttctgggagccaagagtggtaatggcgtctgtatgatcttcggagcctgctgcatcggacctcggccagtcataaaagatgacaacagcagccaggccaacctttgaacctgccagaggtggaaggggaaaaggagaaggtgatttgagccaactttcaaagcagtattcaagcagagacctaccctctcatacaaagataaaatacagacagactactcaggatgcccctgaagaggttcgtaaccgtgacttcaggagagagttggaagaaagagagagagctgctgcaagagagaaaaatagggatcgtccaacccgagaacatacaacctcctcttcagtgtcaaaaaagccacggttagaccagattcctgccgccaaccttgatgcagatgaccctctaacagatgaggaagatgaagattttgaagaagaaagtgatgatgatgatactgcagctcttcttgcagaactggaaaaaattaaaaaagaaagagctgaagagcaggccaggaaggaacaagaacaaaaagctgaagaagagaggattcgtatggaaaacattctgagcggaaaccctctccttaatctcactggcccatcccagcctcaggccaacttcaaagttaaaagaaggtgggatgatgacgttgtcttcaagaactgtgcaaaaggtgtagatgaccagaagaaagacaaaagatttgtaaatgacacactgcgatctgaatttcacaaaaagttcatggagaaatatattaaatagtacagttttatgtgcttaattaaagactgtaaaacgtaaaggatcattctgactttttttatgagtttttttttttcttttcccctgtctaaattgtgtgtgggcttccccagttttaaactcctatctttttctttagtgataccttacttgataatggacttgggaataggtttaacccagtttgcattctccaaatgtttccagtgatatgttttcctgggaaaagcaaatctgcctgtaataaatatttttaatctaaataaccaaatctgggtgcccaactttttgttggaatttatgctgctagtaatacattccataatatcttttgaaaagaaaaattaccattgtgtattgtgcttgtgcattaacttgtccttttccccctgtttctctcacatttaagatgagttaattcatattttctctgcattttttaaaagagtgtaatggaagatgagagggattctattttggaccacatgttggtgtggaggagtgtcattgacagtaagcaccccaggcgtgtgtctgggagagcattgggtatcgctcacttctgcaggtacttgtttttttttctcatggccgaagaggagagctctgtaagcattcttttaaagtatacggtactcacttgtgttctggatactcaactgccatgtttcctttgaaagagattgaatatgcacctgacatgcatttagtgcaaagcctgagaaagcttcaaacaatatataaaataaaacctttggaaataacagttttg

SEQ ID NO: 444402 - DNA, 2441 bp, Homo sapiens
gctagctctgggcgcagaggtttctgggagccaagagtggtaatggcgtctgtatgatcttcggagcctgctgcatcggacctcggccagtcataaaagatgacaacagcagccaggccaacctttgaacctgccagaggtggaaggggaaaaggagaaggtgatttgagccaactttcaaagcagtattcaagcagagacctaccctctcatacaaagataaaatacagacagactactcaggatgcccctgaagaggttcgtaaccgtgacttcaggagagagttggaagaaagagagagagctgctgcaagagagaaaaatagggatcgtccaacccgagaacatacaacctcctcttcagtgtcaaaaaagccacggttagaccagattcctgccgccaaccttgatgcagatgaccctctaacagatgtatgttttgtttcctcctttcatctctaataattgatttaccatgtttttctaaaatacttgttatgtctttgctttaagaagtgacatatatttatgtttagttactgttattcaaatatagccctgacctcagtgctaaactttatagttgattttaaaatcaaaagtattattttgtgggactttaagaacaagtttgatctctagagaaccaaatatggaaggaatctataaaaggatatgctttcccccaaaataatgtcctgtactaaactactgcactactgctgtgttacacacctctccagggcactcttcatactgggcttcctataaacagtgccctctagagttgtacctggaggcctttccatattagatatgtccccttctataagtgcaatacacttaatggttccctctgtgcttagggagggaagtaatctaagcagaaggtttttaaggattagcacatcagttaatgttaaaattctgtgggaccctagagcctataatcaatttgcagttttctacatacaggacagtgaaaaacctgagtggcatccaatgagtgatatctaactatgtatacatatcagcagttaattctagagttaattgatggagttactcataatagttaaaacaggaaacctaatttcaactgaaatttaatgattattcatttgaaattattttcttctgagaatttagcacacttttttgcacttttgagtatctttgctgctagcttaaagttgttttgagctacataaaattgttttgactttcttagggtgatacgttgtacatatgtactgtgttttggtagtgtgtattttccctccaatcttctgggctctcactgttcttttaggaggaagatgaagattttgaagaagaaagtgatgatgatgatactgcagctcttcttgcagaactggaaaaaattaaaaaagaaagagctgaagagcaggccaggaaggaacaagaacaaaaagctgaagaagagaggattcgtatggaaaacattctgagcggaaaccctctccttaatctcactggcccatcccagcctcaggccaacttcaaagttaaaagaaggtgggatgatgacgttgtcttcaagaactgtgcaaaaggtgtagatgaccagaagaaagacaaaagatttgtaaatgacacactgcgatctgaatttcacaaaaagttcatggagaaatatattaaatagtacagttttatgtgcttaattaaagactgtaaaacgtaaaggatcattctgactttttttatgagtttttttttttcttttcccctgtctaaattgtgtgtgggcttccccagttttaaactcctatctttttctttagtgataccttacttgataatggacttgggaataggtttaacccagtttgcattctccaaatgtttccagtgatatgttttcctgggaaaagcaaatctgcctgtaataaatatttttaatctaaataaccaaatctgggtgcccaactttttgttggaatttatgctgctagtaatacattccataatatcttttgaaaagaaaaattaccattgtgtattgtgcttgtgcattaacttgtccttttccccctgtttctctcacatttaagatgagttaattcatattttctctgcattttttaaaagagtgtaatggaagatgagagggattctattttggaccacatgttggtgtggaggagtgtcattgacagtaagcaccccaggcgtgtgtctgggagagcattgggtatcgctcacttctgcaggtacttgtttttttttctcatggccgaagaggagagctctgtaagcattcttttaaagtatacggtactcacttgtgttctggatactcaactgccatgtttcctttgaaagagattgaatatgcacctgacatgcatttagtgcaaagcctgagaaagcttcaaacaatatataaaataaaacctttggaaataacagttttg

SEQ ID NO: 444403 - DNA, 1447 bp, Homo sapiens
gctagctctgggcgcagaggtttctgggagccaagagtggtaatggcgtctgtatgatcttcggagcctgctgcatcggacctcggccagtcataaaagatgacaacagcagccaggccaacctttgaacctgccagaggtggaaggggaaaaggagaaggtgatttgagccaactttcaaagcagtattcaagcagagacctaccctctcatacaaagataaaatacagacagactactcaggatgcccctgaagaggttcgtaaccgtgacttcaggagagagttggaagaaagagagagagctgctgcaagagagaaaaatagggatcgtccaacccgagaacatacaacctcctcttcagtgtcaaaaaagccacggttagaccagattcctgccgccaaccttgatgcagatgaccctctaacagatgaggaagatgaagattttgaagaagaaagtgatgatgatgatactgcagctcttcctctccttaatctcactggcccatcccagcctcaggccaacttcaaagttaaaagaaggtgggatgatgacgttgtcttcaagaactgtgcaaaaggtgtagatgaccagaagaaagacaaaagatttgtaaatgacacactgcgatctgaatttcacaaaaagttcatggagaaatatattaaatagtacagttttatgtgcttaattaaagactgtaaaacgtaaaggatcattctgactttttttatgagtttttttttttcttttcccctgtctaaattgtgtgtgggcttccccagttttaaactcctatctttttctttagtgataccttacttgataatggacttgggaataggtttaacccagtttgcattctccaaatgtttccagtgatatgttttcctgggaaaagcaaatctgcctgtaataaatatttttaatctaaataaccaaatctgggtgcccaactttttgttggaatttatgctgctagtaatacattccataatatcttttgaaaagaaaaattaccattgtgtattgtgcttgtgcattaacttgtccttttccccctgtttctctcacatttaagatgagttaattcatattttctctgcattttttaaaagagtgtaatggaagatgagagggattctattttggaccacatgttggtgtggaggagtgtcattgacagtaagcaccccaggcgtgtgtctgggagagcattgggtatcgctcacttctgcaggtacttgtttttttttctcatggccgaagaggagagctctgtaagcattcttttaaagtatacggtactcacttgtgttctggatactcaactgccatgtttcctttgaaagagattgaatatgcacctgacatgcatttagtgcaaagcctgagaaagcttcaaacaatatataaaataaaacctttggaaataacagttttg

SEQ ID NO: 444404 - DNA, 1379 bp, Homo sapiens
gctagctctgggcgcagaggtttctgggagccaagagtggtaatggcgtctgtatgatcttcggagcctgctgcatcggacctcggccagtcataaaagatgacaacagcagccaggccaacctttgaacctgccagaggtggaaggggaaaaggagaaggtgatttgagccaactttcaaagcagtattcaagcagagacctaccctctcatacaaagataaaatacagacagactactcaggatgcccctgaagaggttcgtaaccgtgacttcaggagagagttggaagaaagagagagagcttgcagaactggaaaaaattaaaaaagaaagagctgaagagcaggccaggaaggaacaagaacaaaaagctgaagaagagaggattcgtatggaaaacattctgagcggaaaccctctccttaatctcactggcccatcccagcctcaggccaacttcaaagttaaaagaaggtgggatgatgacgttgtcttcaagaactgtgcaaaaggtgtagatgaccagaagaaagacaaaagatttgtaaatgacacactgcgatctgaatttcacaaaaagttcatggagaaatatattaaatagtacagttttatgtgcttaattaaagactgtaaaacgtaaaggatcattctgactttttttatgagtttttttttttcttttcccctgtctaaattgtgtgtgggcttccccagttttaaactcctatctttttctttagtgataccttacttgataatggacttgggaataggtttaacccagtttgcattctccaaatgtttccagtgatatgttttcctgggaaaagcaaatctgcctgtaataaatatttttaatctaaataaccaaatctgggtgcccaactttttgttggaatttatgctgctagtaatacattccataatatcttttgaaaagaaaaattaccattgtgtattgtgcttgtgcattaacttgtccttttccccctgtttctctcacatttaagatgagttaattcatattttctctgcattttttaaaagagtgtaatggaagatgagagggattctattttggaccacatgttggtgtggaggagtgtcattgacagtaagcaccccaggcgtgtgtctgggagagcattgggtatcgctcacttctgcaggtacttgtttttttttctcatggccgaagaggagagctctgtaagcattcttttaaagtatacggtactcacttgtgttctggatactcaactgccatgtttcctttgaaagagattgaatatgcacctgacatgcatttagtgcaaagcctgagaaagcttcaaacaatatataaaataaaacctttggaaataacagttttg

SEQ ID NO: 444405 - DNA, 851 bp, Homo sapiens
  misc_feature (235)..(235): n is a, c, g, or t
  misc_feature (348)..(348): n is a, c, g, or t
  misc_feature (844)..(849): n is a, c, g, or t
  misc_feature (851)..(851): n is a, c, g, or t
cctgcacacccggaagcagatcgcgctggggaaaggccacgtcgctatgagtgtgtttcagtctacctggattaaacgtttgcttctcttcgtctaccttgattaaacgtgcacttcgcagtcctcggttctccatacccgtgacctggggatcgctacggaccttaaaatacccgcaacagccccttcgtcccaagtagtctgcccacctcggcctcccaaagtgctgggattncaggtgtgagccaccgctcccagcctctctgtacaaattttttgccacacaaatctgaaaataccaccttgatttatggatcctccaagtttttcactgaagtacaagggaanaaatgtaaatctataaattgggttaaatgatttctaggaaagtgtataataataataacaattatttttttgagacagagtctctgtcacccaggctggagtgaaactgtgtctcaaaataaataaataaataataaataaataaataatagaaatgaagttttgctatagttgagaaattatagaatgccatgcttattatgataacctcatacagaaatttttacagctttttgaaaaatggcttttttgttattcaatttttatagtcttataaacattaattttcacaagactagtgtaaaaatattgtagacaatttgtctaagcagtatttcggaagcactttcaacagttatgtaaagggtcctatttatgcttgaagaaaggacatgtataaggtttttagcatgaggaaattaagtctttctcaacctagaagtcaggagtttcaagagtaaacattcagtgttgaattaaagaatctgaatctaannnnnnan

SEQ ID NO: 444406 - DNA, 316 bp, Homo sapiens
cctgcacacccggaagcagatcgcgctggggaaaggccacgtcgctatgagtgtgtttcagtctacctggattaaacgtttgcttctcttcgtctaccttgattaaacgtgcacttcgcagtcctcggttctccatacccgtgacctggggatcgctacggaccttaaaatacccgcaacagccccttcgtcccaagtaggtaggagaattgcttccctttcggtttaaaatctctctgaggccgttccttgctctctgcctttcttccttaggaccatgtagacaaccccattcaggtagtgttcccgcttaaaa

SEQ ID NO: 444407 - DNA, 1028 bp, Homo sapiens
  misc_feature (412)..(412): n is a, c, g, or t
  misc_feature (525)..(525): n is a, c, g, or t
  misc_feature (1021)..(1026): n is a, c, g, or t
  misc_feature (1028)..(1028): n is a, c, g, or t
cccgccacgaagcccagctaatttttgtatttttggcagaaacagggtttcaccatgttggccaggctgctcttgaactcctgacctcaagtgatccgcccacctcagcctcccaaagtgcagatatgctttacaaatgaaatgagggtggcagaagcttcaccagagttcagtcactacttgagagtttatattggaaagaaatcgtataaatgtatgtgctagaggcttccccgaggtgtctgaactcactagacctcagaatatacatctttgacaaatgtaatgtgtgtgctaagactttttacccgaacatccaaatggaaacatcagagtattcatactggagaacagtcttacaaatgtaacgaatgtggtaagcctttttaaaaatcaaatggtgctgggattncaggtgtgagccaccgctcccagcctctctgtacaaattttttgccacacaaatctgaaaataccaccttgatttatggatcctccaagtttttcactgaagtacaagggaanaaatgtaaatctataaattgggttaaatgatttctaggaaagtgtataataataataacaattatttttttgagacagagtctctgtcacccaggctggagtgaaactgtgtctcaaaataaataaataaataataaataaataaataatagaaatgaagttttgctatagttgagaaattatagaatgccatgcttattatgataacctcatacagaaatttttacagctttttgaaaaatggcttttttgttattcaatttttatagtcttataaacattaattttcacaagactagtgtaaaaatattgtagacaatttgtctaagcagtatttcggaagcactttcaacagttatgtaaagggtcctatttatgcttgaagaaaggacatgtataaggtttttagcatgaggaaattaagtctttctcaacctagaagtcaggagtttcaagagtaaacattcagtgttgaattaaagaatctgaatctaannnnnnan

SEQ ID NO: 444408 - DNA, 1079 bp, Homo sapiens
  misc_feature (463)..(463): n is a, c, g, or t
  misc_feature (576)..(576): n is a, c, g, or t
  misc_feature (1072)..(1077): n is a, c, g, or t
  misc_feature (1079)..(1079): n is a, c, g, or t
tgctgggattacaggcgtgagccactgcgcccggccagaatatagctaagttttaagcaagtgttcactaggcataagaatatacatcctggagagaaatcacagaagtgtagtatatgtggcaagaatactacttaaaggtcaaaacttgtggatctataactcaaagtgcagatatgctttacaaatgaaatgagggtggcagaagcttcaccagagttcagtcactacttgagagtttatattggaaagaaatcgtataaatgtatgtgctagaggcttccccgaggtgtctgaactcactagacctcagaatatacatctttgacaaatgtaatgtgtgtgctaagactttttacccgaacatccaaatggaaacatcagagtattcatactggagaacagtcttacaaatgtaacgaatgtggtaagcctttttaaaaatcaaatggtgctgggattncaggtgtgagccaccgctcccagcctctctgtacaaattttttgccacacaaatctgaaaataccaccttgatttatggatcctccaagtttttcactgaagtacaagggaanaaatgtaaatctataaattgggttaaatgatttctaggaaagtgtataataataataacaattatttttttgagacagagtctctgtcacccaggctggagtgaaactgtgtctcaaaataaataaataaataataaataaataaataatagaaatgaagttttgctatagttgagaaattatagaatgccatgcttattatgataacctcatacagaaatttttacagctttttgaaaaatggcttttttgttattcaatttttatagtcttataaacattaattttcacaagactagtgtaaaaatattgtagacaatttgtctaagcagtatttcggaagcactttcaacagttatgtaaagggtcctatttatgcttgaagaaaggacatgtataaggtttttagcatgaggaaattaagtctttctcaacctagaagtcaggagtttcaagagtaaacattcagtgttgaattaaagaatctgaatctaannnnnnan

SEQ ID NO: 444409 - DNA, 680 bp, Homo sapiens
cccgccacgaagcccagctaatttttgtatttttggcagaaacagggtttcaccatgttggccaggctgctcttgaactcctgacctcaagtgatccgcccacctcagcctcccaaagtgcagatatgctttacaaatgaaatgagggtggcagaagcttcaccagagttcagtcactacttgagagtttatattggaaagaaatcgtataaatgtatgtgctagaggcttccccgaggtgtctgaactcactagacctcagaatatacatctttgacaaatgtaatgtgtgtgctaagactttttacccgaacatccaaatggaaacatcagagtattcatactggagaacagtcttacaaatgtaacgaatgtggtaagcctttttaaaaatcaaatgggctgggtatggtggctcacacctgtaatcccagcactttgggaggccgaggtgggtggatcatctgatgtcaggagtttgagaccggcctggccagcatggtgaaaccccatctctactaaaaaatacaaaaattagctgggcagtggtgggcacctgtaatcccgctacttgggaggctgaggcagaagaatcacttgaatccaggatgtggaggttgctgtaagccgagattgcgccattgtactccagcctgggtgacaagagtgagactctgtct

SEQ ID NO: 444410 - DNA, 1010 bp, Homo sapiens
  misc_feature (951)..(951): n is a, c, g, or t
  misc_feature (983)..(983): n is a, c, g, or t
  misc_feature (987)..(987): n is a, c, g, or t
  misc_feature (991)..(991): n is a, c, g, or t
attttgttttcctctttttatttgtctgctaagaaggctagaagcaaattgagttgcctgttcgttccttcatatatgtctcctcctctgccaacaggaatggaatttgaaggtgctatcatcgcacttttccatctgctggccacacgcacagacaaggtccgagcccttcgggaggcgttctaccgccagaatcttcccaacctcatgaatctcatcgccaccatctttgtctttgcagtggtcatctatttccaggtgtgtccagatccaaccccagggagtttccatggtctggatttaagtttcagaatgccttgtgtgcagtcccccactctgtggggtgcactgtcatcatattgtgttgaaacgatgagatggtatttgaaggcagcaggtttccagatgagctggacaagcatgttcattgagtcatgggacctgtttcatttcctgtggagtatacagcatggtccggattatcatcactcggtccagaaggtcaagagggatgccgtgaggggatgtgatgtcctcagtgcctctgatgacacagttgcctcggttggatgcaaagatgacgatgggagcgatagaagactccagggcgcggtgcaggtaggtgaagcactcaatgtccagcatgtggacctcatcaacaaacagcacacccgggaccagctcagcaatgccctggtcgatgtacttgttcaccaccttattaatctcccctcgaagtttgtctgtgatttctgtcttctttggcttcattagctggcccatcatggacaggatatcttgtcccccctggggccgcgcattagccacatccaagtcatgcaaggtcacatcttggatgatttctttctttttgtgcacatccccttttggcaaggggacatactcttcagcttcaaggtcgaattctgtggcataggtatcacacctgcnctgcctcttcacggccccactgttggcttcantgtnaatnacatctccagcttctactc

SEQ ID NO: 444411 - DNA, 3636 bp, Homo sapiens
agcgatccgaggcccggccccggccccgccccgcgccgcgccgcgccgcttgccgccgggctagcactgacgtgtctctcggcggagctgctgtgcagtggaacgcgctgggccgcgggcagcgtcgcctcacgcggagcagagctgagctgaagcgggacccggagcccgagcagccgccgccatggcaatcaaatttctggaagtcatcaagcccttctgtgtcatcctgccggaaattcagaagccagagaggaagattcagtttaaggagaaagtgctgtggaccgctatcaccctctttatcttcttagtgtgctgccagattcccctgtttgggatcatgtcttcagattcagctgaccctttctattggatgagagtgattctagcctctaacagaggcacattgatggagctagggatctctcctattgtcacgtctggccttataatgcaactcttggctggcgccaagataattgaagttggtgacaccccaaaagaccgagctctcttcaacggagcccaaaagttatttggcatgatcattactatcggccagtctatcgtgtatgtgatgaccgggatgtatggggacccttctgaaatgggtgctggaatttgcctgctaatcaccattcagctctttgttgctggcttaattgtcctacttttggatgaactcctgcaaaaaggatatggccttggctctggtatttctctcttcattgcaactaacatctgtgaaaccatcgtatggaaggcattcagccccactactgtcaacactggccgaggaatggaatttgaaggtgctatcatcgcacttttccatctgctggccacacgcacagacaaggtccgagcccttcgggaggcgttctaccgccagaatcttcccaacctcatgaatctcatcgccaccatctttgtctttgcagtggtcatctatttccagggcttccgagtggacctgccaatcaagtcggcccgctaccgtggccagtacaacacctatcccatcaagctcttctatacgtccaacatccccatcatcctgcagtctgccctggtgtccaacctttatgtcatctcccaaatgctctcagctcgcttcagtggcaacttgctggtcagcctgctgggcacctggtcggacacgtcttctgggggcccagcacgtgcttatccagttggtggcctttgctattacctgtcccctccagaatcttttggctccgtgttagaagacccggtccatgcagttgtatacatagtgttcatgctgggctcctgtgcattcttctccaaaacgtggattgaggtctcaggttcctctgccaaagatgttgcaaagcagctgaaggagcagcagatggtgatgagaggccaccgagagacctccatggtccatgaactcaaccggtacatccccacagccgcggcctttggtgggctgtgcatcggggccctctcggtcctggctgacttcctaggcgccattgggtctggaaccgggatcctgctcgcagtcacaatcatctaccagtactttgagatcttcgttaaggagcaaagcgaggttggcagcatgggggccctgctcttctgagcccgtctcccggacaggttgaggaagctgctccagaagcgcctcggaaggggagctctcatcatggcgcgtgctgctgcggcatatggacttttaataatgtttttgaatttcgtattctttcattccactgtgtaaagtgctagacattttccaatttaaaattttgctttttatcctggcactggcaaaaagaactgtgaaagtgaaattttattcagccgactgccagagaagtgggaatggtataggattgtccccaagtgtccatgtaacttttgttttaacctttgcaccttctcagtgctgtatgcggctgcagccgtctcacctgtttccccacaaagggaatttctcactctggttggaagcacaaacactgaaatgtctacgtttcattttggcagtagggtgtgaagctgggagcagatcatgtatttcccggagacgtgggaccttgctggcatgtctccttcacaatcaggcgtgggaatatctggcttaggactgtttctctctaagacaccattgttttcccttattttaaaagtgatttttttaaggacagaacttcttccaaaagagagggatggctttcccagaagacactcctggccatctgtggatttgtctgtgcacctattggctcttctagctgactcttctggttgggcttagagtctgcctgtttctgctagctccgtgtttagtccacttgggtcatcagctctgccaagctgagcctggccaagctaggtggacagacccttgcagtgatgtccgtttgtccagattctgccagtcatcactggacacgtctcctcgcagctgccctagcaaggggagacattgtggtagctatcagacatggacagaaactgacttagtgctcacaagcccctacaccttctgggctgaagatcacccagctgtgttcagaattttcttactgtgcttaggactgcacgcaagtgagcagacaccaccgacttcctttctgcgtcaccagtgtcgtcagcagagagaggacagcacaggctcaaggttggtagtgaagtcaggttcggggtgcatgggctgtggtggtgttgatcagttgctccagtgtttgaaataagaagactcatgtttatgtctggaataagttctgtttgtgctgacaggtggcctaggtcctggagatgagcaccctctctctggcctttagggagtcccctcttaggacaggcactgcccagcagcaagggcagcagagttgggtgctaagatcctgaggagctcgaggtttcgagctggctttagacattggtgggaccaaggatgttttgcaggatgccctgatcctaagaagggggcctgggggtgcgtgcagcctgtcggggagaccccactctgacagtgggcacacggcagcctgcaaagcacagggccaccgccacagcccggcagaggggcacactctggagaccttgctggcagtgctagccaggaaacagagtgaccaagggacaagaagggacttgcctaaagccacccagcaactcagcagcagaaccaagatgggccccaggctcctccatatggcccagggcttaccaccctatcacacgtggccttgtctagacccagtcctgagcaggggagaggctcttgagacctgatgccctcctacccacatggttctcccactgccctgtctgctctgctgctacagaggggcagggcctcccccagcccacgcttaggaatgcttggcctctggcaggcaggcagctgtacccaagctggtgggcagggggctggaaggcaccaggcctcaggaggagccccatagtcccgcctgcagcctgtaaccatcggctgggccctgcaaggcccacactcacgccctgtgggtgatggtcacggtgggtgggtgggggctgaccccagcttccaggggactgtcactgtggacgccaaaatggcataactgagataaggtgaataagtgacaaataaagccagttttttacaaggta

SEQ ID NO: 444412 - DNA, 406 bp, Homo sapiens
agcagaggggcctttgaggcattaggtcccaaagtctcaggtgagcctgttggccgcctggctcacggggagctctgtgggtgtccaggagctgactgtgtcccctcccccaggtacatccccacagccgcggcctttggtgggctgtgcatcggggccctctcggtcctggctgacttcctaggcgccattgggtctggaaccgggatcctgctcgcagtcacaatcatctaccagtactttgagatcttcgttaaggagcagttaggtaaggaagggcaaagtccaggtgaccttagatgctgccacagcactcttcagtctgcacagtcctcagtacaactactcatctcttccatcgccactgcactccagcctgggcaacagaccaagatccgtctcaaaa

SEQ ID NO: 444413 - DNA, 3525 bp, Homo sapiens
gaggtgatcggcggtgcagatctagaggaccctgagttgaagcagggacccggaggcccgagcagccgccgccatgggaatcaaatttctggaagtcatcaagcccttctgtgtcatcctgccggaaattcagaagccagagaggaagattcagtttaaggagaaagtgctgtggaccgctatcaccctctttatcttcttagtgtgctgccagattcccctgtttgggatcatgtcttcagattcagctgaccctttctattggatgagagtgattctagcctctaacagaggcacattgatggagctagggatctctcctattgtcacgtctggccttataatgcaactcttggctggcgccaagataattgaagttggtgacaccccaaaagaccgagctctcttcaacggagcccaaaagttatttggcatgatcattactatcggccagtctatcgtgtatgtgatgaccgggatgtatggggacccttctgaaatgggtgctggaatttgcctgctaatcaccattcagctctttgttgctggcttaattgtcctacttttggatgaactcctgcaaaaaggatatggccttggctctggtatttctctcttcattgcaactaacatctgtgaaaccatcgtatggaaggcattcagccccactactgtcaacactggccgaggaatggaatttgaaggtgctatcatcgcacttttccatctgctggccacacgcacagacaaggtccgagcccttcgggaggcgttctaccgccagaatcttcccaacctcatgaatctcatcgccaccatctttgtctttgcagtggtcatctatttccagggcttccgagtggacctgccaatcaagtcggcccgctaccgtggccagtacaacacctatcccatcaagctcttctatacgtccaacatccccatcatcctgcagtctgccctggtgtccaacctttatgtcatctcccaaatgctctcagctcgcttcagtggcaacttgctggtcagcctgctgggcacctggtcggacacgtcttctgggggcccagcacgtgcttatccagttggtggcctttgctattacctgtcccctccagaatcttttggctccgtgttagaagacccggtccatgcagttgtatacatagtgttcatgctgggctcctgtgcattcttctccaaaacgtggattgaggtctcaggttcctctgccaaagatgttgcaaagcagctgaaggagcagcagatggtgatgagaggccaccgagagacctccatggtccatgaactcaaccggtacatccccacagccgcggcctttggtgggctgtgcatcggggccctctcggtcctggctgacttcctaggcgccattgggtctggaaccgggatcctgctcgcagtcacaatcatctaccagtactttgagatcttcgttaaggagcaaagcgaggttggcagcatgggggccctgctcttctgagcccgtctcccggacaggttgaggaagctgctccagaagcgcctcggaaggggagctctcatcatggcgcgtgctgctgcggcatatggacttttaataatgtttttgaatttcgtattctttcattccactgtgtaaagtgctagacattttccaatttaaaattttgctttttatcctggcactggcaaaaagaactgtgaaagtgaaattttattcagccgactgccagagaagtgggaatggtataggattgtccccaagtgtccatgtaacttttgttttaacctttgcaccttctcagtgctgtatgcggctgcagccgtctcacctgtttccccacaaagggaatttctcactctggttggaagcacaaacactgaaatgtctacgtttcattttggcagtagggtgtgaagctgggagcagatcatgtatttcccggagacgtgggaccttgctggcatgtctccttcacaatcaggcgtgggaatatctggcttaggactgtttctctctaagacaccattgttttcccttattttaaaagtgatttttttaaggacagaacttcttccaaaagagagggatggctttcccagaagacactcctggccatctgtggatttgtctgtgcacctattggctcttctagctgactcttctggttgggcttagagtctgcctgtttctgctagctccgtgtttagtccacttgggtcatcagctctgccaagctgagcctggccaagctaggtggacagacccttgcagtgatgtccgtttgtccagattctgccagtcatcactggacacgtctcctcgcagctgccctagcaaggggagacattgtggtagctatcagacatggacagaaactgacttagtgctcacaagcccctacaccttctgggctgaagatcacccagctgtgttcagaattttcttactgtgcttaggactgcacgcaagtgagcagacaccaccgacttcctttctgcgtcaccagtgtcgtcagcagagagaggacagcacaggctcaaggttggtagtgaagtcaggttcggggtgcatgggctgtggtggtgttgatcagttgctccagtgtttgaaataagaagactcatgtttatgtctggaataagttctgtttgtgctgacaggtggcctaggtcctggagatgagcaccctctctctggcctttagggagtcccctcttaggacaggcactgcccagcagcaagggcagcagagttgggtgctaagatcctgaggagctcgaggtttcgagctggctttagacattggtgggaccaaggatgttttgcaggatgccctgatcctaagaagggggcctgggggtgcgtgcagcctgtcggggagaccccactctgacagtgggcacacggcagcctgcaaagcacagggccaccgccacagcccggcagaggggcacactctggagaccttgctggcagtgctagccaggaaacagagtgaccaagggacaagaagggacttgcctaaagccacccagcaactcagcagcagaaccaagatgggccccaggctcctccatatggcccagggcttaccaccctatcacacgtggccttgtctagacccagtcctgagcaggggagaggctcttgagacctgatgccctcctacccacatggttctcccactgccctgtctgctctgctgctacagaggggcagggcctcccccagcccacgcttaggaatgcttggcctctggcaggcaggcagctgtacccaagctggtgggcagggggctggaaggcaccaggcctcaggaggagccccatagtcccgcctgcagcctgtaaccatcggctgggccctgcaaggcccacactcacgccctgtgggtgatggtcacggtgggtgggtgggggctgaccccagcttccaggggactgtcactgtggacgccaaaatggcataactgagataaggtgaataagtgacaaataaagccagttttttacaaggta

SEQ ID NO: 444414 - DNA, 2741 bp, Homo sapiens
ctgtgtttctgtgcagcaggctgaaatgaggcagtgaaggggatttggttctgtttggcttctcagggcttccgagtggacctgccaatcaagtcggcccgctaccgtggccagtacaacacctatcccatcaagctcttctatacgtccaacatccccatcatcctgcagtctgccctggtgtccaacctttatgtcatctcccaaatgctctcagctcgcttcagtggcaacttgctggtcagcctgctgggcacctggtcggacacgtcttctgggggcccagcacgtgcttatccagttggtggcctttgctattacctgtcccctccagaatcttttggctccgtgttagaagacccggtccatgcagttgtatacatagtgttcatgctgggctcctgtgcattcttctccaaaacgtggattgaggtctcaggttcctctgccaaagatgttgcaaagcagctgaaggagcagcagatggtgatgagaggccaccgagagacctccatggtccatgaactcaaccggtacatccccacagccgcggcctttggtgggctgtgcatcggggccctctcggtcctggctgacttcctaggcgccattgggtctggaaccgggatcctgctcgcagtcacaatcatctaccagtactttgagatcttcgttaaggagcaaagcgaggttggcagcatgggggccctgctcttctgagcccgtctcccggacaggttgaggaagctgctccagaagcgcctcggaaggggagctctcatcatggcgcgtgctgctgcggcatatggacttttaataatgtttttgaatttcgtattctttcattccactgtgtaaagtgctagacattttccaatttaaaattttgctttttatcctggcactggcaaaaagaactgtgaaagtgaaattttattcagccgactgccagagaagtgggaatggtataggattgtccccaagtgtccatgtaacttttgttttaacctttgcaccttctcagtgctgtatgcggctgcagccgtctcacctgtttccccacaaagggaatttctcactctggttggaagcacaaacactgaaatgtctacgtttcattttggcagtagggtgtgaagctgggagcagatcatgtatttcccggagacgtgggaccttgctggcatgtctccttcacaatcaggcgtgggaatatctggcttaggactgtttctctctaagacaccattgttttcccttattttaaaagtgatttttttaaggacagaacttcttccaaaagagagggatggctttcccagaagacactcctggccatctgtggatttgtctgtgcacctattggctcttctagctgactcttctggttgggcttagagtctgcctgtttctgctagctccgtgtttagtccacttgggtcatcagctctgccaagctgagcctggccaagctaggtggacagacccttgcagtgatgtccgtttgtccagattctgccagtcatcactggacacgtctcctcgcagctgccctagcaaggggagacattgtggtagctatcagacatggacagaaactgacttagtgctcacaagcccctacaccttctgggctgaagatcacccagctgtgttcagaattttcttactgtgcttaggactgcacgcaagtgagcagacaccaccgacttcctttctgcgtcaccagtgtcgtcagcagagagaggacagcacaggctcaaggttggtagtgaagtcaggttcggggtgcatgggctgtggtggtgttgatcagttgctccagtgtttgaaataagaagactcatgtttatgtctggaataagttctgtttgtgctgacaggtggcctaggtcctggagatgagcaccctctctctggcctttagggagtcccctcttaggacaggcactgcccagcagcaagggcagcagagttgggtgctaagatcctgaggagctcgaggtttcgagctggctttagacattggtgggaccaaggatgttttgcaggatgccctgatcctaagaagggggcctgggggtgcgtgcagcctgtcggggagaccccactctgacagtgggcacacggcagcctgcaaagcacagggccaccgccacagcccggcagaggggcacactctggagaccttgctggcagtgctagccaggaaacagagtgaccaagggacaagaagggacttgcctaaagccacccagcaactcagcagcagaaccaagatgggccccaggctcctccatatggcccagggcttaccaccctatcacacgtggccttgtctagacccagtcctgagcaggggagaggctcttgagacctgatgccctcctacccacatggttctcccactgccctgtctgctctgctgctacagaggggcagggcctcccccagcccacgcttaggaatgcttggcctctggcaggcaggcagctgtacccaagctggtgggcagggggctggaaggcaccaggcctcaggaggagccccatagtcccgcctgcagcctgtaaccatcggctgggccctgcaaggcccacactcacgccctgtgggtgatggtcacggtgggtgggtgggggctgaccccagcttccaggggactgtcactgtggacgccaaaatggcataactgagataaggtgaataagtgacaaataaagccagttttttacaaggta

SEQ ID NO: 444415 - DNA, 3675 bp, Homo sapiens
agcgatccgaggcccggccccggccccgccccgcgccgcgccgcgccgcttgccgccgggctagcactgacgtgtctctcggcggagctgctgtgcagtggaacgcgctgggccgcgggcagcgtcgcctcacgcggagcagagctgagctgaagcgggacccggagcccgagcagccgccgccatggcaatcaaatttctggaagtcatcaagcccttctgtgtcatcctgccggaaattcagaagccagagaggaagattcagtttaaggagaaagtgctgtggaccgctatcaccctctttatcttcttagtgtgctgccagattcccctgtttgggatcatgtcttcagattcagctgaccctttctattggatgagagtgattctagcctctaacagaggcacattgatggagctagggatctctcctattgtcacgtctggccttataatgcaactcttggctggcgccaagataattgaagttggtgacaccccaaaagaccgagctctcttcaacggagcccaaaagttatttggcatgatcattactatcggccagtctatcgtgtatgtgatgaccgggatgtatggggacccttctgaaatgggtgctggaatttgcctgctaatcaccattcagctctttgttgctggcttaattgtcctacttttggatgaactcctgcaaaaaggatatggccttggctctggtatttctctcttcattgcaactaacatctgtgaaaccatcgtatggaaggcattcagccccactactgtcaacactggccgaggaatggaatttgaaggtgctatcatcgcacttttccatctgctggccacacgcacagacaaggtccgagcccttcgggaggcgttctaccgccagaatcttcccaacctcatgaatctcatcgccaccatctttgtctttgcagtggtcatctatttccagggcttccgagtggacctgccaatcaagtcggcccgctaccgtggccagtacaacacctatcccatcaagctcttctatacgtccaacatccccatcatcctgcagtctgccctggtgtccaacctttatgtcatctcccaaatgctctcagctcgcttcagtggcaacttgctggtcagcctgctgggcacctggtcggacacgtcttctgggggcccagcacgtgcttatccagttggtggcctttgctattacctgtcccctccagaatcttttggctccgtgttagaagacccggtccatgcagttgtatacatagtgttcatgctgggctcctgtgcattcttctccaaaacgtggattgaggtctcaggttcctctgccaaagatgttgcaaagcagctgaaggagcagcagatggtgatgagaggccaccgagagacctccatggtccatgaactcaaccggtacatccccacagccgcggcctttggtgggctgtgcatcggggccctctcggtcctggctgacttcctaggcgccattgggtctggaaccgggatcctgctcgcagtcacaatcatctaccagtactttgagatcttcgttaaggagcaaagcgaggttggcagcatgggggccctgctcttctgagcccgtctcccggacaggttgaggaagctgctccagaagcgcctcggaaggggagctctcatcatggcgcgtgctgctgcggcatatggacttttaataatgtttttgaatttcgtattctttcattccactgtgtaaagtgctagacattttccaatttaaaattttgctttttatcctggcactggcaaaaagaactgtgaaagtgaaattttattcagccgactgccagagaagtgggaatggtataggattgtccccaagtgtccatgtaacttttgttttaacctttgcaccttctcagtgctgtatgcggctgcagccgtctcacctgtttccccacaaagggaatttctcactctggttggaagcacaaacactgaaatgtctacgtttcattttggcagtagggtgtgaagctgggagcagatcatgtatttcccggagacgtgggaccttgctggcatgtctccttcacaatcaggcgtgggaatatctggcttaggactgtttctctctaagacaccattgttttcccttattttaaaagtgatttttttaaggacagaacttcttccaaaagagagggatggctttcccagaagacactcctggccatctgtggatttgtctgtgcacctattggctcttctagctgactcttctggttgggcttagagtctgcctgtttctgctagctccgtgtttagtccacttgggtcatcagctctgccaagctgagcctggccaagctaggtggacagacccttgcagtgatgtccgtttgtccagattctgccagtcatcactggacacgtctcctcgcagctgccctagcaaggggagacattgtggtagctatcagacatggacagaaactgacttagtgctcacaagcccctacaccttctgggctgaagatcacccagctgtgttcagaattttcttactgtgcttaggactgcacgcaagtgagcagacaccaccgacttcctttctgcgtcaccagtgtcgtcagcagagagaggacagcacaggctcaaggttggtagtgaagtcaggttcggggtgcatgggctgtggtggtgttgatcagttgctccagtgtttgaaataagaagactcatgtttatgtctggaataagttctgtttgtgctgacaggtggcctaggtcctggagatgagcaccctctctctggcctttagggagtcccctcttaggacaggcactgcccagcagcaagggcagcagagttgggtgctaagatcctgaggagctcgaggtttcgagctggctttagacattggtgggaccaaggatgttttgcaggatgccctgatcctaagaagggggcctgggggtgcgtgcagcctgtcggggagaccccactctgacagtgggcacacggcagcctgcaaagcacagggccaccgccacagcccggcagaggggcacactctggagaccttgctggcagtgctagccaggaaacagagtgaccaagggacaagaagggacttgcctaaagccacccagcaactcagcagcagaaccaagatgggccccaggctcctccatatggcccagggcttaccaccctatcacacgtggccttgtctagacccagtcctgagcaggggagaggctcttgagacctgatgccctcctacccacatggttctcccactgccctgtctgctctgctgctacagaggggcagggcctcccccagcccacgcttaggaatgcttggcctctggcaggcaggcagctgtacccaagctggtgggcagggggctggaaggcaccaggcctcaggaggagccccatagtcccgcctgcagcctgtaaccatcggctgggccctgcaaggcccacactcacgccctgtgggtgatggtcacggtgggtgggtgggggctgaccccagcttccaggggactgtcactgtggacgccaaaatggcataactgagataaggtgaataagtgacaaataaagccagttttttacaaggtaaaaacaacaacaaaaaaccggggataagggggggggaag

SEQ ID NO: 444416 - DNA, 2431 bp, Homo sapiens
aagcaaaaatgatcatagtcggtgccggttgtgattccgtgttagaagacccggtccatgcagttgtatacatagtgttcatgctgggctcctgtgcattcttctccaaaacgtggattgaggtctcaggttcctctgccaaagatgttgcaaagcagctgaaggagcagcagatggtgatgagaggccaccgagagacctccatggtccatgaactcaaccggtacatccccacagccgcggcctttggtgggctgtgcatcggggccctctcggtcctggctgacttcctaggcgccattgggtctggaaccgggatcctgctcgcagtcacaatcatctaccagtactttgagatcttcgttaaggagcaaagcgaggttggcagcatgggggccctgctcttctgagcccgtctcccggacaggttgaggaagctgctccagaagcgcctcggaaggggagctctcatcatggcgcgtgctgctgcggcatatggacttttaataatgtttttgaatttcgtattctttcattccactgtgtaaagtgctagacattttccaatttaaaattttgctttttatcctggcactggcaaaaagaactgtgaaagtgaaattttattcagccgactgccagagaagtgggaatggtataggattgtccccaagtgtccatgtaacttttgttttaacctttgcaccttctcagtgctgtatgcggctgcagccgtctcacctgtttccccacaaagggaatttctcactctggttggaagcacaaacactgaaatgtctacgtttcattttggcagtagggtgtgaagctgggagcagatcatgtatttcccggagacgtgggaccttgctggcatgtctccttcacaatcaggcgtgggaatatctggcttaggactgtttctctctaagacaccattgttttcccttattttaaaagtgatttttttaaggacagaacttcttccaaaagagagggatggctttcccagaagacactcctggccatctgtggatttgtctgtgcacctattggctcttctagctgactcttctggttgggcttagagtctgcctgtttctgctagctccgtgtttagtccacttgggtcatcagctctgccaagctgagcctggccaagctaggtggacagacccttgcagtgatgtccgtttgtccagattctgccagtcatcactggacacgtctcctcgcagctgccctagcaaggggagacattgtggtagctatcagacatggacagaaactgacttagtgctcacaagcccctacaccttctgggctgaagatcacccagctgtgttcagaattttcttactgtgcttaggactgcacgcaagtgagcagacaccaccgacttcctttctgcgtcaccagtgtcgtcagcagagagaggacagcacaggctcaaggttggtagtgaagtcaggttcggggtgcatgggctgtggtggtgttgatcagttgctccagtgtttgaaataagaagactcatgtttatgtctggaataagttctgtttgtgctgacaggtggcctaggtcctggagatgagcaccctctctctggcctttagggagtcccctcttaggacaggcactgcccagcagcaagggcagcagagttgggtgctaagatcctgaggagctcgaggtttcgagctggctttagacattggtgggaccaaggatgttttgcaggatgccctgatcctaagaagggggcctgggggtgcgtgcagcctgtcggggagaccccactctgacagtgggcacacggcagcctgcaaagcacagggccaccgccacagcccggcagaggggcacactctggagaccttgctggcagtgctagccaggaaacagagtgaccaagggacaagaagggacttgcctaaagccacccagcaactcagcagcagaaccaagatgggccccaggctcctccatatggcccagggcttaccaccctatcacacgtggccttgtctagacccagtcctgagcaggggagaggctcttgagacctgatgccctcctacccacatggttctcccactgccctgtctgctctgctgctacagaggggcagggcctcccccagcccacgcttaggaatgcttggcctctggcaggcaggcagctgtacccaagctggtgggcagggggctggaaggcaccaggcctcaggaggagccccatagtcccgcctgcagcctgtaaccatcggctgggccctgcaaggcccacactcacgccctgtgggtgatggtcacggtgggtgggtgggggctgaccccagcttccaggggactgtcactgtggacgccaaaatggcataactgagataaggtgaataagtgacaaataaagccagttttttacaaggta

SEQ ID NO: 444417 - DNA, 2321 bp, Homo sapiens
agcagaggggcctttgaggcattaggtcccaaagtctcaggtgagcctgttggccgcctggctcacggggagctctgtgggtgtccaggagctgactgtgtcccctcccccaggtacatccccacagccgcggcctttggtgggctgtgcatcggggccctctcggtcctggctgacttcctaggcgccattgggtctggaaccgggatcctgctcgcagtcacaatcatctaccagtactttgagatcttcgttaaggagcaaagcgaggttggcagcatgggggccctgctcttctgagcccgtctcccggacaggttgaggaagctgctccagaagcgcctcggaaggggagctctcatcatggcgcgtgctgctgcggcatatggacttttaataatgtttttgaatttcgtattctttcattccactgtgtaaagtgctagacattttccaatttaaaattttgctttttatcctggcactggcaaaaagaactgtgaaagtgaaattttattcagccgactgccagagaagtgggaatggtataggattgtccccaagtgtccatgtaacttttgttttaacctttgcaccttctcagtgctgtatgcggctgcagccgtctcacctgtttccccacaaagggaatttctcactctggttggaagcacaaacactgaaatgtctacgtttcattttggcagtagggtgtgaagctgggagcagatcatgtatttcccggagacgtgggaccttgctggcatgtctccttcacaatcaggcgtgggaatatctggcttaggactgtttctctctaagacaccattgttttcccttattttaaaagtgatttttttaaggacagaacttcttccaaaagagagggatggctttcccagaagacactcctggccatctgtggatttgtctgtgcacctattggctcttctagctgactcttctggttgggcttagagtctgcctgtttctgctagctccgtgtttagtccacttgggtcatcagctctgccaagctgagcctggccaagctaggtggacagacccttgcagtgatgtccgtttgtccagattctgccagtcatcactggacacgtctcctcgcagctgccctagcaaggggagacattgtggtagctatcagacatggacagaaactgacttagtgctcacaagcccctacaccttctgggctgaagatcacccagctgtgttcagaattttcttactgtgcttaggactgcacgcaagtgagcagacaccaccgacttcctttctgcgtcaccagtgtcgtcagcagagagaggacagcacaggctcaaggttggtagtgaagtcaggttcggggtgcatgggctgtggtggtgttgatcagttgctccagtgtttgaaataagaagactcatgtttatgtctggaataagttctgtttgtgctgacaggtggcctaggtcctggagatgagcaccctctctctggcctttagggagtcccctcttaggacaggcactgcccagcagcaagggcagcagagttgggtgctaagatcctgaggagctcgaggtttcgagctggctttagacattggtgggaccaaggatgttttgcaggatgccctgatcctaagaagggggcctgggggtgcgtgcagcctgtcggggagaccccactctgacagtgggcacacggcagcctgcaaagcacagggccaccgccacagcccggcagaggggcacactctggagaccttgctggcagtgctagccaggaaacagagtgaccaagggacaagaagggacttgcctaaagccacccagcaactcagcagcagaaccaagatgggccccaggctcctccatatggcccagggcttaccaccctatcacacgtggccttgtctagacccagtcctgagcaggggagaggctcttgagacctgatgccctcctacccacatggttctcccactgccctgtctgctctgctgctacagaggggcagggcctcccccagcccacgcttaggaatgcttggcctctggcaggcaggcagctgtacccaagctggtgggcagggggctggaaggcaccaggcctcaggaggagccccatagtcccgcctgcagcctgtaaccatcggctgggccctgcaaggcccacactcacgccctgtgggtgatggtcacggtgggtgggtgggggctgaccccagcttccaggggactgtcactgtggacgccaaaatggcataactgagataaggtgaataagtgacaaataaagccagttttttacaaggta

SEQ ID NO: 444418 - DNA, 3360 bp, Homo sapiens
agcgatccgaggcccggccccggccccgccccgcgccgcgccgcgccgcttgccgccgggctagcactgacgtgtctctcggcggagctgctgtgcagtggaacgcgctgggccgcgggcagcgtcgcctcacgcggagcagagctgagctgaagcgggacccggagcccgagcagccgccgccatggcaatcaaatttctggaagtcatcaagcccttctgtgtcatcctgccggaaattcagaagccagagaggaagattcagtttaaggagaaagtgctgtggaccgctatcaccctctttatcttcttagtgtgctgccagattcccctgtttgggatcatgtcttcagattcagctgaccctttctattggatgagagtgattctagcctctaacagaggcacattgatggagctagggatctctcctattgtcacgtctggccttataatgcaactcttggctggcgccaagataattgaagttggtgacaccccaaaagaccgagctctcttcaacggagcccaaaagttatttggcatgatcattactatcggccagtctatcgtgtatgtgatgaccgggatgtatggggacccttctgaaatgggtgctggaatttgcctgctaatcaccattcagctctttgttgctggcttaattgtcctacttttggatgaactcctgcaaaaaggatatggccttggctctggtatttctctcttcattgcaactaacatctgtgaaaccatcgtatggaaggcattcagccccactactgtcaacactggccgaggaatggaatttgaaggtgctatcatcgcacttttccatctgctggccacacgcacagacaaggtccgagcccttcgggaggcgttctaccgccagaatcttcccaacctcatgaatctcatcgccaccatctttgtctttgcagtggtcatctatttccagggcttccgagtggacctgccaatcaagtcggcccgctaccgtggccagtacaacacctatcccatcaagctcttctatacgtccaacatccccatcatcctgcagtctgccctggtgtccaacctttatgtcatctcccaaatgctctcagctcgcttcagtggcaacttgctggtcagcctgctgggcacctggtcggacacgtcttctgggggcccagcacgtgcttatccagttggtggcctttgctattacctgtcccctccagaatcttttggctccgtgttagaagacccggtccatgcagttgtatacatagtgttcatgctgggctcctgtgcattcttctccaaaacgtggattgaggtctcaggttcctctgccaaagatgttgcaaagcagctgaaggagcagcagatggtgatgagaggccaccgagagacctccatggtccatgaactcaaccggtacatccccacagccgcggcctttggtgggctgtgcatcggggccctctcggtcctggctgacttcctaggcgccattgggtctggaaccgggatcctgctcgcagtcacaatcatctaccagtactttgagatcttcgttaaggagcaaagcgaggttggcagcatgggggccctgctcttctgagcccgtctcccggacaggttgaggaagctgctccagaagcgcctcggaaggggagctctcatcatggcgcgtgctgctgcggcatatggacttttaataatgtttttgaatttcgtattctttcattccactgtgtaaagtgctagacattttccaatttaaaattttgctttttatcctggcactggcaaaaagaactgtgaaagtgaaattttattcagccgactgccagagaagtgggaatggtataggattgtccccaagtgtccatgtaacttttgttttaacctttgcaccttctcagtgctgtatgcggctgcagccgtctcacctgtttccccacaaagggaatttctcactctggttggaagcacaaacactgaaatgtctacgtttcattttggcagtagggtgtgaagctgggagcagatcatgtatttcccggagacgtgggaccttgctggcatgtctccttcacaatcaggcgtgggaatatctggcttaggactgtttctctctaagacaccattgttttcccttattttaaaagtgatttttttaaggacagaacttcttccaaaagagagggatggctttcccagaagacactcctggccatctgtggatttgtctgtgcacctattggctcttctagctgactcttctggttgggcttagagtctgcctgtttctgctagctccgtgtttagtccacttgggtcatcagctctgccaagctgagcctggccaagctaggtggacagacccttgcagtgatgtccgtttgtccagattctgccagtcatcactggacacgtctcctcgcagctgccctagcaaggggagacattgtggtagctatcagacatggacagaaactgacttagtgctcacaagcccctacaccttctgggctgaagatcacccagctgtgttcagaattttcttactgtgcttaggactgcacgcaagtgagcagacaccaccgacttcctttctgcgtcaccagtgtcgtcagcagagagaggacagcacaggctcaaggttggtagtgaagtcaggttcggggtgcatgggctgtggtggtgttgatcagttgctccagtgtttgaaataagaagactcatgtttatgtctggaataagttctgtttgtgctgacaggtggcctaggtcctggagatgagcaccctctctctggcctttagggagtcccctcttaggacaggcactgcccagcagcaagggcagcagagttgggtgctaagatcctgaggagctcgaggtttcgagctggctttagacattggtgggaccaaggatgttttgcaggatgccctgatcctaagaagggggcctgggggtgcgtgcagcctgtcggggagaccccactctgacagtgggcacacggcagcctgcaaagcacagggccaccgccacagcccggcagaggggcacactctggagaccttgctggcagtgctagccaggaaacagagtgaccaagggacaagaagggacttgcctaaagccacccagcaactcagcagcagaaccaagatgggccccaggctcctccatatggcccagggcttaccaccccacactcacgccctgtgggtgatggtcacggtgggtgggtgggggctgaccccagcttccaggggactgtcactgtggacgccaaaatggcataactgagataaggtgaataagtgacaaataaagccagttttttacaaggta

SEQ ID NO: 444419 - DNA, 1825 bp, Homo sapiens
tacgaggacgtcggaagggaaaaaaaaattggtaggacgaggctggggttgaatcggccgaggccaagtgtccatgtaacttttgttttaacctttgcaccttctcagtgctgtatgcggctgcagccgtctcacctgtttccccacaaagggaatttctcactctggttggaagcacaaacactgaaatgtctacgtttcattttggcagtagggtgtgaagctgggagcagatcatgtatttcccggagacgtgggaccttgctggcatgtctccttcacaatcaggcgtgggaatatctggcttaggactgtttctctctaagacaccattgttttcccttattttaaaagtgatttttttaaggacagaacttcttccaaaagagagggatggctttcccagaagacactcctggccatctgtggatttgtctgtgcacctattggctcttctagctgactcttctggttgggcttagagtctgcctgtttctgctagctccgtgtttagtccacttgggtcatcagctctgccaagctgagcctggccaagctaggtggacagacccttgcagtgatgtccgtttgtccagattctgccagtcatcactggacacgtctcctcgcagctgccctagcaaggggagacattgtggtagctatcagacatggacagaaactgacttagtgctcacaagcccctacaccttctgggctgaagatcacccagctgtgttcagaattttcttactgtgcttaggactgcacgcaagtgagcagacaccaccgacttcctttctgcgtcaccagtgtcgtcagcagagagaggacagcacaggctcaaggttggtagtgaagtcaggttcggggtgcatgggctgtggtggtgttgatcagttgctccagtgtttgaaataagaagactcatgtttatgtctggaataagttctgtttgtgctgacaggtggcctaggtcctggagatgagcaccctctctctggcctttagggagtcccctcttaggacaggcactgcccagcagcaagggcagcagagttgggtgctaagatcctgaggagctcgaggtttcgagctggctttagacattggtgggaccaaggatgttttgcaggatgccctgatcctaagaagggggcctgggggtgcgtgcagcctgtcggggagaccccactctgacagtgggcacacggcagcctgcaaagcacagggccaccgccacagcccggcagaggggcacactctggagaccttgctggcagtgctagccaggaaacagagtgaccaagggacaagaagggacttgcctaaagccacccagcaactcagcagcagaaccaagatgggccccaggctcctccatatggcccagggcttaccaccctatcacacgtggccttgtctagacccagtcctgagcaggggagaggctcttgagacctgatgccctcctacccacatggttctcccactgccctgtctgctctgctgctacagaggggcagggcctcccccagcccacgcttaggaatgcttggcctctggcaggcaggcagctgtacccaagctggtgggcagggggctggaaggcaccaggcctcaggaggagccccatagtcccgcctgcagcctgtaaccatcggctgggccctgcaaggcccacactcacgccctgtgggtgatggtcacggtgggtgggtgggggctgaccccagcttccaggggactgtcactgtggacgccaaaatggcataactgagataaggtgaataagtgacaaataaagccagttttttacaaggta

SEQ ID NO: 444420 - DNA, 3111 bp, Homo sapiens
agcgatccgaggcccggccccggccccgccccgcgccgcgccgcgccgcttgccgccgggctagcactgacgtgtctctcggcggagctgctgtgcagtggaacgcgctgggccgcgggcagcgtcgcctcacgcggagcagagctgagctgaagcgggacccggagcccgagcagccgccgccatggcaatcaaatttctggaagtcatcaagcccttctgtgtcatcctgccggaaattcagaagccagagaggaagattcagtttaaggagaaagtgctgtggaccgctatcaccctctttatcttcttagtgtgctgccagattcccctgtttgggatcatgtcttcagattcagctgaccctttctattggatgagagtgattctagcctctaacagaggcacattgatggagctagggatctctcctattgtcacgtctggccttataatgcaactcttggctggcgccaagataattgaagttggtgacaccccaaaagaccgagctctcttcaacggagcccaaaagttatttggcatgatcattactatcggccagtctatcgtgtatgtgatgaccgggatgtatggggacccttctgaaatgggtgctggaatttgcctgctaatcaccattcagctctttgttgctggcttaattgtcctacttttggatgaactcctgcaaaaaggatatggccttggctctggtatttctctcttcattgcaactaacatctgtgaaaccatcgtatggaaggcattcagccccactactgtcaacactggccgaggaatggaatttgaaggtgctatcatcgcacttttccatctgctggccacacgcacagacaaggtccgagcccttcgggaggcgttctaccgccagaatcttcccaacctcatgaatctcatcgccaccatctttgtctttgcagtggtcatctatttccagggcttccgagtggacctgccaatcaagtcggcccgctaccgtggccagtacaacacctatcccatcaagctcttctatacgtccaacatccccatcatcctgcagtctgccctggtgtccaacctttatgtcatctcccaaatgctctcagctcgcttcagtggcaacttgctggtcagcctgctgggcacctggtcggacacgtcttctgggggcccagcacgtgcttatccagttggtggcctttgctattacctgtcccctccagaatcttttggctccgtgttagaagacccggtccatgcagttgtatacatagtgttcatgctgggctcctgtgcattcttctccaaaacgtggattgaggtctcaggttcctctgccaaagatgttgcaaagcagctgaaggagcagcagatggtgatgagaggccaccgagagacctccatggtccatgaactcaaccggtacatccccacagccgcggcctttggtgggctgtgcatcggggccctctcggtcctggctgacttcctaggcgccattgggtctggaaccgggatcctgctcgcagtcacaatcatctaccagtactttgagatcttcgttaaggagcaaagcgaggttggcagcatgggggccctgctcttctgagcccgtctcccggacaggttgaggaagctgctccagaagcgcctcggaaggggagctctcatcatggcgcgtgctgctgcggcatatggacttttaataatgtttttgaatttcgtattctttcattccactgtgtaaagtgctagacattttccaatttaaaattttgctttttatcctggcactggcaaaaagaactgtgaaagtgaaattttattcagccgactgccagagaagtgggaatggtataggattgtccccaagtgtccatgtaacttttgttttaacctttgcaccttctcagtgctgtatgcggctgcagccgtctcacctgtttccccacaaagggaatttctcactctggttggaagcacaaacactgaaatgtctacgtttcattttggcagtagggtgtgaagctgggagcagatcatgtatttcccggagacgtgggaccttgctggcatgtctccttcacaatcaggcgtgggaatatctggcttaggactgtttctctctaagacaccattgttttcccttattttaaaagtgatttttttaaggacagaacttcttccaaaagagagggatggctttcccagaagacactcctggccatctgtggatttgtctgtgcacctattggctcttctagctgactcttctggttgggcttagagtctgcctgtttctgctagctccgtgtttagtccacttgggtcatcagctctgccaagctgagcctggccaagctaggtggacagacccttgcagtgatgtccgtttgtccagattctgccagtcatcactggacacgtctcctcgcagctgccctagcaaggggagacattgtggtagctatcagacatggacagaaactgacttagtgctcacaagcccctacaccttctgggctgaagatcacccagctgtgttcagaattttcttactgtgcttaggactgcacgcaagtgagcagacaccaccgacttcctttctgcgtcaccagtgtcgtcagcagagagaggacagcacaggctcaaggttggtagtgaagtcaggttcggggtgcatgggctgtggtggtgttgatcagttacccagtcctgagcaggggagaggctcttgagacctgatgccctcctacccacatggttctcccactgccctgtctgctctgctgctacagaggggcagggcctcccccagcccacgcttaggaatgcttggcctctggcaggcaggcagctgtacccaagctggtgggcagggggctggaaggcaccaggcctcaggaggagccccatagtcccgcctgcagcctgtaaccatcggctgggccctgcaaggcccacactcacgccctgtgggtgatggtcacggtgggtgggtgggggctgaccccagcttccaggggactgtcactgtggacgccaaaatggcataactgagataaggtgaataagtgacaaataaagccagttttttacaaggta

SEQ ID NO: 444421 - DNA, 1508 bp, Homo sapiens
cccacgcgtccgcggacgcgtgggcttattttaaaagtgatttttttaaggacagaacttcttccaaaagagagggatggctttcccagaagacactcctggccatctgtggatttgtctgtgcacctattggctcttctagctgactcttctggttgggcttagagtctgcctgtttctgctagctccgtgtttagtccacttgggtcatcagctctgccaagctgagcctggccaagctaggtggacagacccttgcagtgatgtccgtttgtccagattctgccagtcatcactggacacgtctcctcgcagctgccctagcaaggggagacattgtggtagctatcagacatggacagaaactgacttagtgctcacaagcccctacaccttctgggctgaagatcacccagctgtgttcagaattttcttactgtgcttaggactgcacgcaagtgagcagacaccaccgacttcctttctgcgtcaccagtgtcgtcagcagagagaggacagcacaggctcaaggttggtagtgaagtcaggttcggggtgcatgggctgtggtggtgttgatcagttgctccagtgtttgaaataagaagactcatgtttatgtctggaataagttctgtttgtgctgacaggtggcctaggtcctggagatgagcaccctctctctggcctttagggagtcccctcttaggacaggcactgcccagcagcaagggcagcagagttgggtgctaagatcctgaggagctcgaggtttcgagctggctttagacattggtgggaccaaggatgttttgcaggatgccctgatcctaagaagggggcctgggggtgcgtgcagcctgtcggggagaccccactctgacagtgggcacacggcagcctgcaaagcacagggccaccgccacagcccggcagaggggcacactctggagaccttgctggcagtgctagccaggaaacagagtgaccaagggacaagaagggacttgcctaaagccacccagcaactcagcagcagaaccaagatgggccccaggctcctccatatggcccagggcttaccaccctatcacacgtggccttgtctagacccagtcctgagcaggggagaggctcttgagacctgatgccctcctacccacatggttctcccactgccctgtctgctctgctgctacagaggggcagggcctcccccagcccacgcttaggaatgcttggcctctggcaggcaggcagctgtacccaagctggtgggcagggggctggaaggcaccaggcctcaggaggagccccatagtcccgcctgcagcctgtaaccatcggctgggccctgcaaggcccacactcacgccctgtgggtgatggtcacggtgggtgggtgggggctgaccccagcttccaggggactgtcactgtggacgccaaaatggcataactgagataaggtgaataagtgacaaataaagccagttttttacaaggta

SEQ ID NO: 444422 - DNA, 1389 bp, Homo sapiens
cgtccttcatcatacctgcccatgccagagttctgggcccagaactgctccaggaagcccttattcatgggccattcccacgcatcagattggcatgcaaagaatccccgctgacattttataagcaggttcctgaattacgagtttgaaattttttttttttttttggctaggtatgatgaaggaccgtccttcatcatacctacaaggggagacattgtggtagctatcagacatggacagaaactgacttagtgctcacaagcccctacaccttctgggctgaagatcacccagctgtgttcagaattttcttactgtgcttaggactgcacgcaagtgagcagacaccaccgacttcctttctgcgtcaccagtgtcgtcagcagagagaggacagcacaggctcaaggttggtagtgaagtcaggttcggggtgcatgggctgtggtggtgttgatcagttgctccagtgtttgaaataagaagactcatgtttatgtctggaataagttctgtttgtgctgacaggtggcctaggtcctggagatgagcaccctctctctggcctttagggagtcccctcttaggacaggcactgcccagcagcaagggcagcagagttgggtgctaagatcctgaggagctcgaggtttcgagctggctttagacattggtgggaccaaggatgttttgcaggatgccctgatcctaagaagggggcctgggggtgcgtgcagcctgtcggggagaccccactctgacagtgggcacacggcagcctgcaaagcacagggccaccgccacagcccggcagaggggcacactctggagaccttgctggcagtgctagccaggaaacagagtgaccaagggacaagaagggacttgcctaaagccacccagcaactcagcagcagaaccaagatgggccccaggctcctccatatggcccagggcttaccaccctatcacacgtggccttgtctagacccagtcctgagcaggggagaggctcttgagacctgatgccctcctacccacatggttctcccactgccctgtctgctctgctgctacagaggggcagggcctcccccagcccacgcttaggaatgcttggcctctggcaggcaggcagctgtacccaagctggtgggcagggggctggaaggcaccaggcctcaggaggagccccatagtcccgcctgcagcctgtaaccatcggctgggccctgcaaggcccacactcacgccctgtgggtgatggtcacggtgggtgggtgggggctgaccccagcttccaggggactgtcactgtggacgccaaaatggcataactgagataaggtgaataagtgacaaataaagccagttttttacaaggta

SEQ ID NO: 444423 - DNA, 2349 bp, Homo sapiens
agcgatccgaggcccggccccggccccgccccgcgccgcgccgcgccgcttgccgccgggctagcactgacgtgtctctcggcggagctgctgtgcagtggaacgcgctgggccgcgggcagcgtcgcctcacgcggagcagagctgagctgaagcgggacccggagcccgagcagccgccgccatggcaatcaaatttctggaagtcatcaagcccttctgtgtcatcctgccggaaattcagaagccagagaggaagattcagtttaaggagaaagtgctgtggaccgctatcaccctctttatcttcttagtgtgctgccagattcccctgtttgggatcatgtcttcagattcagctgaccctttctattggatgagagtgattctagcctctaacagaggcacattgatggagctagggatctctcctattgtcacgtctggccttataatgcaactcttggctggcgccaagataattgaagttggtgacaccccaaaagaccgagctctcttcaacggagcccaaaagttatttggcatgatcattactatcggccagtctatcgtgtatgtgatgaccgggatgtatggggacccttctgaaatgggtgctggaatttgcctgctaatcaccattcagctctttgttgctggcttaattgtcctacttttggatgaactcctgcaaaaaggatatggccttggctctggtatttctctcttcattgcaactaacatctgtgaaaccatcgtatggaaggcattcagccccactactgtcaacactggccgaggaatggaatttgaaggtgctatcatcgcacttttccatctgctggccacacgcacagacaaggtccgagcccttcgggaggcgttctaccgccagaatcttcccaacctcatgaatctcatcgccaccatctttgtctttgcagtggtcatctatttccagggcttccgagtggacctgccaatcaagtcggcccgctaccgtggccagtacaacacctatcccatcaagctcttctatacgtccaacatccccatcatcctgcagtctgccctggtgtccaacctttatgtcatctcccaaatgctctcagctcgcttcagtggcaacttgctggtcagcctgctgggcacctggtcggacacgtcttctgggggcccagcacgtgcttatccagttggtggcctttgctattacctgtcccctccagaatcttttggctccgtgttagaagacccggtccatgcagttgtatacatagtgttcatgctgggctcctgtgcattcttctccaaaacgtggattgaggtctcaggttcctctgccaaagatgttgcaaagcagctgaaggagcagcagatggtgatgagaggccaccgagagacctccatggtccatgaactcaaccggtacatccccacagccgcggcctttggtgggctgtgcatcggggccctctcggtcctggctgacttcctaggcgccattgggtctggaaccgggatcctgctcgcagtcacaatcatctaccagtactttgagatcttcgttaaggagcaaagcgaggttggcagcatgggggccctgctcttctgagcccgtctcccggacaggttgaggaagctgctccagaagcgcctcggaaggggagctctcatcatggcgcgtgctgctgcggcatatggacttttaataatgtttttgaatttcgtattctttcattccactgtgtaaagtgctagacattttccaatttaaaattttgctttttatcctggcactggcaaaaagaactgtgaaagtgaaattttattcagccgactgccagagaagtgggaatggtataggattgtccccaagtgtccatgtaacttttgttttaacctttgcaccttctcagtgctgtatgcggctgcagccgtctcacctgtttccccacaaagggaatttctcactctggttggaagcacaaacactgaaatgtctacgtttcattttggcagtagggtgtgaagctgggagcagatcatgtatttcccggagacgtgggaccttgctggcatgtctccttcacaatcaggcgtgggaatatctggcttaggactgtttctctctaagacaccattgttttcccttattttaaaagtgatttttttaaggacagaacttcttccaaaagagagggatggctttcccagaagacactcctggccatctgtggatttgtctgtgcacctattggccaggctcagcttggcagagctgatgacccatgtgaactaaacacggagctagcagaaacaggcagactctaagcccaaccagaagag

SEQ ID NO: 444424 - DNA, 1779 bp, Homo sapiens
agcgatccgaggcccggccccggccccgccccgcgccgcgccgcgccgcttgccgccgggctagcactgacgtgtctctcggcggagctgctgtgcagtggaacgcgctgggccgcgggcagcgtcgcctcacgcggagcagagctgagctgaagcgggacccggagcccgagcagccgccgccatggcaatcaaatttctggaagtcatcaagcccttctgtgtcatcctgccggaaattcagaagccagagaggaagattcagtttaaggagaaagtgctgtggaccgctatcaccctctttatcttcttagtgtgctgccagattcccctgtttgggatcatgtcttcagattcagctgaccctttctattggatgagagtgattctagcctctaacagaggcacattgatggagctagggatctctcctattgtcacgtctggccttataatgcaactcttggctggcgccaagataattgaagttggtgacaccccaaaagaccgagctctcttcaacggagcccaaaagttatttggcatgatcattactatcggccagtctatcgtgtatgtgatgaccgggatgtatggggacccttctgaaatgggtgctggaatttgcctgctaatcaccattcagctctttgttgctggcttaattgtcctacttttggatgaactcctgcaaaaaggatatggccttggctctggtatttctctcttcattgcaactaacatctgtgaaaccatcgtatggaaggcattcagccccactactgtcaacactggccgaggaatggaatttgaaggtgctatcatcgcacttttccatctgctggccacacgcacagacaaggtccgagcccttcgggaggcgttctaccgccagaatcttcccaacctcatgaatctcatcgccaccatctttgtctttgcagtggtcatctatttccaggtgtgtccagatccaaccccagggagtttccatggtctggatttaagtttcagaatgccttgtgtgcagtcccccactctgtggggtgcactgtcatcatattgtgttgaaacgatgagatggtatttgaaggcagcaggtttccagatgagctggacaagcatgttcattgagtcatgggacctgccaggctgtggtgagagtttgggccagaggtgatggtgccagatacagctgtacccttggagatggagcagttaggtaaggaagggcaaagtccaggtgaccttagatgctgccacagcactcttcagtctgcacagtcctcagtacaactactcatctcttccatcgtcactcagaagcagccacagacagacaacagacaaatgagcatggccgtgttcctacaaagctggctacaaagtcagctgcagaccaggttgtcctatgggccttacctaaaggaagcaaccacaggaaaagccagaattgcaaacttcagatcattttctaatccctagcagggatggtaggcaatttagttcattctcttaatattaagctgctggatttacagcactgtgcagtagaagtagaattcaagtcacatgtagtttttaaaatttctagaagtcacattaaaaaagtaaaaagaaacaggtgaaattaaatttaatatatttaacctagtatatccaaagtatcatttcaacattataattaatgttaagatgacatctcagtttggtctagtcacagtcccctggccacgtgtggccagtgtggccactgcctggacagcagcgccttggcct

SEQ ID NO: 444425 - DNA, 1558 bp, Homo sapiens
agcgatccgaggcccggccccggccccgccccgcgccgcgccgcgccgcttgccgccgggctagcactgacgtgtctctcggcggagctgctgtgcagtggaacgcgctgggccgcgggcagcgtcgcctcacgcggagcagagctgagctgaagcgggacccggagcccgagcagccgccgccatggcaatcaaatttctggaagtcatcaagcccttctgtgtcatcctgccggaaattcagaagccagagaggaagattcagtttaaggagaaagtgctgtggaccgctatcaccctctttatcttcttagtgtgctgccagattcccctgtttgggatcatgtcttcagattcagctgaccctttctattggatgagagtgattctagcctctaacagaggcacattgatggagctagggatctctcctattgtcacgtctggccttataatgcaactcttggctggcgccaagataattgaagttggtgacaccccaaaagaccgagctctcttcaacggagcccaaaagttatttggcatgatcattactatcggccagtctatcgtgtatgtgatgaccgggatgtatggggacccttctgaaatgggtgctggaatttgcctgctaatcaccattcagctctttgttgctggcttaattgtcctacttttggatgaactcctgcaaaaaggatatggccttggctctggtatttctctcttcattgcaactaacatctgtgaaaccatcgtatggaaggcattcagccccactactgtcaacactggccgaggaatggaatttgaaggtgctatcatcgcacttttccatctgctggccacacgcacagacaaggtccgagcccttcgggaggcgttctaccgccagaatcttcccaacctcatgaatctcatcgccaccatctttgtctttgcagtggtcatctatttccaggtgtgtccagatccaaccccagggagtttccatggtctggatttaagtttcagaatgccttgtgtgcagtcccccactctgtggggtgcactgtcatcatattgtgttgaaacgatgagatggtatttgaaggcagcaggtttccagatgagctggacaagcatgttcattgagtcatgggacctgccattaacgaaacaaaattaaggcagttctaacgtaagtgaaatcatgttcttctgggttgggcctatcgacaggtaagatacatttttaagttcttagttcaagagaagcaaaaagtactctagctctgaaacctcattgctctcttatagaaagtttgtatgatatttataggtaacttctgcatctcggaaacggcctatcttcttaagctgtcttacctttaaaagtattccatctcttaaacttgcttctgagtaagagacctgaactgctattgttttcctgtaattggattgatctttgtattttttgatggtccactttgtattttggtgtttatttaaaagaagggacagagatgaaaggcagtttgatgtttgtgaaaggtatttatacgagctacatgct

SEQ ID NO: 444426 - DNA, 1713 bp, Homo sapiens
  misc_feature (1654)..(1654): n is a, c, g, or t
  misc_feature (1686)..(1686): n is a, c, g, or t
  misc_feature (1690)..(1690): n is a, c, g, or t
  misc_feature (1694)..(1694): n is a, c, g, or t
agcgatccgaggcccggccccggccccgccccgcgccgcgccgcgccgcttgccgccgggctagcactgacgtgtctctcggcggagctgctgtgcagtggaacgcgctgggccgcgggcagcgtcgcctcacgcggagcagagctgagctgaagcgggacccggagcccgagcagccgccgccatggcaatcaaatttctggaagtcatcaagcccttctgtgtcatcctgccggaaattcagaagccagagaggaagattcagtttaaggagaaagtgctgtggaccgctatcaccctctttatcttcttagtgtgctgccagattcccctgtttgggatcatgtcttcagattcagctgaccctttctattggatgagagtgattctagcctctaacagaggcacattgatggagctagggatctctcctattgtcacgtctggccttataatgcaactcttggctggcgccaagataattgaagttggtgacaccccaaaagaccgagctctcttcaacggagcccaaaagttatttggcatgatcattactatcggccagtctatcgtgtatgtgatgaccgggatgtatggggacccttctgaaatgggtgctggaatttgcctgctaatcaccattcagctctttgttgctggcttaattgtcctacttttggatgaactcctgcaaaaaggatatggccttggctctggtatttctctcttcattgcaactaacatctgtgaaaccatcgtatggaaggcattcagccccactactgtcaacactggccgaggaatggaatttgaaggtgctatcatcgcacttttccatctgctggccacacgcacagacaaggtccgagcccttcgggaggcgttctaccgccagaatcttcccaacctcatgaatctcatcgccaccatctttgtctttgcagtggtcatctatttccaggtgtgtccagatccaaccccagggagtttccatggtctggatttaagtttcagaatgccttgtgtgcagtcccccactctgtggggtgcactgtcatcatattgtgttgaaacgatgagatggtatttgaaggcagcaggtttccagatgagctggacaagcatgttcattgagtcatgggacctgtttcatttcctgtggagtatacagcatggtccggattatcatcactcggtccagaaggtcaagagggatgccgtgaggggatgtgatgtcctcagtgcctctgatgacacagttgcctcggttggatgcaaagatgacgatgggagcgatagaagactccagggcgcggtgcaggtaggtgaagcactcaatgtccagcatgtggacctcatcaacaaacagcacacccgggaccagctcagcaatgccctggtcgatgtacttgttcaccaccttattaatctcccctcgaagtttgtctgtgatttctgtcttctttggcttcattagctggcccatcatggacaggatatcttgtcccccctggggccgcgcattagccacatccaagtcatgcaaggtcacatcttggatgatttctttctttttgtgcacatccccttttggcaaggggacatactcttcagcttcaaggtcgaattctgtggcataggtatcacacctgcnctgcctcttcacggccccactgttggcttcantgtnaatnacatctccagcttctactc

SEQ ID NO: 444427 - DNA, 763 bp, Homo sapiens
tggctgggcacggaaggggttgatgtgcatctgaagcagggcagaagggatggagcctgcagtctcttaggaaggtcagtgctaatacatgaaaccacgctagagagggagagggggaggccacatacctgccaggctgtggtgagagtttgggccagaggtgatggtgccagatacagctgtacccttggagatggagcagttaggtaaggaagggcaaagtccaggtgaccttagatgctgccacagcactcttcagtctgcacagtcctcagtacaactactcatctcttccatcgtcactcagaagcagccacagacagacaacagacaaatgagcatggccgtgttcctacaaagctggctacaaagtcagctgcagaccaggttgtcctatgggccttacctaaaggaagcaaccacaggaaaagccagaattgcaaacttcagatcattttctaatccctagcagggatggtaggcaatttagttcattctcttaatattaagctgctggatttacagcactgtgcagtagaagtagaattcaagtcacatgtagtttttaaaatttctagaagtcacattaaaaaagtaaaaagaaacaggtgaaattaaatttaatatatttaacctagtatatccaaagtatcatttcaacattataattaatgttaagatgacatctcagtttggtctagtcacagtcccctggccacgtgtggccagtgtggccactgcctggacagcagcgccttggcct

SEQ ID NO: 444428 - DNA, 399 bp, Homo sapiens
cctgtgcattcttctccaaaacgtggattgaggtctcaggttcctctgccaaagatgtaagtagaagcaaaactttctggaagggtgatgaaagtgtgactggtataaggggtgtggacttgtcacctcatcataaataatggtctgtgacgtgtgcagatagatcgtcgtcctttagggggcagttcagaagctttaagggctgacagatggagtccagcagtagatcagctgtgggtatgagaatctgaatccacactgtaaagttagactttttcatatgacttccttgcggcagttttaaagttctctgtatgaatattgtcagtgctcgaagaggcgatctgtaactgttcagtaccacttggaatgcctatttccccttcagcctccaattcc

SEQ ID NO: 444429 - DNA, 446 bp, Homo sapiens
gtgctgtggaccgctatcaccctctttatcttcttagtgtgctgccaggtaagctcaggcttgtatttcgtattggggagggggataagagtggctggaaacaggagtgctgactgttttgctctttgcctgttcccagattcccctgtttgggatcatgtcttcagattcagctgaccctttctattggatgagagtgattctagcctctaacagaggtaggactctggctctgtcttttctctgtagagtgtaggcttacctagcttcacttagttaaattaataggctttggctttatatggaacttagagagtgacttggaaaatagagtgaagaatgttaaagtgctgtgttgaatagccttattaaatgctgagttcagcaccaaggcataccatcatatttggaattgtatttgaatgcagtacaaaacctgtaatgag

SEQ ID NO: 444430 - DNA, 600 bp, Homo sapiens
gtcacggtgggtgggtgggggctgaccccagcttccaggggactgtcactgtggacgccaaaatggcataactgagataaggtgaataagtgacaaataaagccagttttttacaaggtacttgatcatgttctcttgattttaaattagattttattcccaaaaaggccagtgaggcgcaaagcttggttgcagctttgtgtgtgtcaaaggcttggttggggcactcaggcattttgcctggaaaagttcccttctgatggtcatgtcaacctggtgctcacatttgtgataaagtgatatgggtgctgggccacatgtggagctgctgcagggctctgcccgtgaggcagagtgcactggctgtcccgtgagaatgcagaggcctccgctgagccagggcgcctgccaccccgtggaagagtgggaaccttctagcaggagcctagggccccataactcgaagccctttgagcctcagctccagtacccagctggtgattggagaagtcttaacttggttgtgaggctggcctcagacccgacctgtagccaagccagaaggacccagtgttgtgtgggtgggagtggcaggcttgt

SEQ ID NO: 444431 - DNA, 546 bp, Homo sapiens
caggatgccctgatcctaagaagggggcctgggggtgcgtgcagcctgtcggggagaccccactctgacagtgggcacacggcagcctgcaaagcacagggccaccgccacagcccggcagaggggcacactctggagaccttgctggcagtgctagccaggaaacagagtgaccaagggacaagaagggacttgcctaaagccacccagcaactcagcagcagaaccaagatgggccccaggctcctccatatggcccagggcttaccaccctatcacacgtggccttgtctagacccagtcctgagcaggggagaggctcttgagacctgatgccctcctacccacatggttctcccactgccctgtctgctctgctgctacagaggggcagggcctcccccagcccacgcttaggaatgcttggcctctggcaggcaggcagctgtacccaagctggtgggcagggggctggaaggcaccaggcctcaggaggagccccatagtcccgcctgcagcctgtaaccatcggctgggccctgcaag

SEQ ID NO: 444432 - DNA, 907 bp, Homo sapiens
  misc_feature (848)..(848): n is a, c, g, or t
  misc_feature (880)..(880): n is a, c, g, or t
  misc_feature (884)..(884): n is a, c, g, or t
  misc_feature (888)..(888): n is a, c, g, or t
attttgttttcctctttttatttgtctgctaagaaggctagaagcaaattgagttgcctgttcgttccttcatatatgtctcctcctctgccaacaggaatggaatttgaaggtgctatcatcgcacttttccatctgctggccacacgcacagacaaggtccgagcccttcgggaggcgttctaccgccagaatcttcccaacctcatgaatctcatcgccaccatctttgtctttgcagtggtcatctatttccaggtgtgtccagatccaaccccagggagtttccatggtctggatttaagtttcagaatgccttgtgtgcagtcccccactctgtggggtgcactgtcatcatattgtgttgaaacgatgagatggtatttgaaggcagcaggtttccagatgagctggacaagcatgttcattgagtcatgggacctgatgacacagttgcctcggttggatgcaaagatgacgatgggagcgatagaagactccagggcgcggtgcaggtaggtgaagcactcaatgtccagcatgtggacctcatcaacaaacagcacacccgggaccagctcagcaatgccctggtcgatgtacttgttcaccaccttattaatctcccctcgaagtttgtctgtgatttctgtcttctttggcttcattagctggcccatcatggacaggatatcttgtcccccctggggccgcgcattagccacatccaagtcatgcaaggtcacatcttggatgatttctttctttttgtgcacatccccttttggcaaggggacatactcttcagcttcaaggtcgaattctgtggcataggtatcacacctgcnctgcctcttcacggccccactgttggcttcantgtnaatnacatctccagcttctactc

SEQ ID NO: 444433 - DNA, 3641 bp, Homo sapiens
ccaaggggttggtacgctccggagtacgggatcgcccgcgccgcgccgcgccgcttgccgccgggctagcactgacgtgtctctcggcggagctgctgtgcagtggaacgcgctgggccgcgggcagcgtcgcctcacgcggagcagagctgagctgaagcgggacccggagcccgagcagccgccgccatggcaatcaaatttctggaagtcatcaagcccttctgtgtcatcctgccggaaattcagaagccagagaggaagattcagtttaaggagaaagtgctgtggaccgctatcaccctctttatcttcttagtgtgctgccagattcccctgtttgggatcatgtcttcagattcagctgaccctttctattggatgagagtgattctagcctctaacagaggcacattgatggagctagggatctctcctattgtcacgtctggccttataatgcaactcttggctggcgccaagataattgaagttggtgacaccccaaaagaccgagctctcttcaacggagcccaaaagttatttggcatgatcattactatcggccagtctatcgtgtatgtgatgaccgggatgtatggggacccttctgaaatgggtgctggaatttgcctgctaatcaccattcagctctttgttgctggcttaattgtcctacttttggatgaactcctgcaaaaaggatatggccttggctctggtatttctctcttcattgcaactaacatctgtgaaaccatcgtatggaaggcattcagccccactactgtcaacactggccgaggaatggaatttgaaggtgctatcatcgcacttttccatctgctggccacacgcacagacaaggtccgagcccttcgggaggcgttctaccgccagaatcttcccaacctcatgaatctcatcgccaccatctttgtctttgcagtggtcatctatttccagggcttccgagtggacctgccaatcaagtcggcccgctaccgtggccagtacaacacctatcccatcaagctcttctatacgtccaacatccccatcatcctgcagtctgccctggtgtccaacctttatgtcatctcccaaatgctctcagctcgcttcagtggcaacttgctggtcagcctgctgggcacctggtcggacacgtcttctgggggcccagcacgtgcttatccagttggtggcctttgctattacctgtcccctccagaatcttttggctccgtgttagaagacccggtccatgcagttgtatacatagtgttcatgctgggctcctgtgcattcttctccaaaacgtggattgaggtctcaggttcctctgccaaagatgttgcaaagcagctgaaggagcagcagatggtgatgagaggccaccgagagacctccatggtccatgaactcaaccggtacatccccacagccgcggcctttggtgggctgtgcatcggggccctctcggtcctggctgacttcctaggcgccattgggtctggaaccgggatcctgctcgcagtcacaatcatctaccagtactttgagatcttcgttaaggagcaaagcgaggttggcagcatgggggccctgctcttctgagcccgtctcccggacaggttgaggaagctgctccagaagcgcctcggaaggggagctctcatcatggcgcgtgctgctgcggcatatggacttttaataatgtttttgaatttcgtattctttcattccactgtgtaaagtgctagacattttccaatttaaaattttgctttttatcctggcactggcaaaaagaactgtgaaagtgaaattttattcagccgactgccagagaagtgggaatggtataggattgtccccaagtgtccatgtaacttttgttttaacctttgcaccttctcagtgctgtatgcggctgcagccgtctcacctgtttccccacaaagggaatttctcactctggttggaagcacaaacactgaaatgtctacgtttcattttggcagtagggtgtgaagctgggagcagatcatgtatttcccggagacgtgggaccttgctggcatgtctccttcacaatcaggcgtgggaatatctggcttaggactgtttctctctaagacaccattgttttcccttattttaaaagtgatttttttaaggacagaacttcttccaaaagagagggatggctttcccagaagacactcctggccatctgtggatttgtctgtgcacctattggctcttctagctgactcttctggttgggcttagagtctgcctgtttctgctagctccgtgtttagtccacttgggtcatcagctctgccaagctgagcctggccaagctaggtggacagacccttgcagtgatgtccgtttgtccagattctgccagtcatcactggacacgtctcctcgcagctgccctagcaaggggagacattgtggtagctatcagacatggacagaaactgacttagtgctcacaagcccctacaccttctgggctgaagatcacccagctgtgttcagaattttcttactgtgcttaggactgcacgcaagtgagcagacaccaccgacttcctttctgcgtcaccagtgtcgtcagcagagagaggacagcacaggctcaaggttggtagtgaagtcaggttcggggtgcatgggctgtggtggtgttgatcagttgctccagtgtttgaaataagaagactcatgtttatgtctggaataagttctgtttgtgctgacaggtggcctaggtcctggagatgagcaccctctctctggcctttagggagtcccctcttaggacaggcactgcccagcagcaagggcagcagagttgggtgctaagatcctgaggagctcgaggtttcgagctggctttagacattggtgggaccaaggatgttttgcaggatgccctgatcctaagaagggggcctgggggtgcgtgcagcctgtcggggagaccccactctgacagtgggcacacggcagcctgcaaagcacagggccaccgccacagcccggcagaggggcacactctggagaccttgctggcagtgctagccaggaaacagagtgaccaagggacaagaagggacttgcctaaagccacccagcaactcagcagcagaaccaagatgggccccaggctcctccatatggcccagggcttaccaccctatcacacgtggccttgtctagacccagtcctgagcaggggagaggctcttgagacctgatgccctcctacccacatggttctcccactgccctgtctgctctgctgctacagaggggcagggcctcccccagcccacgcttaggaatgcttggcctctggcaggcaggcagctgtacccaagctggtgggcagggggctggaaggcaccaggcctcaggaggagccccatagtcccgcctgcagcctgtaaccatcggctgggccctgcaaggcccacactcacgccctgtgggtgatggtcacggtgggtgggtgggggctgaccccagcttccaggggactgtcactgtggacgccaaaatggcataactgagataaggtgaataagtgacaaataaagccagttttttacaaggta

SEQ ID NO: 444434 - DNA, 3037 bp, Homo sapiens
cggaccggacttctggtgtgttggaatttgctgctaatcaccatcagctctttgttgctggcttaattgtcctacttttggatgaactcctgcaaaaaggatatggccttggctctggtatttctctcttcattgcaactaacatctgtgaaaccatcgtatggaaggcattcagccccactactgtcaacactggccgaggaatggaatttgaaggtgctatcatcgcacttttccatctgctggccacacgcacagacaaggtccgagcccttcgggaggcgttctaccgccagaatcttcccaacctcatgaatctcatcgccaccatctttgtctttgcagtggtcatctatttccagggcttccgagtggacctgccaatcaagtcggcccgctaccgtggccagtacaacacctatcccatcaagctcttctatacgtccaacatccccatcatcctgcagtctgccctggtgtccaacctttatgtcatctcccaaatgctctcagctcgcttcagtggcaacttgctggtcagcctgctgggcacctggtcggacacgtcttctgggggcccagcacgtgcttatccagttggtggcctttgctattacctgtcccctccagaatcttttggctccgtgttagaagacccggtccatgcagttgtatacatagtgttcatgctgggctcctgtgcattcttctccaaaacgtggattgaggtctcaggttcctctgccaaagatgttgcaaagcagctgaaggagcagcagatggtgatgagaggccaccgagagacctccatggtccatgaactcaaccggtacatccccacagccgcggcctttggtgggctgtgcatcggggccctctcggtcctggctgacttcctaggcgccattgggtctggaaccgggatcctgctcgcagtcacaatcatctaccagtactttgagatcttcgttaaggagcaaagcgaggttggcagcatgggggccctgctcttctgagcccgtctcccggacaggttgaggaagctgctccagaagcgcctcggaaggggagctctcatcatggcgcgtgctgctgcggcatatggacttttaataatgtttttgaatttcgtattctttcattccactgtgtaaagtgctagacattttccaatttaaaattttgctttttatcctggcactggcaaaaagaactgtgaaagtgaaattttattcagccgactgccagagaagtgggaatggtataggattgtccccaagtgtccatgtaacttttgttttaacctttgcaccttctcagtgctgtatgcggctgcagccgtctcacctgtttccccacaaagggaatttctcactctggttggaagcacaaacactgaaatgtctacgtttcattttggcagtagggtgtgaagctgggagcagatcatgtatttcccggagacgtgggaccttgctggcatgtctccttcacaatcaggcgtgggaatatctggcttaggactgtttctctctaagacaccattgttttcccttattttaaaagtgatttttttaaggacagaacttcttccaaaagagagggatggctttcccagaagacactcctggccatctgtggatttgtctgtgcacctattggctcttctagctgactcttctggttgggcttagagtctgcctgtttctgctagctccgtgtttagtccacttgggtcatcagctctgccaagctgagcctggccaagctaggtggacagacccttgcagtgatgtccgtttgtccagattctgccagtcatcactggacacgtctcctcgcagctgccctagcaaggggagacattgtggtagctatcagacatggacagaaactgacttagtgctcacaagcccctacaccttctgggctgaagatcacccagctgtgttcagaattttcttactgtgcttaggactgcacgcaagtgagcagacaccaccgacttcctttctgcgtcaccagtgtcgtcagcagagagaggacagcacaggctcaaggttggtagtgaagtcaggttcggggtgcatgggctgtggtggtgttgatcagttgctccagtgtttgaaataagaagactcatgtttatgtctggaataagttctgtttgtgctgacaggtggcctaggtcctggagatgagcaccctctctctggcctttagggagtcccctcttaggacaggcactgcccagcagcaagggcagcagagttgggtgctaagatcctgaggagctcgaggtttcgagctggctttagacattggtgggaccaaggatgttttgcaggatgccctgatcctaagaagggggcctgggggtgcgtgcagcctgtcggggagaccccactctgacagtgggcacacggcagcctgcaaagcacagggccaccgccacagcccggcagaggggcacactctggagaccttgctggcagtgctagccaggaaacagagtgaccaagggacaagaagggacttgcctaaagccacccagcaactcagcagcagaaccaagatgggccccaggctcctccatatggcccagggcttaccaccctatcacacgtggccttgtctagacccagtcctgagcaggggagaggctcttgagacctgatgccctcctacccacatggttctcccactgccctgtctgctctgctgctacagaggggcagggcctcccccagcccacgcttaggaatgcttggcctctggcaggcaggcagctgtacccaagctggtgggcagggggctggaaggcaccaggcctcaggaggagccccatagtcccgcctgcagcctgtaaccatcggctgggccctgcaaggcccacactcacgccctgtgggtgatggtcacggtgggtgggtgggggctgaccccagcttccaggggactgtcactgtggacgccaaaatggcataactgagataaggtgaataagtgacaaataaagccagttttttacaaggta

SEQ ID NO: 444435 - DNA, 2917 bp, Homo sapiens
ccaaggggttggtacgctccggagtacgggatcgcccgcgccgcgccgcgccgcttgccgccgggctagcactgacgtgtctctcggcggagctgctgtgcagtggaacgcgctgggccgcgggcagcgtcgcctcacgcggagcagagctgagctgaagcgggacccggagcccgagcagccgccgccatggcaatcaaatttctggaagtcatcaagcccttctgtgtcatcctgccggaaattcagaagccagagaggaagattcagtttaaggagaaagtgctgtggaccgctatcaccctctttatcttcttagtgtgctgccagattcccctgtttgggatcatgtcttcagattcagctgaccctttctattggatgagagtgattctagcctctaacagaggcacattgatggagctagggatctctcctattgtcacgtctggccttataatgcaactcttggctggcgccaagataattgaagttggtgacaccccaaaagaccgagctcttccgtgttagaagacccggtccatgcagttgtatacatagtgttcatgctgggctcctgtgcattcttctccaaaacgtggattgaggtctcaggttcctctgccaaagatgttgcaaagcagctgaaggagcagcagatggtgatgagaggccaccgagagacctccatggtccatgaactcaaccggtacatccccacagccgcggcctttggtgggctgtgcatcggggccctctcggtcctggctgacttcctaggcgccattgggtctggaaccgggatcctgctcgcagtcacaatcatctaccagtactttgagatcttcgttaaggagcaaagcgaggttggcagcatgggggccctgctcttctgagcccgtctcccggacaggttgaggaagctgctccagaagcgcctcggaaggggagctctcatcatggcgcgtgctgctgcggcatatggacttttaataatgtttttgaatttcgtattctttcattccactgtgtaaagtgctagacattttccaatttaaaattttgctttttatcctggcactggcaaaaagaactgtgaaagtgaaattttattcagccgactgccagagaagtgggaatggtataggattgtccccaagtgtccatgtaacttttgttttaacctttgcaccttctcagtgctgtatgcggctgcagccgtctcacctgtttccccacaaagggaatttctcactctggttggaagcacaaacactgaaatgtctacgtttcattttggcagtagggtgtgaagctgggagcagatcatgtatttcccggagacgtgggaccttgctggcatgtctccttcacaatcaggcgtgggaatatctggcttaggactgtttctctctaagacaccattgttttcccttattttaaaagtgatttttttaaggacagaacttcttccaaaagagagggatggctttcccagaagacactcctggccatctgtggatttgtctgtgcacctattggctcttctagctgactcttctggttgggcttagagtctgcctgtttctgctagctccgtgtttagtccacttgggtcatcagctctgccaagctgagcctggccaagctaggtggacagacccttgcagtgatgtccgtttgtccagattctgccagtcatcactggacacgtctcctcgcagctgccctagcaaggggagacattgtggtagctatcagacatggacagaaactgacttagtgctcacaagcccctacaccttctgggctgaagatcacccagctgtgttcagaattttcttactgtgcttaggactgcacgcaagtgagcagacaccaccgacttcctttctgcgtcaccagtgtcgtcagcagagagaggacagcacaggctcaaggttggtagtgaagtcaggttcggggtgcatgggctgtggtggtgttgatcagttgctccagtgtttgaaataagaagactcatgtttatgtctggaataagttctgtttgtgctgacaggtggcctaggtcctggagatgagcaccctctctctggcctttagggagtcccctcttaggacaggcactgcccagcagcaagggcagcagagttgggtgctaagatcctgaggagctcgaggtttcgagctggctttagacattggtgggaccaaggatgttttgcaggatgccctgatcctaagaagggggcctgggggtgcgtgcagcctgtcggggagaccccactctgacagtgggcacacggcagcctgcaaagcacagggccaccgccacagcccggcagaggggcacactctggagaccttgctggcagtgctagccaggaaacagagtgaccaagggacaagaagggacttgcctaaagccacccagcaactcagcagcagaaccaagatgggccccaggctcctccatatggcccagggcttaccaccctatcacacgtggccttgtctagacccagtcctgagcaggggagaggctcttgagacctgatgccctcctacccacatggttctcccactgccctgtctgctctgctgctacagaggggcagggcctcccccagcccacgcttaggaatgcttggcctctggcaggcaggcagctgtacccaagctggtgggcagggggctggaaggcaccaggcctcaggaggagccccatagtcccgcctgcagcctgtaaccatcggctgggccctgcaaggcccacactcacgccctgtgggtgatggtcacggtgggtgggtgggggctgaccccagcttccaggggactgtcactgtggacgccaaaatggcataactgagataaggtgaataagtgacaaataaagccagttttttacaaggta

SEQ ID NO: 444436 - DNA, 3634 bp, Homo sapiens
agcgatccgaggcccggccccggccccgccccgcgccgcgccgcgccgcttgccgccgggctagcactgacgtgtctctcggcggagctgctgtgcagtggaacgcgctgggccgcgggcagcgtcgcctcacgcggagcagagctgagctgaagcgggacccggagcccgagcagccgccgccatggcaatcaaatttctggaagtcatcaagcccttctgtgtcatcctgccggaaattcagaagccagagaggaagattcagtttaaggagaaagtgctgtggaccgctatcaccctctttatcttcttagtgtgctgccagattcccctgtttgggatcatgtcttcagattcagctgaccctttctattggatgagagtgattctagcctctaacagaggcacattgatggagctagggatctctcctattgtcacgtctggccttataatgcaactcttggctggcgccaagataattgaagttggtgacaccccaaaagaccgagctctcttcaacggagcccaaaagttatttggcatgatcattactatcggccagtctatcgtgtatgtgatgaccgggatgtatggggacccttctgaaatgggtgctggaatttgcctgctaatcaccattcagctctttgttgctggcttaattgtcctacttttggatgaactcctgcaaaaaggatatggccttggctctggtatttctctcttcattgcaactaacatctgtgaaaccatcgtatggaaggcattcagccccactactgtcaacactggccgaggaatggaatttgaaggtgctatcatcgcacttttccatctgctggccacacgcacagacaaggtccgagcccttcgggaggcgttctaccgccagaatcttcccaacctcatgaatctcatcgccaccatctttgtctttgcagtggtcatctatttccagggcttccgagtggacctgccaatcaagtcggcccgctaccgtggccagtacaacacctatcccatcaagctcttctatacgtccaacatccccatcatcctgcagtctgccctggtgtccaacctttatgtcatctcccaaatgctctcagctcgcttcagtggcaacttgctggtcagcctgctgggcacctggtcggacacgtcttctgggggcccagcacgtgcttatccagttggtggcctttgctattacctgtcccctccagaatcttttggctccgtgttagaagacccggtccatgcagttgtatacatagtgttcatgctgggctcctgtgcattcttctccaaaacgtggattgaggtctcaggttcctctgccaaagatgttgcaaagcagctgaaggagcagcagatggtgatgagaggccaccgagagacctccatggtccatgaactcaaccggtacatccccacagccgcggcctttggtgggctgtgcatcggggccctctcggtcctggctgacttcctaggcgccattgggtctggaaccgggatcctgctcgcagtcacaatcatctaccagtactttgagatcttcgttaaggagcaaagcgaggttggcagcatgggggccctgctcttctgagcccgtctcccggacaggttgaggaagctgctccagaagcgcctcggaaggggagctctcatcatggcgcgtgctgctgcggcatatggacttttaataatgtttttgaatttcgtattctttcattccactgtgtaaagtgctagacattttccaatttaaaattttgctttttatcctggcactggcaaaaagaactgtgaaagtgaaattttattcagccgactgccagagaagtgggaatggtataggattgtccccaagtgtccatgtaacttttgttttaacctttgcaccttctcagtgctgtatgcggctgcagccgtctcacctgtttccccacaaagggaatttctcactctggttggaagcacaaacactgaaatgtctacgtttcattttggcagtagggtgtgaagctgggagcagatcatgtatttcccggagacgtgggaccttgctggcatgtctccttcacaatcaggcgtgggaatatctggcttaggactgtttctctctaagacaccattgttttcccttattttaaaagtgatttttttaaggacagaacttcttccaaaagagagggatggctttcccagaagacactcctggccatctgtggatttgtctgtgcacctattggctcttctagctgactcttctggttgggcttagagtctgcctgtttctgctagctccgtgtttagtccacttgggtcatcagctctgccaagctgagcctggccaagctaggtggacagacccttgcagtgatgtccgtttgtccagattctgccagtcatcactggacacgtctcctcgcagctgccctagcaaggggagacattgtggtagctatcagacatggacagaaactgacttagtgctcacaagcccctacaccttctgggctgaagatcacccagctgtgttcagaattttcttactgtgcttaggactgcacgcaagtgagcagacaccaccgacttcctttctgcgtcaccagtgtcgtcagcagagagaggacagcacaggctcaaggttggtagtgaagtcaggttcggggtgcatgggctgtggtggtgttgatcagttgctccagtgtttgaaataagaagactcatgtttatgtctggaataagttctgtttgtgctgacaggtggcctaggtcctggagatgagcaccctctctctggcctttagggagtcccctcttaggacaggcactgcccagcagcaagggcagcagagttgggtgctaagatcctgaggagctcgaggtttcgagctggctttagacattggtgggaccaaggatgttttgcaggatgccctgatcctaagaagggggcctgggggtgcgtgcagcctgtcggggagaccccactctgacagtgggcacacggcagcctgcaaagcacagggccaccgccacagcccggcagaggggcacactctggagaccttgctggcagtgctagccaggaaacagagtgaccaagggacaagaagggacttgcctaaagccacccagcaactcagcagcagaaccaagatgggccccaggctcctccatatggcccagggcttaccaccctatcacacgtggccttgtctagacccagtcctgagcaggggagaggctcttgagacctgatgccctcctacccacatggttctcccactgccctgtctgctctgctgctacagaggggcagggcctcccccagcccacgcttaggaatgcttggcctctggcaggcaggcagctgtacccaagctggtgggcagggggctggaaggcaccaggcctcaggaggagccccatagtcccgcctgcagcctgtaaccatcggctgggccctgcaaggcccacactcacgccctgtgggtgatggtcacggtgggtgggtgggggctgaccccggttttcgcgcagcgcctctggcattccctgaccggcagtctgtttatatggttaataagtggctgatctgttcagtattaaacaaggt

SEQ ID NO: 444437 - DNA, 2331 bp, Homo sapiens
ccaaggggttggtacgctccggagtacgggatcgcccgcgccgcgccgcgccgcttgccgccgggctagcactgacgtgtctctcggcggagctgctgtgcagtggaacgcgctgggccgcgggcagcgtcgcctcacgcggagcagagctgagctgaagcgggacccggagcccgagcagccgccgccatggcaagccattgggtctggaaccgggatcctgctcgcagtcacaatcatctaccagtactttgagatcttcgttaaggagcaaagcgaggttggcagcatgggggccctgctcttctgagcccgtctcccggacaggttgaggaagctgctccagaagcgcctcggaaggggagctctcatcatggcgcgtgctgctgcggcatatggacttttaataatgtttttgaatttcgtattctttcattccactgtgtaaagtgctagacattttccaatttaaaattttgctttttatcctggcactggcaaaaagaactgtgaaagtgaaattttattcagccgactgccagagaagtgggaatggtataggattgtccccaagtgtccatgtaacttttgttttaacctttgcaccttctcagtgctgtatgcggctgcagccgtctcacctgtttccccacaaagggaatttctcactctggttggaagcacaaacactgaaatgtctacgtttcattttggcagtagggtgtgaagctgggagcagatcatgtatttcccggagacgtgggaccttgctggcatgtctccttcacaatcaggcgtgggaatatctggcttaggactgtttctctctaagacaccattgttttcccttattttaaaagtgatttttttaaggacagaacttcttccaaaagagagggatggctttcccagaagacactcctggccatctgtggatttgtctgtgcacctattggctcttctagctgactcttctggttgggcttagagtctgcctgtttctgctagctccgtgtttagtccacttgggtcatcagctctgccaagctgagcctggccaagctaggtggacagacccttgcagtgatgtccgtttgtccagattctgccagtcatcactggacacgtctcctcgcagctgccctagcaaggggagacattgtggtagctatcagacatggacagaaactgacttagtgctcacaagcccctacaccttctgggctgaagatcacccagctgtgttcagaattttcttactgtgcttaggactgcacgcaagtgagcagacaccaccgacttcctttctgcgtcaccagtgtcgtcagcagagagaggacagcacaggctcaaggttggtagtgaagtcaggttcggggtgcatgggctgtggtggtgttgatcagttgctccagtgtttgaaataagaagactcatgtttatgtctggaataagttctgtttgtgctgacaggtggcctaggtcctggagatgagcaccctctctctggcctttagggagtcccctcttaggacaggcactgcccagcagcaagggcagcagagttgggtgctaagatcctgaggagctcgaggtttcgagctggctttagacattggtgggaccaaggatgttttgcaggatgccctgatcctaagaagggggcctgggggtgcgtgcagcctgtcggggagaccccactctgacagtgggcacacggcagcctgcaaagcacagggccaccgccacagcccggcagaggggcacactctggagaccttgctggcagtgctagccaggaaacagagtgaccaagggacaagaagggacttgcctaaagccacccagcaactcagcagcagaaccaagatgggccccaggctcctccatatggcccagggcttaccaccctatcacacgtggccttgtctagacccagtcctgagcaggggagaggctcttgagacctgatgccctcctacccacatggttctcccactgccctgtctgctctgctgctacagaggggcagggcctcccccagcccacgcttaggaatgcttggcctctggcaggcaggcagctgtacccaagctggtgggcagggggctggaaggcaccaggcctcaggaggagccccatagtcccgcctgcagcctgtaaccatcggctgggccctgcaaggcccacactcacgccctgtgggtgatggtcacggtgggtgggtgggggctgaccccagcttccaggggactgtcactgtggacgccaaaatggcataactgagataaggtgaataagtgacaaataaagccagttttttacaaggta

SEQ ID NO: 444438 - DNA, 1850 bp, Homo sapiens
cccggtgtagcccaactgtgagcacaacagaacttattccagacataaacatgagtcttcttatttcaaacactggagcaactgatcaacaccaccacagcccatgcaccccgaacctgacttcactaccaaccttgagcctgtgctgtcctctctctgctgacgacactggtgacgcagaaaggaagtcggtggtgtctgctcacttgcgtgcagtcctaagcacagtaagaaaattctgaacacagctgggagcagatcatgtatttcccggagacgtgggaccttgctggcatgtctccttcacaatcaggcgtgggaatatctggcttaggactgtttctctctaagacaccattgttttcccttattttaaaagtgatttttttaaggacagaacttcttccaaaagagagggatggctttcccagaagacactcctggccatctgtggatttgtctgtgcacctattggctcttctagctgactcttctggttgggcttagagtctgcctgtttctgctagctccgtgtttagtccacttgggtcatcagctctgccaagctgagcctggccaagctaggtggacagacccttgcagtgatgtccgtttgtccagattctgccagtcatcactggacacgtctcctcgcagctgccctagcaaggggagacattgtggtagctatcagacatggacagaaactgacttagtgctcacaagcccctacaccttctgggctgaagatcacccagctgtgttcagaattttcttactgtgcttaggactgcacgcaagtgagcagacaccaccgacttcctttctgcgtcaccagtgtcgtcagcagagagaggacagcacaggctcaaggttggtagtgaagtcaggttcggggtgcatgggctgtggtggtgttgatcagttgctccagtgtttgaaataagaagactcatgtttatgtctggaataagttctgtttgtgctgacaggtggcctaggtcctggagatgagcaccctctctctggcctttagggagtcccctcttaggacaggcactgcccagcagcaagggcagcagagttgggtgctaagatcctgaggagctcgaggtttcgagctggctttagacattggtgggaccaaggatgttttgcaggatgccctgatcctaagaagggggcctgggggtgcgtgcagcctgtcggggagaccccactctgacagtgggcacacggcagcctgcaaagcacagggccaccgccacagcccggcagaggggcacactctggagaccttgctggcagtgctagccaggaaacagagtgaccaagggacaagaagggacttgcctaaagccacccagcaactcagcagcagaaccaagatgggccccaggctcctccatatggcccagggcttaccaccctatcacacgtggccttgtctagacccagtcctgagcaggggagaggctcttgagacctgatgccctcctacccacatggttctcccactgccctgtctgctctgctgctacagaggggcagggcctcccccagcccacgcttaggaatgcttggcctctggcaggcaggcagctgtacccaagctggtgggcagggggctggaaggcaccaggcctcaggaggagccccatagtcccgcctgcagcctgtaaccatcggctgggccctgcaaggcccacactcacgccctgtgggtgatggtcacggtgggtgggtgggggctgaccccagcttccaggggactgtcactgtggacgccaaaatggcataactgagataaggtgaataagtgacaaataaagccagttttttacaaggta

SEQ ID NO: 444439 - DNA, 2123 bp, Homo sapiens
agcgatccgaggcccggccccggccccgccccgcgccgcgccgcgccgcttgccgccgggctagcactgacgtgtctctcggcggagctgctgtgcagtggaacgcgctgggccgcgggcagcgtcgcctcacgcggagcagagctgagctgaagcgggacccggagcccgagcagccgccgccatggcaatcaaatttctggaagtcatcaagcccttctgtgtcatcctgccggaaattcagaagccagagaggaagattcagtttaaggagaaagtgctgtggaccgctatcaccctctttatcttcttagtgtgctgccagattcccctgtttgggatcatgtcttcagattcagctgaccctttctattggatgagagtgattctagcctctaacagaggcacattgatggagctagggatctctcctattgtcacgtctggccttataatgcaactcttggctggcgccaagataattgaagttggtgacaccccaaaagaccgagctctcttcaacggagcccaaaagttatttggcatgatcattactatcggccagtctatcgtgtatgtgatgaccgggatgtatggggacccttctgaaatgggtgctggaatttgcctgctaatcaccattcagctctttgttgctggcttaattgtcctacttttggatgaactcctgcaaaaaggatatggccttggctctggtatttctctcttcattgcaactaacatctgtgaaaccatcgtatggaaggcattcagccccactactgtcaacactggccgaggaatggaatttgaaggtgctatcatcgcacttttccatctgctggccacacgcacagacaaggtccgagcccttcgggaggcgttctaccgccagaatcttcccaacctcatgaatctcatcgccaccatctttgtctttgcagtggtcatctatttccagggcttccgagtggacctgccaatcaagtcggcccgctaccgtggccagtacaacacctatcccatcaagctcttctatacgtccaacatccccatcatcctgcagtctgccctggtgtccaacctttatgtcatctcccaaatgctctcagctcgcttcagtggcaacttgctggtcagcctgctgggcacctggtcggacacgtcttctgggggcccagcacgtgcttatccagttggtggcctttgctattacctgtcccctccagaatcttttggctccgtgttagaagacccggtccatgcagttgtatacatagtgttcatgctgggctcctgtgcattcttctccaaaacgtggattgaggtctcaggttcctctgccaaagatgttgcaaagcagctgaaggagcagcagatggtgatgagaggccaccgagagacctccatggtccatgaactcaaccggtacatccccacagccgcggcctttggtgggctgtgcatcggggccctctcggtcctggctgacttcctaggcgccattgggtctggaaccgggatcctgctcgcagtcacaatcatctaccagtactttgagatcttcgttaaggagcaaagcgaggttggcagcatgggggccctgctcttctgagcccgtctcccggacaggttgaggaagctgctccagaagcgcctcggaaggggagctctcatcatggcgcgtgctgctgcggcatatggacttttaataatgtttttgaatttcgtattctttcattccactgtgtaaagtgctagacattttccaatttaaaattttgctttttatcctggcactggcaaaaagaactgtgaaagtgaaattttattcagccgactgccagagaagtgggaatggtataggattgtccccaagtgtccatgtaacttttgttttaacctttgcaccttctcagtgctgtatgcggctgcagccgtctcacctgtttccccacaaagggaatttctcactctggttggaagcacaaacactgaaatgtctacgtttcattttggcagtagggtgtgaagcttccaggggactgtcactgtggacgccaaaatggcataactgagataaggtgaataagtgacaaataaagccagttttttacaaggta

SEQ ID NO: 444440 - DNA, 2083 bp, Homo sapiens
  misc_feature (1481)..(1481): n is a, c, g, or t
  misc_feature (2024)..(2024): n is a, c, g, or t
  misc_feature (2056)..(2056): n is a, c, g, or t
  misc_feature (2060)..(2060): n is a, c, g, or t
  misc_feature (2064)..(2064): n is a, c, g, or t
agcgatccgaggcccggccccggccccgccccgcgccgcgccgcgccgcttgccgccgggctagcactgacgtgtctctcggcggagctgctgtgcagtggaacgcgctgggccgcgggcagcgtcgcctcacgcggagcagagctgagctgaagcgggacccggagcccgagcagccgccgccatggcaatcaaatttctggaagtcatcaagcccttctgtgtcatcctgccggaaattcagaagccagagaggaagattcagtttaaggagaaagtgctgtggaccgctatcaccctctttatcttcttagtgtgctgccagattcccctgtttgggatcatgtcttcagattcagctgaccctttctattggatgagagtgattctagcctctaacagaggcacattgatggagctagggatctctcctattgtcacgtctggccttataatgcaactcttggctggcgccaagataattgaagttggtgacaccccaaaagaccgagctctcttcaacggagcccaaaagttatttggcatgatcattactatcggccagtctatcgtgtatgtgatgaccgggatgtatggggacccttctgaaatgggtgctggaatttgcctgctaatcaccattcagctctttgttgctggcttaattgtcctacttttggatgaactcctgcaaaaaggatatggccttggctctggtatttctctcttcattgcaactaacatctgtgaaaccatcgtatggaaggcattcagccccactactgtcaacactggccgaggaatggaatttgaaggtgctatcatcgcacttttccatctgctggccacacgcacagacaaggtccgagcccttcgggaggcgttctaccgccagaatcttcccaacctcatgaatctcatcgccaccatctttgtctttgcagtggtcatctatttccaggtgtgtccagatccaaccccagggagtttccatggtctggatttaagtttcagaatgccttgtgtgcagtcccccactctgtggggtgcactgtcatcatattgtgttgaaacgatgagatggtatttgaaggcagcaggtttccagatgagctggacaagcatgttcattgagtcatgggacctgccaggctgtggtgagagtttgggccagaggtgatggtgccagatacagctgtacccttggagatggagcagttaggtaaggaagggcaaagtccaggtgaccttagatgctgccacagcactcttcagtctgcacagtcctcagtacaactactcatctcttccatcgtcactcagaagcagccacagacagacaacagacaaatgagcatggccgtgttcctacaaagctggctacaaagtcagctgcagaccaggttgtcctatgggccttacctcagtgtggtcttggtgccaatctcccccaggtggttcagtgcctcctcactgatgtngattccttccgtctgggcacggattttaatgatctgtttcatttcctgtggagtatacagcatggtccggattatcatcactcggtccagaaggtcaagagggatgccgtgaggggatgtgatgtcctcagtgcctctgatgacacagttgcctcggttggatgcaaagatgacgatgggagcgatagaagactccagggcgcggtgcaggtaggtgaagcactcaatgtccagcatgtggacctcatcaacaaacagcacacccgggaccagctcagcaatgccctggtcgatgtacttgttcaccaccttattaatctcccctcgaagtttgtctgtgatttctgtcttctttggcttcattagctggcccatcatggacaggatatcttgtcccccctggggccgcgcattagccacatccaagtcatgcaaggtcacatcttggatgatttctttctttttgtgcacatccccttttggcaaggggacatactcttcagcttcaaggtcgaattctgtggcataggtatcacacctgcnctgcctcttcacggccccactgttggcttcantgtnaatnacatctccagcttctactc

SEQ ID NO: 444441 - DNA, 1725 bp, Homo sapiens
agcgatccgaggcccggccccggccccgccccgcgccgcgccgcgccgcttgccgccgggctagcactgacgtgtctctcggcggagctgctgtgcagtggaacgcgctgggccgcgggcagcgtcgcctcacgcggagcagagctgagctgaagcgggacccggagcccgagcagccgccgccatggcaatcaaatttctggaagtcatcaagcccttctgtgtcatcctgccggaaattcagaagccagagaggaagattcagtttaaggagaaagtgctgtggaccgctatcaccctctttatcttcttagtgtgctgccagattcccctgtttgggatcatgtcttcagattcagctgaccctttctattggatgagagtgattctagcctctaacagaggcacattgatggagctagggatctctcctattgtcacgtctggccttataatgcaactcttggctggcgccaagataattgaagttggtgacaccccaaaagaccgagctctcttcaacggagcccaaaagttatttggcatgatcattactatcggccagtctatcgtgtatgtgatgaccgggatgtatggggacccttctgaaatgggtgctggaatttgcctgctaatcaccattcagctctttgttgctggcttaattgtcctacttttggatgaactcctgcaaaaaggatatggccttggctctggtatttctctcttcattgcaactaacatctgtgaaaccatcgtatggaaggcattcagccccactactgtcaacactggccgaggaatggaatttgaaggtgctatcatcgcacttttccatctgctggccacacgcacagacaaggtccgagcccttcgggaggcgttctaccgccagaatcttcccaacctcatgaatctcatcgccaccatctttgtctttgcagtggtcatctatttccaggtgtgtccagatccaaccccagggagtttccatggtctggatttaagtttcagaatgccttgtgtgcagtcccccactctgtggggtgcactgtcatcatattgtgttgaaacgatgagatggtatttgaaggcagcaggtttccagatgagctggacaagcatgttcattgagtcatgggacctgccaggctgtggtgagagtttgggccagaggtgatggtgccagatacagctgtacccttggagatggagcagttaggtaaggaagggcaaagtccaggtgaccttagatgctgccacagcactcttcagtctgcacagtcctcagtacaactactcatctcttccatcgtcactcagaagcagccacagacagacaacagacaaatgagcatggccgtgttcctacaaagctggctacaaagtcagctgcagaccaggttgtcctatgggccttacctaaaggaagcaaccacaggagcaatttagttcattctcttaatattaagctgctggatttacagcactgtgcagtagaagtagaattcaagtcacatgtagtttttaaaatttctagaagtcacattaaaaaagtaaaaagaaacaggtgaaattaaatttaatatatttaacctagtatatccaaagtatcatttcaacattataattaatgttaagatgacatctcagtttggtctagtcacagtcccctggccacgtgtggccagtgtggccactgcctggacagcagcgccttggcct

SEQ ID NO: 444442 - DNA, 3650 bp, Homo sapiens
cagcagctgctgccactgctcagcgcggtgaggagggagccggtgactcggagacggtgactcagaggcagagcggcgcaagggccaaggagtactggcgtccatggaccctggggaccccgtcaggagcaggtgacatccttccccttccaccctgctccctgctctacatccccagcagggagtggcctctcccttctccatggacttccaagagagggacccgcccttcctgcctgagagcgctcagtcctcaaagcccagcagtgctcagcaggcctctgagctgtgggaggtggtggaggagcctcgggtcaggctggggacagagggtgtcatgcctgagaggcaggaaggtcacctgctcaagaagaggaagtggcctctgaagggctggcacaagagatactttgtgctcgaggacgggatccttcattatgcaacaacccggcaagacatcaccaaggggaagctccatggctccatcgatgtccggctgtcggtcatgtccatcaacaaaaaggcccagcgcattgaccttgacactgaagacaacatctaccacctcaagatcaaatcccaggacctattccagagctgggtggcgcagctgcgtgcccaccgcctagcccaccgcctggacatgccccgtggctcactgcccagtactgctcaccggaaggttcctggtgcccagcttccaacagcagctactgcctcagccctacctgggcttggaccgcgggagaaagtgtcttcctggctgagggacagtgatgggctggaccgctgctctcatgagctctctgagtgtcaggggaagctccaggaactacacaggctcctccagagcctggagtccctgcaccgaatcccctcagcccctgttatccccacacaccaggcctcagtgacaaccgaaagacccaagaaggggaaacggacaagccgcatgtggtgcacccagagctttgccaaggatgacaccattggacgggttggtcgtctccatggctctgttcccaacctgtctcgctacctggagtctcgggactcctcgggcacccgtgggctgccacccacagactatgcccacctgcagcgcagcttctgggccctggcccagaaggtgcacagctccctcagcagcgtcctggccgccctcaccatggaacgggaccaactgagggacatgcaccagggctcagagttgtcaagaatgggggtctctgaggcctccactggccagaggcgcctccactcactgtccacctcctccgacaccacggcggactctttcagctccctcaaccctgaggagcaagaagctctgtacatgaaggggcgcgagctcaccccccagctatcgcagaccagcatcctgtcccttgctgattcccacacggagttcttcgatgcctgcgaggttctcctctccgccagctcttctgagaatgagggctcagaggaggaggagtcctgtaccagtgaaatcaccaccagcctgtctgaggagatgctggacctcaggggagctgagcgctgtcagaaaggggggtgtgttccagggagacccatggggccaccccgccgtcgctgcctgccggcggccagcgggcctggggctgacgtgagcctgtggaacattctgcgcaacaacatcggcaaagacctgtccaaggtgtcaatgcctgtgcagctcaacgagccgctcaacactctgcagcggctctgcgaggagctggagtacagcagcctcctggaccaggccagccgcatcgccgacccctgcgagcgcatggtgtacatcgcagcctttgctgtctcggcctactcctccacataccaccgagccggctgcaagcccttcaaccctgtcctgggggagacctacgagtgtgagcggcctgaccgaggcttccgcttcatcagtgagcaggtctcccaccacccccctatctcggcctgccatgcagagtctgagaacttcgccttctggcaagatatgaagtggaagaacaagttctggggcaaatccctggagattgtgcctgtgggaacagtcaacgtcagcctgcccaggtttggggaccactttgagtggaacaaggtgacatcctgcattcacaatgtcctgagtggtcagcgctggatcgagcactatggggaggtgctcatccgaaacacacaggacagctcctgccactgcaagatcaccttctgcaaggccaagtactggagttccaatgtccacgaggtgcagggcgctgtgctcagtcggagtggccgtgtcctccaccgactctttgggaagtggcacgaggggctgtaccggggacccacgccaggtggccagtgcatctggaaacccaactcaatgccccccgaccatgagcgaaacttcggcttcacccagtttgccttggagctgaatgagctgacagcagagctgaaacggtcgctgccttccaccgacacgagactccggccagaccagaggtacctggaggaggggaacatacaggccgctgaggcccagaagagaaggatcgagcagctgcagcgagacaggcgcaaagtcatggaggaaaacaacatcgtacaccaggctcgcttcttcaggcggcagacagatagcagcgggaaagagtggtgggtgaccaacaatacctactggaggctgcgggccgagccaggctacgggaacatggatggggccgtgctctggtagccctggccccgggggcaggaggctctggttcctcactcctcctgcctccaccccctaccatggacacatgggtgaggccgggctccccgcctcactgcccttgagaccaaaggggcagccctggccctccctcccctctgctggccagagggtctgcatctcagcccacccccaaccccaccgtttggggtgagaagcagaatctgtgcttccccagtctccttgccccagacaaccagcatgtaagacccttcccgcttcaccattccgattcctgtcccctttggggtacttgggggagactctggctcccaggatctgttccctatttcagtgccttcctaggacacaggggactccttgacgctccccaggctttctgtgcccaggcctctgtccccagcggtgaggttgcagtgagtgaaggagaggaggtgatctgttctccctccccttctgcccatctccagcatcttcttccccttccctggccctgcagggccttctccagctccctttggttagtccctggccatccctcctgtcctggatcccttctccctaactgcaaaatgcctgcagcttccagctccttcgtccctgatcctcaagcggttccctcccgtctcagctcagcggatcccccagagtggaggaggcctctccatgaggaggggagcagcccaaggcacctgtcctctgacccaccggcagcgagtgcgcaggtgtgagtgtaagttcatgtaggagagtgtatgcgtgtgcgcctgtgccctgcttgcaggcaagcagggctccctcatgtagcccggccttccccctgctgggggtccaccacatcgctgctctttctcacagtctgcctctgatgagggcgaattgctatgacattccaagctccaataaagactgtcccaga

SEQ ID NO: 444443 - DNA, 2983 bp, Homo sapiens
tgccccttttccccaccctgtgagtaaaattgcccccaccttgacttgccaggcctcagtgacaaccgaaagacccaagaaggggaaacggacaagccgcatgtggtgcacccagagctttgccaaggatgacaccattggacgggttggtcgtctccatggctctgttcccaacctgtctcgctacctggagtctcgggactcctcgggcacccgtgggctgccacccacagactatgcccacctgcagcgcagcttctgggccctggcccagaaggtgcacagctccctcagcagcgtcctggccgccctcaccatggaacgggaccaactgagggacatgcaccagggctcagagttgtcaagaatgggggtgaggcctgggggacagggtgactggtgcggggagagggcttcaagctgaggactgccagcctggggtccgatagcagatctgggtcagggtggggggttggcagaggcagtctctgcagagatgcggcaaggtggggaggacctcatcctcctggcaccgtgtccctcaccctctccctgcaggtctctgaggcctccactggccagaggcgcctccactcactgtccacctcctccgacaccacggcggactctttcagctccctcaaccctgaggagcaagaagctctgtacatgaaggggcgcgagctcaccccccagctatcgcagaccagcatcctgtcccttgctgattcccacacggagttcttcgatgcctgcgaggttctcctctccgccagctcttctgagaatgagggctcagaggaggaggagtcctgtaccagtgaaatcaccaccagcctgtctgaggagatgctggacctcaggggagctgagcgctgtcagaaaggggggtgtgttccagggagacccatggggccaccccgccgtcgctgcctgccggcggccagcgggcctggggctgacgtgagcctgtggaacattctgcgcaacaacatcggcaaagacctgtccaaggtgtcaatgcctgtgcagctcaacgagccgctcaacactctgcagcggctctgcgaggagctggagtacagcagcctcctggaccaggccagccgcatcgccgacccctgcgagcgcatggtgtacatcgcagcctttgctgtctcggcctactcctccacataccaccgagccggctgcaagcccttcaaccctgtcctgggggagacctacgagtgtgagcggcctgaccgaggcttccgcttcatcagtgagcaggtctcccaccacccccctatctcggcctgccatgcagagtctgagaacttcgccttctggcaagatatgaagtggaagaacaagttctggggcaaatccctggagattgtgcctgtgggaacagtcaacgtcagcctgcccaggtttggggaccactttgagtggaacaaggtgacatcctgcattcacaatgtcctgagtggtcagcgctggatcgagcactatggggaggtgctcatccgaaacacacaggacagctcctgccactgcaagatcaccttctgcaaggccaagtactggagttccaatgtccacgaggtgcagggcgctgtgctcagtcggagtggccgtgtcctccaccgactctttgggaagtggcacgaggggctgtaccggggacccacgccaggtggccagtgcatctggaaacccaactcaatgccccccgaccatgagcgaaacttcggcttcacccagtttgccttggagctgaatgagctgacagcagagctgaaacggtcgctgccttccaccgacacgagactccggccagaccagaggtacctggaggaggggaacatacaggccgctgaggcccagaagagaaggatcgagcagctgcagcgagacaggcgcaaagtcatggaggaaaacaacatcgtacaccaggctcgcttcttcaggcggcagacagatagcagcgggaaagagtggtgggtgaccaacaatacctactggaggctgcgggccgagccaggctacgggaacatggatggggccgtgctctggtagccctggccccgggggcaggaggctctggttcctcactcctcctgcctccaccccctaccatggacacatgggtgaggccgggctccccgcctcactgcccttgagaccaaaggggcagccctggccctccctcccctctgctggccagagggtctgcatctcagcccacccccaaccccaccgtttggggtgagaagcagaatctgtgcttccccagtctccttgccccagacaaccagcatgtaagacccttcccgcttcaccattccgattcctgtcccctttggggtacttgggggagactctggctcccaggatctgttccctatttcagtgccttcctaggacacaggggactccttgacgctccccaggctttctgtgcccaggcctctgtccccagcggtgaggttgcagtgagtgaaggagaggaggtgatctgttctccctccccttctgcccatctccagcatcttcttccccttccctggccctgcagggccttctccagctccctttggttagtccctggccatccctcctgtcctggatcccttctccctaactgcaaaatgcctgcagcttccagctccttcgtccctgatcctcaagcggttccctcccgtctcagctcagcggatcccccagagtggaggaggcctctccatgaggaggggagcagcccaaggcacctgtcctctgacccaccggcagcgagtgcgcaggtgtgagtgtaagttcatgtaggagagtgtatgcgtgtgcgcctgtgccctgcttgcaggcaagcagggctccctcatgtagcccggccttccccctgctgggggtccaccacatcgctgctctttctcacagtctgcctctgatgagggcgaattgctatgacattccaagctccaataaagactgtcccaga

SEQ ID NO: 444444 - DNA, 3979 bp, Homo sapiens
cagcagctgctgccactgctcagcgcggtgaggagggagccggtgactcggagacggtgactcagaggcagagcggcgcaagggccaaggagtactggcgtccatggaccctggggaccccgtcaggagcaggtgacatccttccccttccaccctgctccctgctctacatccccagcagggagtggcctctcccttctccatggacttccaagagagggacccgcccttcctgcctgagagcgctcagtcctcaaagcccagcagtgctcagcaggcctctgagctgtgggaggtggtggaggagcctcgggtcaggctggggacagagggtgtcatgcctgagaggcaggaaggtcacctgctcaagaagaggaagtggcctctgaagggctggcacaagagatactttgtgctcgaggacgggatccttcattatgcaacaacccggcaagacgtgagcccgggcagtggcttggggttgtgggaggagtctggccccagtatgccctgggcaggcatggggtatctggaatcgaccagagcagggtctgaatcccaggtccaccacttgctgaatgtgtgatctcgggcaagttacatccctgggccatagcttcctcacctctaatgggagagcaccatcccccaggtgcagagctgtcatggtaagggaggtcatacgtacaaggctctctggacagggcagaataagtgcccaagaaatgggggctttaccaccctcatcctggtcccattctcaggctgggaacaaggaactgaaggcctgggtacccaggatctctctgggagggtgttgccttccacaaccctgcagacccctgagggtgggaatagtttttcttgatctgtgacttcttagagaccaagatgtgacttgacgtaggggagcgttctgcacatgggaggatgattgacaagtctctactgatagtgtgacttggacatgagggtgaacctgccacctggcccttgagcctagaatggcatcagggagatggtggctctatggctctgagagcctaaaacaggtcccctctccctctaccaacacttcacccccagatcaccaaggggaagctccatggctccatcgatgtccggctgtcggtcatgtccatcaacaaaaaggcccagcgcattgaccttgacactgaagacaacatctaccacctcaagatcaaatcccaggacctattccagagctgggtggcgcagctgcgtgcccaccgcctagcccaccgcctggacatgccccgtggctcactgcccagtactgctcaccggaaggttcctggtgcccagcttccaacagcagctactgcctcagccctacctgggcttggaccgcgggagaaagtgtcttcctggctgagggacagtgatgggctggaccgctgctctcatgagctctctgagtgtcaggggaagctccaggaactacacaggctcctccagagcctggagtccctgcaccgaatcccctcagcccctgttatccccacacaccaggcctcagtgacaaccgaaagacccaagaaggggaaacggacaagccgcatgtggtgcacccagagctttgccaaggatgacaccattggacgggttggtcgtctccatggctctgttcccaacctgtctcgctacctggagtctcgggactcctcgggcacccgtgggctgccacccacagactatgcccacctgcagcgcagcttctgggccctggcccagaaggtgcacagctccctcagcagcgtcctggccgccctcaccatggaacgggaccaactgagggacatgcaccagggctcagagttgtcaagaatgggggtgaggcctgggggacagggtgactggtgcggggagagggcttcaagctgaggactgccagcctggggtccgatagcagatctgggtcagggtggggggttggcagaggcagtctctgcagagatgcggcaaggtggggaggacctcatcctcctggcaccgtgtccctcaccctctccctgcaggtctctgaggcctccactggccagaggcgcctccactcactgtccacctcctccgacaccacggcggactctttcagctccctcaaccctgaggagcaagaagctctgtacatgaaggggcgcgagctcaccccccagctatcgcagaccagcatcctgtcccttgctgattcccacacggagttcttcgatgcctgcgaggttctcctctccgccagctcttctgagaatgagggctcagaggaggaggagtcctgtaccagtgaaatcaccaccagcctgtctgaggagatgctggacctcaggggagctgagcgctgtcagaaaggggggtgtgttccagggagacccatggggccaccccgccgtcgctgcctgccggcggccagcgggcctggggctgacgtgagcctgtggaacattctgcgcaacaacatcggcaaagacctgtccaaggtgtcaatgcctgtgcagctcaacgagccgctcaacactctgcagcggctctgcgaggagctggagtacagcagcctcctggaccaggccagccgcatcgccgacccctgcgagcgcatggtgtacatcgcagcctttgctgtctcggcctactcctccacataccaccgagccggctgcaagcccttcaaccctgtcctgggggagacctacgagtgtgagcggcctgaccgaggcttccgcttcatcagtgagcaggtctcccaccacccccctatctcggcctgccatgcagagtctgagaacttcgccttctggcaagatatgaagtggaagaacaagttctggggcaaatccctggagattgtgcctgtgggaacagtcaacgtcagcctgcccaggtttggggaccactttgagtggaacaaggtgacatcctgcattcacaatgtcctgagtggtcagcgctggatcgagcactatggggaggtgctcatccgaaacacacaggacagctcctgccactgcaagatcaccttctgcaaggccaagtactggagttccaatgtccacgaggtgcagggcgctgtgctcagtcggagtggccgtgtcctccaccgactctttgggaagtggcacgaggggctgtaccggggacccacgccaggtggccagtgcatctggaaacccaactcaatgccccccgaccatgagcgaaacttcggcttcacccagtttgccttggagctgaatgagctgacagcagagctgaaacggtcgctgccttccaccgacacgagactccggccagaccagaggtacctggaggaggggaacatacaggccgctgaggcccagaagagaaggatcgagcagctgcagcgagacaggcgcaaagtcatggaggaaaacaacatcgtacaccaggctcgcttcttcaggcggcagacagatagcagcgggaaagagtggtgggtgaccaacaatacctactggaggctgcgggccgagccaggctacgggaacatggatggggccgtgctctggtagccctggccccgggggcaggaggctctggttcctcactcctcctgcctccaccccctaccatggacacatgggtgaggccgggctccccgcctcactgcccttgagaccaaaggggcagccctggccctccctccctcccgtctcagctcagcggatcccccagagtggaggaggcctctccatgaggaggggagcagcccaaggcacctgtcctctgacccaccggcagcgagtgcgcaggtgtgagtgtaagttcatgtaggagagtgtatgcgtgtgcgcctgtgccctgcttgcaggcaagcagggctccctcatgtagcccggccttccccctgctgggggtccaccacatcgctgctctttctcacagtctgcctctgatgagggcgaattgctatgacattccaagctccaataaagactgtcccaga

SEQ ID NO: 444445 - DNA, 334 bp, Homo sapiens
gttggtcgtctccatggctctgttcccaacctgtctcgctacctggagtctcgggactcctcgggcacccgtgggctgccacccacagactatgcccacctgcagcgcagcttctgggccctggcccagaagggtaagtgcctgctgggaggggctggtggggagcggacaggagcgagcgaggactctgatggtctgccccactccctgtagtgcacagctccctcagcagcgtcctggccgccctcaccatggaacgggaccaactgagggacatgcaccagggctcagagttgtcaagaatgggggtgaggcctgggggacagggtgactg

SEQ ID NO: 444446 - DNA, 4464 bp, Homo sapiens
cagcagctgctgccactgctcagcgcggtgaggagggagccggtgactcggagacggtgactcagaggcagagcggcgcaagggccaaggagtactggcgtccatggaccctggggaccccgtcaggagcaggtgacatccttccccttccaccctgctccctgctctacatccccagcagggagtggcctctcccttctccatggacttccaagagagggacccgcccttcctgcctgagagcgctcagtcctcaaagcccagcagtgctcagcaggcctctgagctgtgggaggtggtggaggagcctcgggtcaggctggggacagagggtgtcatgcctgagaggcaggaaggtcacctgctcaagaagaggaagtggcctctgaagggctggcacaagagatactttgtgctcgaggacgggatccttcattatgcaacaacccggcaagacgtgagcccgggcagtggcttggggttgtgggaggagtctggccccagtatgccctgggcaggcatggggtatctggaatcgaccagagcagggtctgaatcccaggtccaccacttgctgaatgtgtgatctcgggcaagttacatccctgggccatagcttcctcacctctaatgggagagcaccatcccccaggtgcagagctgtcatggtaagggaggtcatacgtacaaggctctctggacagggcagaataagtgcccaagaaatgggggctttaccaccctcatcctggtcccattctcaggctgggaacaaggaactgaaggcctgggtacccaggatctctctgggagggtgttgccttccacaaccctgcagacccctgagggtgggaatagtttttcttgatctgtgacttcttagagaccaagatgtgacttgacgtaggggagcgttctgcacatgggaggatgattgacaagtctctactgatagtgtgacttggacatgagggtgaacctgccacctggcccttgagcctagaatggcatcagggagatggtggctctatggctctgagagcctaaaacaggtcccctctccctctaccaacacttcacccccagatcaccaaggggaagctccatggctccatcgatgtccggctgtcggtcatgtccatcaacaaaaaggcccagcgcattgaccttgacactgaagacaacatctaccacctcaagatcaaatcccaggacctattccagagctgggtggcgcagctgcgtgcccaccgcctagcccaccgcctggacatgccccgtggctcactgcccagtactgctcaccggaaggttcctggtgcccagcttccaacagcagctactgcctcagccctacctgggcttggaccgcgggagaaagtgtcttcctggctgagggacagtgatgggctggaccgctgctctcatgagctctctgagtgtcaggggaagctccaggaactacacaggctcctccagagcctggagtccctgcaccgaatcccctcagcccctgttatccccacacaccaggcctcagtgacaaccgaaagacccaagaaggggaaacggacaagccgcatgtggtgcacccagagctttgccaaggatgacaccattggacgggttggtcgtctccatggctctgttcccaacctgtctcgctacctggagtctcgggactcctcgggcacccgtgggctgccacccacagactatgcccacctgcagcgcagcttctgggccctggcccagaaggtgcacagctccctcagcagcgtcctggccgccctcaccatggaacgggaccaactgagggacatgcaccagggctcagagttgtcaagaatgggggtgaggcctgggggacagggtgactggtgcggggagagggcttcaagctgaggactgccagcctggggtccgatagcagatctgggtcagggtggggggttggcagaggcagtctctgcagagatgcggcaaggtggggaggacctcatcctcctggcaccgtgtccctcaccctctccctgcaggtctctgaggcctccactggccagaggcgcctccactcactgtccacctcctccgacaccacggcggactctttcagctccctcaaccctgaggagcaagaagctctgtacatgaaggggcgcgagctcaccccccagctatcgcagaccagcatcctgtcccttgctgattcccacacggagttcttcgatgcctgcgaggttctcctctccgccagctcttctgagaatgagggctcagaggaggaggagtcctgtaccagtgaaatcaccaccagcctgtctgaggagatgctggacctcaggggagctgagcgctgtcagaaaggggggtgtgttccagggagacccatggggccaccccgccgtcgctgcctgccggcggccagcgggcctggggctgacgtgagcctgtggaacattctgcgcaacaacatcggcaaagacctgtccaaggtgtcaatgcctgtgcagctcaacgagccgctcaacactctgcagcggctctgcgaggagctggagtacagcagcctcctggaccaggccagccgcatcgccgacccctgcgagcgcatggtgtacatcgcagcctttgctgtctcggcctactcctccacataccaccgagccggctgcaagcccttcaaccctgtcctgggggagacctacgagtgtgagcggcctgaccgaggcttccgcttcatcagtgagcaggtctcccaccacccccctatctcggcctgccatgcagagtctgagaacttcgccttctggcaagatatgaagtggaagaacaagttctggggcaaatccctggagattgtgcctgtgggaacagtcaacgtcagcctgcccaggtttggggaccactttgagtggaacaaggtgacatcctgcattcacaatgtcctgagtggtcagcgctggatcgagcactatggggaggtgctcatccgaaacacacaggacagctcctgccactgcaagatcaccttctgcaaggccaagtactggagttccaatgtccacgaggtgcagggcgctgtgctcagtcggagtggccgtgtcctccaccgactctttgggaagtggcacgaggggctgtaccggggacccacgccaggtggccagtgcatctggaaacccaactcaatgccccccgaccatgagcgaaacttcggcttcacccagtttgccttggagctgaatgagctgacagcagagctgaaacggtcgctgccttccaccgacacgagactccggccagaccagaggtacctggaggaggggaacatacaggccgctgaggcccagaagagaaggatcgagcagctgcagcgagacaggcgcaaagtcatggaggaaaacaacatcgtacaccaggctcgcttcttcaggcggcagacagatagcagcgggaaagagtggtgggtgaccaacaatacctactggaggctgcgggccgagccaggctacgggaacatggatggggccgtgctctggtagccctggccccgggggcaggaggctctggttcctcactcctcctgcctccaccccctaccatggacacatgggtgaggccgggctccccgcctcactgcccttgagaccaaaggggcagccctggccctccctcccctctgctggccagagggtctgcatctcagcccacccccaaccccaccgtttggggtgagaagcagaatctgtgcttccccagtctccttgccccagacaaccagcatgtaagacccttcccgcttcaccattccgattcctgtcccctttggggtacttgggggagactctggctcccaggatctgttccctatttcagtgccttcctaggacacaggggactccttgacgctccccaggctttctgtgcccaggcctctgtccccagcggtgaggttgcagtgagtgaaggagaggaggtgatctgttctccctccccttctgcccatctccagcatcttcttccccttccctggccctgcagggccttctccagctccctttggttagtccctggccatccctcctgtcctggatcccttctccctaactgcaaaatgcctgcagcttccagctccttcgtccctgatcctcaagcggttccctcccgtctcagctcagcggatcccccagagtggaggaggcctctccatgaggaggggagcagcccaaggcacctgtcctctgacccaccggcagcgagtgcgcaggtgtgagtgtaagttcatgtaggagagtgtatgcgtgtgcgcctgtgccctgcttgcaggcaagcagggctccctcatgtagcccggccttccccctgctgggggtccaccacatcgctgctctttctcacagtctgcctctgatgagggcgaattgctatgacattccaagctccaataaagactgtcccaga

SEQ ID NO: 444447 - DNA, 4414 bp, Homo sapiens
cagcagctgctgccactgctcagcgcggtgaggagggagccggtgactcggagacggtgactcagaggcagagcggcgcaagggccaaggagtactggcgtccatggaccctggggaccccgtcaggagcaggtgacatccttccccttccaccctgctccctgctctacatccccagcagggagtggcctctcccttctccatggacttccaagagagggacccgcccttcctgcctgagagcgctcagtcctcaaagcccagcagtgctcagcaggcctctgagctgtgggaggtggtggaggagcctcgggtcaggctggggacagagggtgtcatgcctgagaggcaggaaggtcacctgctcaagaagaggaagtggcctctgaagggctggcacaagagatactttgtgctcgaggacgggatccttcattatgcaacaacccggcaagacgtgagcccgggcagtggcttggggttgtgggaggagtctggccccagtatgccctgggcaggcatggggtatctggaatcgaccagagcagggtctgaatcccaggtccaccacttgctgaatgtgtgatctcgggcaagttacatccctgggccatagcttcctcacctctaatgggagagcaccatcccccaggtgcagagctgtcatggtaagggaggtcatacgtacaaggctctctggacagggcagaataagtgcccaagaaatgggggctttaccaccctcatcctggtcccattctcaggctgggaacaaggaactgaaggcctgggtacccaggatctctctgggagggtgttgccttccacaaccctgcagacccctgagggtgggaatagtttttcttgatctgtgacttcttagagaccaagatgtgacttgacgtaggggagcgttctgcacatgggaggatgattgacaagtctctactgatagtgtgacttggacatgagggtgaacctgccacctggcccttgagcctagaatggcatcagggagatggtggctctatggctctgagagcctaaaacaggtcccctctccctctaccaacacttcacccccagatcaccaaggggaagctccatggctccatcgatgtccggctgtcggtcatgtccatcaacaaaaaggcccagcgcattgaccttgacactgaagacaacatctaccacctcaagatcaaatcccaggacctattccagagctgggtggcgcagctgcgtgcccaccgcctagcccaccgcctggacatgccccgtggctcactgcccagtactgctcaccggaaggttcctggtgcccagcttccaacagcagctactgcctcagccctacctgggcttggaccgcgggagaaagtgtcttcctggctgagggacagtgatgggctggaccgctgctctcatgagctctctgagtgtcaggggaagctccaggaactacacaggctcctccagagcctggagtccctgcaccgaatcccctcagcccctgttatccccacacaccaggcctcagtgacaaccgaaagacccaagaaggggaaacggacaagccgcatgtggtgcacccagagctttgccaaggatgacaccattggacgggttggtcgtctccatggctctgttcccaacctgtctcgctacctggagtctcgggactcctcgggcacccgtgggctgccacccacagactatgcccacctgcagcgcagcttctgggccctggcccagaaggtgcacagctccctcagcagcgtcctggccgccctcaccatggaacgggaccaactgagggacatgcaccagggctcagagttgtcaagaatgggggtgaggcctgggggacagggtgactggtgcggggagagggcttcaagctgaggactgccagcctggggtccgatagcagatctgggtcagggtggggggttggcagaggcagtctctgcagagatgcggcaaggtggggaggacctcatcctcctggcaccgtgtccctcaccctctccctgcaggtctctgaggcctccactggccagaggcgcctccactcactgtccacctcctccgacaccacggcggactctttcagctccctcaaccctgaggagcaagaagctctgtacatgaaggggcgcgagctcaccccccagctatcgcagaccagcatcctgtcccttgctgattcccacacggagttcttcgatgcctgcgaggttctcctctccgccagctcttctgagaatgagggctcagaggaggaggagtcctgtaccagtgaaatcaccaccagcctgtctgaggagatgctggacctcaggggagctgagcgctgtcagaaaggggggtgtgttccagggagacccatggggccaccccgccgtcgctgcctgccggcggccagcgggcctggggctgacgtgagcctgtggaacattctgcgcaacaacatcggcaaagacctgtccaaggtgtcaatgcctgtgcagctcaacgagccgctcaacactctgcagcggctctgcgaggagctggagtacagcagcctcctggaccaggccagccgcatcgccgacccctgcgagcgcatggtgtacatcgcagcctttgctgtctcggcctactcctccacataccaccgagccggctgcaagcccttcaaccctgtcctgggggagacctacgagtgtgagcggcctgaccgaggcttccgcttcatcagtgagcaggtctcccaccacccccctatctcggcctgccatgcagagtctgagaacttcgccttctggcaagatatgaagtggaagaacaagttctggggcaaatccctggagattgtgcctgtgggaacagtcaacgtcagcctgcccaggtttggggaccactttgagtggaacaaggtgacatcctgcattcacaatgtcctgagtggtcagcgctggatcgagcactatggggaggtgctcatccgaaacacacaggacagctcctgccactgcaagatcaccttctgcaaggccaagtactggagttccaatgtccacgaggtgcagggcgctgtgctcagtcggagtggccgtgtcctccaccgactctttgggaagtggcacgaggggctgtaccggggacccacgccaggtggccagtgcatctggaaacccattggagctgaatgagctgacagcagagctgaaacggtcgctgccttccaccgacacgagactccggccagaccagaggtacctggaggaggggaacatacaggccgctgaggcccagaagagaaggatcgagcagctgcagcgagacaggcgcaaagtcatggaggaaaacaacatcgtacaccaggctcgcttcttcaggcggcagacagatagcagcgggaaagagtggtgggtgaccaacaatacctactggaggctgcgggccgagccaggctacgggaacatggatggggccgtgctctggtagccctggccccgggggcaggaggctctggttcctcactcctcctgcctccaccccctaccatggacacatgggtgaggccgggctccccgcctcactgcccttgagaccaaaggggcagccctggccctccctcccctctgctggccagagggtctgcatctcagcccacccccaaccccaccgtttggggtgagaagcagaatctgtgcttccccagtctccttgccccagacaaccagcatgtaagacccttcccgcttcaccattccgattcctgtcccctttggggtacttgggggagactctggctcccaggatctgttccctatttcagtgccttcctaggacacaggggactccttgacgctccccaggctttctgtgcccaggcctctgtccccagcggtgaggttgcagtgagtgaaggagaggaggtgatctgttctccctccccttctgcccatctccagcatcttcttccccttccctggccctgcagggccttctccagctccctttggttagtccctggccatccctcctgtcctggatcccttctccctaactgcaaaatgcctgcagcttccagctccttcgtccctgatcctcaagcggttccctcccgtctcagctcagcggatcccccagagtggaggaggcctctccatgaggaggggagcagcccaaggcacctgtcctctgacccaccggcagcgagtgcgcaggtgtgagtgtaagttcatgtaggagagtgtatgcgtgtgcgcctgtgccctgcttgcaggcaagcagggctccctcatgtagcccggccttccccctgctgggggtccaccacatcgctgctctttctcacagtctgcctctgatgagggcgaattgctatgacattccaagctccaataaagactgtcccaga

SEQ ID NO: 444448 - DNA, 1286 bp, Homo sapiens
agagatctaagccttgggtagcgagaacactcctgggaacctatttagcataagagagttggagctgaatgagctgacagcagagctgaaacggtcgctgccttccaccgacacgagactccggccagaccagaggtacctggaggaggggaacatacaggccgctgaggcccagaagagaaggatcgagcagctgcagcgagacaggcgcaaagtcatggaggaaaacaacatcgtacaccaggctcgcttcttcaggcggcagacagatagcagcgggaaagagtggtgggtgaccaacaatacctactggaggctgcgggccgagccaggctacgggaacatggatggggccgtgctctggtagccctggccccgggggcaggaggctctggttcctcactcctcctgcctccaccccctaccatggacacatgggtgaggccgggctccccgcctcactgcccttgagaccaaaggggcagccctggccctccctcccctctgctggccagagggtctgcatctcagcccacccccaaccccaccgtttggggtgagaagcagaatctgtgcttccccagtctccttgccccagacaaccagcatgtaagacccttcccgcttcaccattccgattcctgtcccctttggggtacttgggggagactctggctcccaggatctgttccctatttcagtgccttcctaggacacaggggactccttgacgctccccaggctttctgtgcccaggcctctgtccccagcggtgaggttgcagtgagtgaaggagaggaggtgatctgttctccctccccttctgcccatctccagcatcttcttccccttccctggccctgcagggccttctccagctccctttggttagtccctggccatccctcctgtcctggatcccttctccctaactgcaaaatgcctgcagcttccagctccttcgtccctgatcctcaagcggttccctcccgtctcagctcagcggatcccccagagtggaggaggcctctccatgaggaggggagcagcccaaggcacctgtcctctgacccaccggcagcgagtgcgcaggtgtgagtgtaagttcatgtaggagagtgtatgcgtgtgcgcctgtgccctgcttgcaggcaagcagggctccctcatgtagcccggccttccccctgctgggggtccaccacatcgctgctctttctcacagtctgcctctgatgagggcgaattgctatgacattccaagctccaataaagactgtcccaga

SEQ ID NO: 444449 - DNA, 675 bp, Homo sapiens
agcggagtctctcccagcgaccgccgcgggggcaaggcctggagctgtggttcgaatttgtgcaggcagcgggtgctggcttttagggtccgccgcctctctgcctaatgagctgcaccaggtaggttcgctgcaactctgcgcgctaggaacacaggggaacgcgcagctgtggggaagttggggggcgtttcagttctatcatctctggaaatggacaccccagggggaggacaagtggactgactgcgtagttgaatctggcaaccgagaggccttggaggtgtagaaatttggctctatttcttaagcagagcctattttagtaatcagcatcttaaagcagaaattatcttaacgtgaatcagcttgagttaggattttctcatggatgcggctgttcttttggtcctgcacaaatgtcccaaagactcgggcagctgaagtggtgagaacagcactctgacattgctggttaggtggtttagcttggaggaaaaaaattacaggacgacgtttgcattcattcgtccttcttatcacagtttgccatagcaaaatctcaagagtttgagcaaacgattacttttaactcttgtccaggacttaaagttccaaggaaatcacccaaactaaaactgtctttctataaatgcaaaaagtaaaaaaaaaaaa

SEQ ID NO: 444450 - DNA, 1686 bp, Homo sapiens
agcggagtctctcccagcgaccgccgcgggggcaaggcctggagctgtggttcgaatttgtgcaggcagcgggtgctggcttttagggtccgccgcctctctgcctaatgagctgcaccagaatgatccaggttttagatccacgtcctttgacaagttcggtcatgcccgtggatgtggccatgaggctttgcttggcacattcaccacctgtgaagagtttcctgggcccgtacgatgaatttcaacgacgacattttgtgaataaattaaagcccctgaaatcatgtctcaatataaaacacaaagccaaatcacagaatgactggaagtgctcacacaaccaagccaagaagcgcgttgtgtttgctgactccaagggcctctctctcactgcgatccatgtcttctccgacctcccagaagaaccagcgtgggatctgcagtttgatctcttggaccttaatgatatctcctctgccttaaaacaccacgaggagaaaaacttgattttagatttccctcagccttcaaccgattacttaagtttccggagccactttcagaagaactttgtctgtctggagaactgctcgttgcaagagcgaacagtgacagggactgttaaagtcaaaaatgtgagttttgagaagaaagttcagatccgtatcactttcgattcttggaaaaactacactgacgtagactgtgtctatatgaaaaatgtgtatggtggcacagatagtgataccttctcatttgccattgacttaccccctgtcattccaactgagcagaaaattgagttctgcatttcttaccatgctaatgggcaagtcttttgggacaacaatgatggtcagaattatagaattgttcatgttcaatggaagcctgatggggtgcagacacagatggcaccccaggactgtgcattccaccagacgtctcctaagacagagttagagtcaacaatctttggcagtccgaggctggctagtgggctcttcccagagtggcagagctgggggagaatggagaacttggcctcttatcgatgaattaagcaacaatgtaactggtcttgacttgtcatattcccccatgcaatcctaggtctgtattgctcaattttaggaagcctttgctactccatcagtaggtttagatttgagcttttgagacctggctatggaaaagaaagacacttgagaatttagtgttggggtctgtacagatgatgctacccaatttggctttgaaggatcaagtaacaggttgaaaactatttttataaaggtaatactttttcagttcccttcttccttccctctcaatccactagctttcatgttgggcaaggaaaagttgaggaaggatggctgatggtgatgtgccatggtggaaaagtactatcggaataactctgcagtgacagaatttgaagtttggctagcatccatacttttctactgtaaatatttcactctcctctagctatccttgatgagcttctcactttaagaataaatgtgtttgatataaggcctgagtatattttctttctcaaagccacagtcaaataagaaactcaactgacattctcatttttcatttaggaacaactgagcagagttagtatggaccaagacatggatccatctgaggatattcacaaggccccag

SEQ ID NO: 444451 - DNA, 1190 bp, Homo sapiens
agcggagtctctcccagcgaccgccgcgggggcaaggcctggagctgtggttcgaatttgtgcaggcagcgggtgctggcttttagggtccgccgcctctctgcctaatgagctgcaccagaatgatccaggttttagatccacgtcctttgacaagttcggtcatgcccgtggatgtggccatgaggctttgcttggcacattcaccacctgtgaagagtttcctgggcccgtacgatgaatttcaacgacgacattttgtgaataaattaaagcccctgaaatcatgtctcaatataaaacacaaagccaaatcacagaatgactggaagtgctcacacaaccaagccaagaagcgcgttgtgtttgctgactccaagggcctctctctcactgcgatccatgtcttctccgacctcccagaagaaccagcgtgggatctgcagtttgatctcttggaccttaatgatatctcctctgccttaaaacaccacgaggagaaaaacttgattttagatttccctcagccttcaaccgattacttaagtttccggagccactttcagaagaactttgtctgtctggagaactgctcgttgcaagagcgaacagtgacagggactgttaaacctttctgttcagatgtgatctataaaaaatcataatttggggaaagtttaagcaaatctggctttgtagtcctgatgttataagtgactttgtgatcaaactgtcaggcttgggttcttgttatagaatgcttggtatagaaaaaccatgccatcattaatggctaacaacacgtagggacttcatgtcatgtcaaagatagctctttgcaagtgccttgattaaaccagaaaactgtcatcgtttaacccaaatatctgaatggtcatctggtaactcatgggtttttggcctcataagatggtccactctgtacacaggcattcctcctgcaataatgttgtatctttgagaccgttgtcagtgtacacaactcacatccttcatattgaaggtgactcatttttctgcacacttttttgatgtgatgcttgacgtgaggcccgacactaggattctcaatgcaagaatccagtaccttgcacatagaagtagcaacccatcctggctatttatctggggtctttttttaaaaatggtgtactggtgaggggataaag

SEQ ID NO: 444452 - DNA, 2545 bp, Homo sapiens
agcggagtctctcccagcgaccgccgcgggggcaaggcctggagctgtggttcgaatttgtgcaggcagcgggtgctggcttttagggtccgccgcctctctgcctaatgagctgcaccagaatgatccaggttttagatccacgtcctttgacaagttcggtcatgcccgtggatgtggccatgaggctttgcttggcacattcaccacctgtgaagagtttcctgggcccgtacgatgaatttcaacgacgacattttgtgaataaattaaagcccctgaaatcatgtctcaatataaaacacaaagccaaatcacagaatgactggaagtgctcacacaaccaagccaagaagcgcgttgtgtttgctgactccaagggcctctctctcactgcgatccatgtcttctccgacctcccagaagaaccagcgtgggatctgcagtttgatctcttggaccttaatgatatctcctctgccttaaaacaccacgaggagaaaaacttgattttagatttccctcagccttcaaccgattacttaagtttccggagccactttcagaagaactttgtctgtctggagaactgctcgttgcaagagcgaacagtgacagggactgttaaagtcaaaaatgtgagttttgagaagaaagttcagatccgtatcactttcgattcttggaaaaactacactgacgtagactgtgtctatatgaaaaatgtgtatggtggcacagatagtgataccttctcatttgccattgacttaccccctgtcattccaactgagcagaaaattgagttctgcatttcttaccatgctaatgggcaagtcttttgggacaacaatgatggtcagaattatagaattgttcatgttcaatggaagcctgatggggtgcagacacagatggcaccccaggactgtgcattccaccagacgtctcctaagacagagttagagtcaacaatctttggcagtccgaggctggctagtgggctcttcccagagtggcagagctgggggagaatggagaacttggcctcttatcgatgaattaagcaacaatgtaactggtcttgacttgtcatattcccccatgcaatcctaggtctgtattgctcaattttaggaagcctttgctactccatcagtaggtttagatttgagcttttgagacctggctatggaaaagaaagacacttgagaatttagtgttggggtctgtacagatgatgctacccaatttggctttgaaggatcaagtaacaggttgaaaactatttttataaaggtaatactttttcagttcccttcttccttccctctcaatccactagctttcatgttgggcaaggaaaagttgaggaaggatggctgatggtgatggaaagctgtgttaatggtatgaggaatgtgtgaaaagtatacacaaagggctctgaagctcaagtcagaggagtgggaggtctgatcattgttggtggaaaaacgtaaggttattttgtgtttttaagttggttttacaattctttcctggggaaattatttctggaggggaaaaagatccattctacgtatccttgtggagaaaagctaaataacctttaagaatgtgggtggtattggagaaagaagatgaattatagctccggagaatcaagatcttaagtgaagcctttctgttcagatgtgatctataaaaaatcataatttggggaaagtttaagcaaatctggctttgtagtcctgatgttataagtgactttgtgatcaaactgtcaggcttgggttcttgttatagaatgcttggtatagaaaaaccatgccatcattaatggctaacaacacgtagggacttcatgtcatgtcaaagatagctctttgcaagtgccttgattaaaccagaaaactgtcatcgtttaacccaaatatctgaatggtcatctggtaactcatgggtttttggcctcataagatggtccactctgtacacaggcattcctcctgcaataatgttgtatctttgagaccgttgtcagtgtacacaactcacatccttcatattgaaggtgactcatttttctgcacacttttttgatgtgatgcttgacgtgaggcccgacactaggattctcaatgcaagaatccagtaccttgcacatagaagtagcaacccatcccttgcctattttcatcttgctgttttcttttttttaaaaaaatggatgtgacttgttttgaatgttttgtattatacttgtttttgtgtgtgcataaattcattctgtaggatcttaagaaaaagagtcccagaatgttgcttctattattgtgcacaaccattgagaggtgttacaagaatgcagttaattttaacatgtgtgatgtgccatggtggaaaagtactatcggaataactctgcagtgacagaatttgaagtttggctagcatccatacttttctactgtaaatatttcactctcctctagctatccttgatgagcttctcactttaagaataaatgtgtttgatata

SEQ ID NO: 444453 - DNA, 2687 bp, Homo sapiens
agcggagtctctcccagcgaccgccgcgggggcaaggcctggagctgtggttcgaatttgtgcaggcagcgggtgctggcttttagggtccgccgcctctctgcctaatgagctgcaccagaatgatccaggttttagatccacgtcctttgacaagttcggtcatgcccgtggatgtggccatgaggctttgcttggcacattcaccacctgtgaagagtttcctgggcccgtacgatgaatttcaacgacgacattttgtgaataaattaaagcccctgaaatcatgtctcaatataaaacacaaagccaaatcacagaatgactggaagtgctcacacaaccaagccaagaagcgcgttgtgtttgctgactccaagggcctctctctcactgcgatccatgtcttctccgacctcccagaagaaccagcgtgggatctgcagtttgatctcttggaccttaatgatatctcctctgccttaaaacaccacgaggagaaaaacttgattttagatttccctcagccttcaaccgattacttaagtttccggagccactttcagaagaactttgtctgtctggagaactgctcgttgcaagagcgaacagtgacagggactgttaaagtcaaaaatgtgagttttgagaagaaagttcagatccgtatcactttcgattcttggaaaaactacactgacgtagactgtgtctatatgaaaaatgtgtatggtggcacagatagtgataccttctcatttgccattgacttaccccctgtcattccaactgagcagaaaattgagttctgcatttcttaccatgctaatgggcaagtcttttgggacaacaatgatggtcagaattatagaattgttcatgttcaatggaagcctgatggggtgcagacacagatggcaccccaggactgtgcattccaccagacgtctcctaagacagagttagagtcaacaatctttggcagtccgaggctggctagtgggctcttcccagagtggcagagctgggggagaatggagaacttggcctcttatcgatgaattaagcaacaatgtaactggtcttgacttgtcatattcccccatgcaatcctaggtctgtattgctcaattttaggaagcctttgctactccatcagtaggtttagatttgagcttttgagacctggctatggaaaagaaagacacttgagaatttagtgttggggtctgtacagatgatgctacccaatttggctttgaaggatcaagtaacaggttgaaaactatttttataaaggtaatactttttcagttcccttcttccttccctctcaatccactagctttcatgttgggcaaggaaaagttgaggaaggatggctgatggtgatggaaagctgtgttaatggtatgaggaatgtgtgaaaagtatacacaaagggctctgaagctcaagtcagaggagtgggaggtctgatcattgttggtggaaaaacgtaaggttattttgtgtttttaagttggttttacaattctttcctggggaaattatttctggaggggaaaaagatccattctacgtatccttgtggagaaaagctaaataacctttaagaatgtgggtggtattggagaaagaagatgaattatagctccggagaatcaagatcttaagtgaagcctttctgttcagatgtgatctataaaaaatcataatttggggaaagtttaagcaaatctggctttgtagtcctgatgttataagtgactttgtgatcaaactgtcaggcttgggttcttgttatagaatgcttggtatagaaaaaccatgccatcattaatggctaacaacacgtagggacttcatgtcatgtcaaagatagctctttgcaagtgccttgattaaaccagaaaactgtcatcgtttaacccaaatatctgaatggtcatctggtaactcatgggtttttggcctcataagatggtccactctgtacacaggcattcctcctgcaataatgttgtatctttgagaccgttgtcagtgtacacaactcacatccttcatattgaaggtgactcatttttctgcacacttttttgatgtgatgcttgacgtgaggcccgacactaggattctcaatgcaagaatccagtaccttgcacatagaagtagcaacccatcccttgcctattttcatcttgctgttttcttttttttaaaaaaatggatgtgacttgttttgaatgttttgtattatacttgtttttgtgtgtgcataaattcattctgtaggatcttaagaaaaagagtcccagaatgttgcttctattattgtgcacaaccattgagaggtgttacaagaatgcagttaattttaacatgtgtgatgtgccatggtggaaaagtactatcggaataactctgcagtgacagaatttgaagtttggctagcatccatacttttctactgtaaatatttcactctcctctagctatccttgatgagcttctcactttaagaataaatgtgtttgatataaggcctgagtatattttctttctcaaagccacagtcaaataagaaactcaactgacattctcatttttcatttaggaacaactgagcagagttagtatggaccaagacatggatccatctgaggatattcacaaggccccag

SEQ ID NO: 444454 - DNA, 2023 bp, Homo sapiens
gttgggaagaaaaattggtcagcttggctcggggagaaacctggtaacataaaagcagttcagtggcccagaggttatttttttcctattgctctgaagactgcactggttgctgcaaagctcaggcctgaatgagcaggaaacaaaaaaggccttgcgacccagctgccataaccaccttagaactaccagacgagcacatcagaaccctttgacagccatcccaggtctaaagccacaagtttcttttctatacagtcacaactgcagtaggcagtgaggaagccagagaaatgcgatagcggcatttctctaaagcgggttattaaggatatatacagttacactttttgctgcttttattttcttccaagccaatcaatcagccagttcctagcagagtcagcacatgaacaagatctaagtcatttcttgatgtgagcactggagcttttttttttttacaacgtgacaggaagaggagggagagggtgacgaacaccaggcatttccaggggctatatttcactgtttgttgttgctttgttctgttatattgttggttgttcatagtttttgttgaagctctagcttaagaagaaactttttttaaaaagactgtttggggattctttttccttattatatactgattctacaaaatagaaactacttcattttaattgtatattattcaagcacctttgttgaagctcaaaaaaaatgatgcctctttaaactttagcaattataggagtatttatgtaactatcttatgcttcaaaaaacaaaagtatttgtgtgcatgtgtatataatatatatatatacatatatatttatacacatacaatttatgttttcctgttgaatgtatttttatgagattttaaccagaacaaaggcagataaacaggcattccatagcagtgcttttgatcacttacaaattttttgaataacacaaaatctcattctacctgcagtttaattggaaagatgtgtgtgtgagagtatgtatgtgtgtgtgtgtgtgtgtgtgtgtgcgcgcgcacgcacgccttgagcagtcagcattgcacctgctatggagaagggtattcctttattaaaatcttcctcatttggatttgctttcagttggttttcaatttgctcactggccagagacattgatggcagttcttatctgcatcactaatcagctcctgggatttttttttttttttttcaaacaatggtttgaaacaactactggaatattgtccacaataagctggaagtttgttgtagtatgcctcaaatataactgactgtatactatagtggtaacttttcaaacagcccttagcacttttatactaattaacccatttgtgcattgagttttcttttaaaaatgcttgttgtgaaagacacagatacccagtatgcttaacgtgaaaagaaaatgtgttctgttttgtaaaggaactttcaagtattgttgtaaatacttggacagaggttgctgaactttaaaaaaaattaatttattattataatgacctaatttattaatctgaagattaaccatttttttgtcttagaatatcaaaaagaaaaagaaaaaggtgttctagctgtttgcatcaaaggaaaaaaagatttattatcaaggggcaatatttttatcttttccaaaataaatttgttaatgatacattacaaaaatagattgacatcagcctgattagtataaattttgttggtaattaatccattcctggcataaaaagtctttatcaaaaaaaattgtagatgcttgctttttgttttttcaatcatggccatattatgaaaatactaacaggatataggacaaggtgtaaatttttttattattattttaaagatatgatttatcctgagtgctgtatctattactcttttactttggttcctgttgtgctcttgtaaaagaaaaatataatttcctgaagaataaaatagatatatggcacttggagtgcatcatagttcta

SEQ ID NO: 444455 - DNA, 2049 bp, Homo sapiens
cggcactcgtttttaatttaatgcagcgggcgggggtttaattgtaagactgtgccgtggtgcagacaatgtaaataaaagcagttcagtggcccagaggttatttttttcctattgctctgaagactgcactggttgctgcaaagctcaggcctgaatgagcaggaaacaaaaaaggccttgcgacccagctgccataaccaccttagaactaccagacgagcacatcagaaccctttgacagccatcccaggtctaaagccacaagtttcttttctatacagtcacaactgcagtaggcagtgaggaagccagagaaatgcgatagcggcatttctctaaagcgggttattaaggatatatacagttacactttttgctgcttttattttcttccaagccaatcaatcagccagttcctagcagagtcagcacatgaacaagatctaagtcatttcttgatgtgagcactggagcttttttttttttacaacgtgacaggaagaggagggagagggtgacgaacaccaggcatttccaggggctatatttcactgtttgttgttgctttgttctgttatattgttggttgttcatagtttttgttgaagctctagcttaagaagaaactttttttaaaaagactgtttggggattctttttccttattatatactgattctacaaaatagaaactacttcattttaattgtatattattcaagcacctttgttgaagctcaaaaaaaatgatgcctctttaaactttagcaattataggagtatttatgtaactatcttatgcttcaaaaaacaaaagtatttgtgtgcatgtgtatataatatatatatatacatatatatttatacacatacaatttatgttttcctgttgaatgtatttttatgagattttaaccagaacaaaggcagataaacaggcattccatagcagtgcttttgatcacttacaaattttttgaataacacaaaatctcattctacctgcagtttaattggaaagatgtgtgtgtgagagtatgtatgtgtgtgtgtgtgtgtgtgtgtgtgcgcgcgcacgcacgccttgagcagtcagcattgcacctgctatggagaagggtattcctttattaaaatcttcctcatttggatttgctttcagttggttttcaatttgctcactggccagagacattgatggcagttcttatctgcatcactaatcagctcctgggatttttttttttttttttcaaacaatggtttgaaacaactactggaatattgtccacaataagctggaagtttgttgtagtatgcctcaaatataactgactgtatactatagtggtaacttttcaaacagcccttagcacttttatactaattaacccatttgtgcattgagttttcttttaaaaatgcttgttgtgaaagacacagatacccagtatgcttaacgtgaaaagaaaatgtgttctgttttgtaaaggaactttcaagtattgttgtaaatacttggacagaggttgctgaactttaaaaaaaattaatttattattataatgacctaatttattaatctgaagattaaccatttttttgtcttagaatatcaaaaagaaaaagaaaaaggtgttctagctgtttgcatcaaaggaaaaaaagatttattatcaaggggcaatatttttatcttttccaaaataaatttgttaatgatacattacaaaaatagattgacatcagcctgattagtataaattttgttggtaattaatccattcctggcataaaaagtctttatcaaaaaaaattgtagatgcttgctttttgttttttcaatcatggccatattatgaaaatactaacaggatataggacaaggtgtaaatttttttattattattttaaagatatgatttatcctgagtgctgtatctattactcttttactttggttcctgttgtgctcttgtaaaagaaaaatataatttcctgaagaataaaatagatatatggcacttggagtgcatcatagttcta

SEQ ID NO: 444456 - DNA, 1969 bp, Homo sapiens
gttgggaagaaaaattggtcagcttggctcggggagaaacctggtaacataaaagcagttcagtggcccagaggttatttttttcctattgctctgaagactgcactggttgctgcaaagctcaggcctgaatgagcaggaaacaaatcagaaccctttgacagccatcccaggtctaaagccacaagtttcttttctatacagtcacaactgcagtaggcagtgaggaagccagagaaatgcgatagcggcatttctctaaagcgggttattaaggatatatacagttacactttttgctgcttttattttcttccaagccaatcaatcagccagttcctagcagagtcagcacatgaacaagatctaagtcatttcttgatgtgagcactggagcttttttttttttacaacgtgacaggaagaggagggagagggtgacgaacaccaggcatttccaggggctatatttcactgtttgttgttgctttgttctgttatattgttggttgttcatagtttttgttgaagctctagcttaagaagaaactttttttaaaaagactgtttggggattctttttccttattatatactgattctacaaaatagaaactacttcattttaattgtatattattcaagcacctttgttgaagctcaaaaaaaatgatgcctctttaaactttagcaattataggagtatttatgtaactatcttatgcttcaaaaaacaaaagtatttgtgtgcatgtgtatataatatatatatatacatatatatttatacacatacaatttatgttttcctgttgaatgtatttttatgagattttaaccagaacaaaggcagataaacaggcattccatagcagtgcttttgatcacttacaaattttttgaataacacaaaatctcattctacctgcagtttaattggaaagatgtgtgtgtgagagtatgtatgtgtgtgtgtgtgtgtgtgtgtgtgcgcgcgcacgcacgccttgagcagtcagcattgcacctgctatggagaagggtattcctttattaaaatcttcctcatttggatttgctttcagttggttttcaatttgctcactggccagagacattgatggcagttcttatctgcatcactaatcagctcctgggatttttttttttttttttcaaacaatggtttgaaacaactactggaatattgtccacaataagctggaagtttgttgtagtatgcctcaaatataactgactgtatactatagtggtaacttttcaaacagcccttagcacttttatactaattaacccatttgtgcattgagttttcttttaaaaatgcttgttgtgaaagacacagatacccagtatgcttaacgtgaaaagaaaatgtgttctgttttgtaaaggaactttcaagtattgttgtaaatacttggacagaggttgctgaactttaaaaaaaattaatttattattataatgacctaatttattaatctgaagattaaccatttttttgtcttagaatatcaaaaagaaaaagaaaaaggtgttctagctgtttgcatcaaaggaaaaaaagatttattatcaaggggcaatatttttatcttttccaaaataaatttgttaatgatacattacaaaaatagattgacatcagcctgattagtataaattttgttggtaattaatccattcctggcataaaaagtctttatcaaaaaaaattgtagatgcttgctttttgttttttcaatcatggccatattatgaaaatactaacaggatataggacaaggtgtaaatttttttattattattttaaagatatgatttatcctgagtgctgtatctattactcttttactttggttcctgttgtgctcttgtaaaagaaaaatataatttcctgaagaataaaatagatatatggcacttggagtgcatcatagttcta

SEQ ID NO: 444457 - DNA, 1966 bp, Homo sapiens
gttgggaagaaaaattggtcagcttggctcggggagaaacctggtaacataaaagcagttcagtggcccagaggttatttttttcctattgctctgaagactgcactggttgctgcaaagctcaggcctgaatgagcaggaaacaaaaaaggccttgcgacccagctgccataaccaccttagaactaccagacgagcacatcagaaccctttgacagccatcccaggtctaaagccacaagtttcttttctatacagtcacaactgcagtaggcagtgaggaagccagagaaatgcgatagcggcatttctctaaagcgggttattaaggatatatacagttacactttttgctgcttttattttcttccaagccaatcaatcagccagttcctagcagagtcagcacatgaacaagatctaagtcatttcttgatgtgagcactggagcttttttttttttacaacgtgacaggaagaggagggagagggtgacgaacaccaggcatttccaggggctatatttcactgtttgttgttgctttgttctgttatattgttggttgttcatagtttttgttgaagctctagcttaagaagaaactttttttaaaaagactgtttggggattctttttccttattatatactgattctacaaaatagaaactacttcattttaattgtatattattcaagcacctttgttgaagctcttatgcttcaaaaaacaaaagtatttgtgtgcatgtgtatataatatatatatatacatatatatttatacacatacaatttatgttttcctgttgaatgtatttttatgagattttaaccagaacaaaggcagataaacaggcattccatagcagtgcttttgatcacttacaaattttttgaataacacaaaatctcattctacctgcagtttaattggaaagatgtgtgtgtgagagtatgtatgtgtgtgtgtgtgtgtgtgtgtgtgcgcgcgcacgcacgccttgagcagtcagcattgcacctgctatggagaagggtattcctttattaaaatcttcctcatttggatttgctttcagttggttttcaatttgctcactggccagagacattgatggcagttcttatctgcatcactaatcagctcctgggatttttttttttttttttcaaacaatggtttgaaacaactactggaatattgtccacaataagctggaagtttgttgtagtatgcctcaaatataactgactgtatactatagtggtaacttttcaaacagcccttagcacttttatactaattaacccatttgtgcattgagttttcttttaaaaatgcttgttgtgaaagacacagatacccagtatgcttaacgtgaaaagaaaatgtgttctgttttgtaaaggaactttcaagtattgttgtaaatacttggacagaggttgctgaactttaaaaaaaattaatttattattataatgacctaatttattaatctgaagattaaccatttttttgtcttagaatatcaaaaagaaaaagaaaaaggtgttctagctgtttgcatcaaaggaaaaaaagatttattatcaaggggcaatatttttatcttttccaaaataaatttgttaatgatacattacaaaaatagattgacatcagcctgattagtataaattttgttggtaattaatccattcctggcataaaaagtctttatcaaaaaaaattgtagatgcttgctttttgttttttcaatcatggccatattatgaaaatactaacaggatataggacaaggtgtaaatttttttattattattttaaagatatgatttatcctgagtgctgtatctattactcttttactttggttcctgttgtgctcttgtaaaagaaaaatataatttcctgaagaataaaatagatatatggcacttggagtgcatcatagttcta

SEQ ID NO: 444458 - DNA, 2248 bp, Homo sapiens
gttgggaagaaaaattggtcagcttggctcggggagaaacctggtaacataaaagcagttcagtggcccagaggttatttttttcctattgctctgaagactgcactggttgctgcaaagctcaggcctgaatgagcaggaaacaaaaaaggccttgcgacccagctgccataaccaccttagaactaccagacgagcacatcagaaccctttgacagccatcccaggtctaaagccacaagtttcttttctatacagtcacaactgcagtaggcagtgaggaagccagagaaatgcgatagcggcatttctctaaagcgggttattaaggatatatacagttacactttttgctgcttttattttcttccaagccaatcaatcagccagttcctagcagagtcagcacatgaacaagatctaagtcatttcttgatgtgagcactggagcttttttttttttacaacgtgacaggaagaggagggagagggtgacgaacaccaggcatttccaggggctatatttcactgtttgttgttgctttgttctgttatattgttggttgttcatagtttttgttgaagctctagcttaagaagaaactttttttaaaaagactgtttggggattctttttccttattatatactgattctacaaaatagaaactacttcattttaattgtatattattcaagcacctttgttgaagctcaaaaaaaatgatgcctctttaaactttagcaattataggagtatttatgtaactatcttatgcttcaaaaaacaaaagtatttgtgtgcatgtgtatataatatatatatatacatatatatttatacacatacaatttatgttttcctgttgaatgtatttttatgagattttaaccagaacaaaggcagataaacaggcattccatagcagtgcttttgatcacttacaaattttttgaataacacaaaatctcattctacctgcagtttaattggaaagatgtgtgtgtgagagtatgtatgtgtgtgtgtgtgtgtgtgtgtgtgcgcgcgcacgcacgccttgagcagtcagcattgcacctgctatggagaagggtattcctttattaaaatcttcctcatttggatttgctttcagttggttttcaatttgctcactggccagagacattgatggcagttcttatctgcatcactaatcagctcctgggatttttttttttttttttcaaacaatggtttgaaacaactactggaatattgtccacaataagctggaagtttgttgtagtatgcctcaaatataactgactgtatactatagtggtaacttttcaaacagcccttagcacttttatactaattaacccatttgtgcattgagttttcttttaaaaatgcttgttgtgaaagacacagatacccagtatgcttaacgtgaaaagaaaatgtgttctgttttgtaaaggaactttcaagtattgttgtaaatacttggacagaggttgctgaactttaaaaaaaattaatttattattataatgacctaatttattaatctgaagattaaccatttttttgtcttagaatatcaaaaagaaaaagaaaaaggtgttctagctgtttgcatcaaaggaaaaaaagatttattatcaaggggcaatatttttatcttttccaaaataaatttgttaatgatacattacaaaaatagattgacatcagcctgattagtataaattttgttggtaattaatccattcctggcataaaaagtctttatcaaaaaaaattgtagatgcttgctttttgttttttcaatcatggccatattatgaaaatactaacaggatataggacaaggtgtaaatttttttattattattttaaagatatgatttatcctgagtgctgtatctattactcttttactttggttcctgttgtgctcttgtaaaagaaaaatataatttcctgaagaataaaatagatatatggcacttggagtgcatcatagttctacagtttgtttttgttttcttcaaaaaagctgtaagagaattatctgcaacttgattcttggcaggaaataaacattttgagttgaaatcacacagtgtaacttgcaaaaagattccatctctgagatccgaaagacttttaaggttatcagtccaatgaacccctggtgtaacaagaagtcccgtgcttttgtcattaggcgggtctttcccaaggtatccttgc

SEQ ID NO: 444459 - DNA, 2696 bp, Homo sapiens
gttgggaagaaaaattggtcagcttggctcggggagaaacctggtaacataaaagcagttcagtggcccagaggttatttttttcctattgctctgaagactgcactggttgctgcaaagctcaggcctgaatgagcaggaaacaaaaaaggccttgcgacccagctgccataaccaccttagaactaccagacgagcacatcagaaccctttgacagccatcccaggtctaaagccacaagtttcttttctatacagtcacaactgcagtaggcagtgaggaagccagagaaatgcgatagcggcatttctctaaagcgggttattaaggatatatacagttacactttttgctgcttttattttcttccaagccaatcaatcagccagttcctagcagagtcagcacatgaacaagatctaagtcatttcttgatgtgagcactggagcttttttttttttacaacgtgacaggaagaggagggagagggtgacgaacaccaggcatttccaggggctatatttcactgtttgttgttgctttgttctgttatattgttggttgttcatagtttttgttgaagctctagcttaagaagaaactttttttaaaaagactgtttggggattctttttccttattatatactgattctacaaaatagaaactacttcattttaattgtatattattcaagcacctttgttgaagctcaaaaaaaatgatgcctctttaaactttagcaattataggagtatttatgtaactatcttatgcttcaaaaaacaaaagtatttgtgtgcatgtgtatataatatatatatatacatatatatttatacacatacaatttatgttttcctgttgaatgtatttttatgagattttaaccagaacaaaggcagataaacaggcattccatagcagtgcttttgatcacttacaaattttttgaataacacaaaatctcattctacctgcagtttaattggaaagatgtgtgtgtgagagtatgtatgtgtgtgtgtgtgtgtgtgtgtgtgcgcgcgcacgcacgccttgagcagtcagcattgcacctgctatggagaagggtattcctttattaaaatcttcctcatttggatttgctttcagttggttttcaatttgctcactggccagagacattgatggcagttcttatctgcatcactaatcagctcctgggatttttttttttttttttcaaacaatggtttgaaacaactactggaatattgtccacaataagctggaagtttgttgtagtatgcctcaaatataactgactgtatactatagtggtaacttttcaaacagcccttagcacttttatactaattaacccatttgtgcattgagttttcttttaaaaatgcttgttgtgaaagacacagatacccagtatgcttaacgtgaaaagaaaatgtgttctgttttgtaaaggaactttcaagtattgttgtaaatacttggacagaggttgctgaactttaaaaaaaattaatttattattataatgacctaatttattaatctgaagattaaccatttttttgtcttagaatatcaaaaagaaaaagaaaaaggtgttctagctgtttgcatcaaaggaaaaaaagatttattatcaaggggcaatatttttatcttttccaaaataaatttgttaatgatacattacaaaaatagattgacatcagcctgattagtataaattttgttggtaattaatccattcctggcataaaaagtctttatcaaaaaaaattgtagatgcttgctttttgttttttcaatcatggccatattatgaaaatactaacaggatataggacaaggtgtaaatttttttattattattttaaagatatgatttatcctgagtgctgtatctattactcttttactttggttcctgttgtgctcttgtaaaagaaaaatataatttcctgaagaataaaatagatatatggcacttggagtgcatcatagttctaaaaaaaaaaaaaaaaaaaaaaaaaaaaaaaaaaaaaaaaaaaaaaaaaaaaaaaaaagggggggggccgccgcgcgcccaggaagaaggagtataaagcacaaaaccacaccggtgggggggggcggggccccaacaaagaataaatgaacaaacggcgcaactaagatcccccatcgagagcaaaaagagtggagttagatgcacaacgcaggcggcgggttttctcccacaacaaaaaaaaaacacgcgccgggggacacgacacgacggcattctgaacaacaacaaaaaagtgctccggcgaccccaccggggaatcacaaacacgaggccaagagccgtgataaataaataccgcccgggggggcgcgggaggagccagacccaaaccgcacccaaacaaccgcacaccggcggaccaccaccgacacggacgcaaacagactacatgaagcgtaccctcactcacccactacaagcccgcccaaccaaaaccgcaacagtaagcagacccaacacatcaccaccacaaacccacgcacagaaatacagtgatcgaacccagacgtgcagatccccaaagctacaaaaaacaacacacagagcacacaagatcaaacaacgatgagcccatccacctaacgacaaaaaacacaatgatacgtgctaaa

SEQ ID NO: 444460 - DNA, 1661 bp, Homo sapiens
ggaagaggaaattccagtagccgatcaggagtctgcaaactccggtggtaggggagcgcgctgctgtttagagccacgagttaccggagcgcctgattcctgcgccgaagtcagtggtggccgaaagtccggagtcgctgtaaaacctgagattgtgagccatggtggggagatcccggcggcgcggagcagctaagtgggcagctgtgcgagccaaggcaggtcccacgctcaccgacgaaaatggagatgatttaggattgccaccctcaccaggggacaccagctactaccaagatcaggtagatgactttcatgaggcacgatcccgggccgccttagctaagggctggaatgaagtacagagtggagacgaggaggatggcgaggaggaggaggaggaggtgctagccctagatatggacgatgaggacgacgaagatggagggaatgcgggggaggaggaggaggaggagaatgccgatgatgatggtgggagctccgtgcaaagtgaagctgaggcctctgtggatcccagtttgtcgtggggtcagaggaaaaaactttactatgacacggactatggttccaagtcccgaggccggcagagtcaacaggaggcagaggaggaggaaagagaggaggaggaggaggcacagatcattcagcggcgcctagcccaagcgctgcaagaggatgattttggtgtcgcctgggttgaggcctttgcaaaaccagtgcctcaggtagatgaggctgagacacgggtcgtgaaggatttggctaaagtttcagtgaaagagaagctgaaaatgttgcgaaaggaatcaccagaactcttggagctgatagaagacctgaaagtcaagttgacagaggttaaggatgagctggagccattgttagagttggtggaacaagggatcattccacccggaaaaggaagccaatacttgaggaccaagtacaacctctacttgaattattgctcgaacatcagtttttatttgatcctgaaagctaggagagtcccagcacatggacatcctgtcatagaaaggcttgttacctaccgaaatttgatcaacaagctgtccgttgtggatcagaagctgtcctcagaaattcgtcatctgttgacacttaaggatgatgctgtaaagaaagaactgattccaaaagcaaaatccaccaagcccaaaccaaagtctgtttcaaagacttctgctgctgcctgtgctgttacagatctttctgatgattctgattttgatgaaaaagcaaaactgaagtactataaagaaatagaagacaggcaaaagctaaagagaaagaaagaagaaaatagcactgaagaacaggctcttgaagatcaaaatgcaaagagagctattacctatcaaattgctaaaaataggggacttactcctaggagaaagaagattgatcgcaatcccagagtgaaacacagagagaagttcagaagagccaaaattagaagaagaggccaggttcgtgaagttcgtaaagaagagcaacgttatagtggtgaattatctggcattcgtgcaggagttaaaaagagcattaagcttaaatgaagtttttgcttagcataaggtttttggcagttttggatcaataaatttttacttttaact

SEQ ID NO: 444461 - DNA, 2398 bp, Homo sapiens
ggaagaggaaattccagtagccgatcaggagtctgcaaactccggtggtaggggagcgcgctgctgtttagagccacgagttaccggagcgcctgattcctgcgccgaagtcagtggtggccgaaagtccggagtcgctgtaaaacctgagattgtgagccatggtggggagatcccggcggcgcggagcagctaagtgggcagctgtgcgagccaaggcaggtcccacgctcaccgacgaaaatggagatgatttaggattgccaccctcaccaggggacaccagctactaccaagatcaggtagatgactttcatgaggcacgatcccgggccgccttagctaagggctggaatgaagtacagagtggagacgaggaggatggcgaggaggaggaggaggaggtgctagccctagatatggacgatgaggacgacgaagatggagggaatgcgggggaggaggaggaggaggagaatgccgatgatgatggtgggagctccgtgcaaagtgaagctgaggcctctgtggatcccagtttgtcgtggggtcagaggaaaaaactttactatgacacggactatggttccaagtcccgaggccggcagagtcaacaggaggcagaggaggaggaaagagaggaggaggaggaggcacagatcattcagcggcgcctagcccaagcgctgcaagaggatgattttggtgtcgcctgggttgaggcctttgcaaaaccagtgcctcaggtagatgaggctgagacacgggtcgtgaaggatttggctaaagtttcagtgaaagagaagctgaaaatgttgcgaaaggaatcaccagaactcttggagctgatagaagacctgaaagtcaagttgacagaggttaaggatgagctggagccattgttagagttggtggaacaagggatcattccacccggaaaaggaagccaatacttgaggaccaagtacaacctctacttgaattattgctcgaacatcagtttttatttgatcctgaaagctaggagagtcccagcacatggacatcctgtcatagaaaggcttgttacctaccgaaatttgatcaacaagctgtccgttgtggatcagaagctgtcctcagaaattcgtcatctgttgacacttaaggatgatgctgtaaagaaagaactgattccaaaagcaaaatccaccaagcccaaaccaaagtctgtttcaaagacttctgctgctgcctgtgctgttacagatctttctgatgattctgattttgatgaaaaagcaaaactgaagtactataaagaaatagaagacaggcaaaagctaaagagaaagaaagaagaaaatagcactgaagaacaggctcttgaagatcaaaatgcaaagagagctattacctatcaaattgctaaaaataggggacttactcctaggagaaagaagattgatcgcaatcccagagtgaaacacagagagaagttcagaagagccaaaattagaagaagaggccaggttcgtgaagttcgtaaagaagagcaacgttatagtggtgaattatctggcattcgtgcaggagttaaaaagagcattaagcttaaatgaagtttttgcttagcataaggtttttggcagttttggatcaataaatttttacttttaactaaagtcattgtattaatatataatactttaaattttaaaaattcttgtccacaaggaaatttgtctgggttattggacaatttataagaactatgggagcaatatgaaggtgcttgagaaaagagatgatgttgaagttttccaatattctgttgaagttttccaatattaagtattagcttagggaaatttcacagttcattgtggagtgttaaacttagaacatgtgtaacttttcacataaagagaatgcatctttgacagttatcttatttgtaaggcagcctataaaatagttctgaagtattttatttacctaactataattattgggccagatacttgttaataaatgggcttaatgttaaaaaaaaagaacaaaataaaaaaaaaatacacgaatagataaaaaggaaaatgaaaatctcacataaaattaaaaaattaaaaaaaaaaaatgagatgggcgtgtggccccatgccactaatctaatctaaaaaggaggcttttttagaagaatttttaccttcctgccactgtggcggatgtaactatatcgagaattaaactactttacttccgccctggattacaccccctatttgtctcgataaccaattggttgaattaatttattgccggtggggcctccttccgcctaggtgatatttgaatatacgcaagaatatcaatgccgttcgcgcttttaacttctataccaagcgttgtgatttgg

SEQ ID NO: 444462 - DNA, 1210 bp, Homo sapiens
ctgcctcctgttgactctgccggcctcgggatcgtgcctcatgaaagtcatctacctgatcttggtagtagctggagccattgttagagttggtggaacaagggatcattccacccggaaaaggaagccaatacttgaggaccaagtacaacctctacttgaattattgctcgaacatcagtttttatttgatcctgaaagctaggagagtcccagcacatggacatcctgtcatagaaaggcttgttacctaccgaaatttgatcaacaagctgtccgttgtggatcagaagctgtcctcagaaattcgtcatctgttgacacttaaggatgatgctgtaaagaaagaactgattccaaaagcaaaatccaccaagcccaaaccaaagtctgtttcaaagacttctgctgctgcctgtgctgttacagatctttctgatgattctgattttgatgaaaaagcaaaactgaagtactataaagaaatagaagacaggcaaaagctaaagagaaagaaagaagaaaatagcactgaagaacaggctcttgaagatcaaaatgcaaagagagctattacctatcaaattgctaaaaataggggacttactcctaggagaaagaagattgatcgcaatcccagagtgaaacacagagagaagttcagaagagccaaaattagaagaagaggccaggttcgtgaagttcgtaaagaagagcaacgttatagtggtgaattatctggcattcgtgcaggagttaaaaagagcattaagcttaaatgaagtttttgcttagcataaggtttttggcagttttggatcaataaatttttacttttaactaaagtcattgtattaatatataatactttaaattttaaaaattcttgtccacaaggaaatttgtctgggttattggacaatttataagaactatgggagcaatatgaaggtgcttgagaaaagagatgatgttgaagttttccaatattctgttgaagttttccaatattaagtattagcttagggaaatttcacagttcattgtggagtgttaaacttagaacatgtgtaacttttcacataaagagaatgcatctttgacagttatcttatttgtaaggcagcctataaaatagttctgaagtattttatttacctaactataattattgggccagatacttgttaataaatgggcttaatgttaa

SEQ ID NO: 444463 - DNA, 554 bp, Homo sapiens
gtggtgaattatctggcattcgtgcaggagttaaaaagagcattaagcttaaatgaagtttttgcttagcataaggtttttggcagttttggatcaataaatttttacttttaactaaagtcattgtattaatatataatactttaaattttaaaaattcttgtccacaaggaaatttgtctgggttattggacaatttataagaactatgggagcaatatgaaggtgcttgagaaaagagatgatgttgaagttttccaatattctgttgaagttttccaatattaagtattagcttagggaaatttcacagttcattgtggagtgttaaacttagaacatgtgtaacttttcacataaagagaatgcatctttgacagttatcttatttgtaaggcagcctataaaatagttctgaagtattttatttacctaactataattattgggccagatacttgttaataaatgggcttaatgttaacatggatttcatatgttctgtgtggtttaaaagcataggaatgaaactttggttaaaagcagaaaaagga

SEQ ID NO: 444464 - DNA, 2029 bp, Homo sapiens
ggaagaggaaattccagtagccgatcaggagtctgcaaactccggtggtaggggagcgcgctgctgtttagagccacgagttaccggagcgcctgattcctgcgccgaagtcagtggtggccgaaagtccggagtcgctgtaaaacctgagattgtgagccatggtggggagatcccggcggcgcggagcagctaagtgggcagctgtgcgagccaaggcaggtcccacgctcaccgacgaaaatggagatgatttaggattgccaccctcaccaggggacaccagctactaccaagatcaggtagatgactttcatgaggcacgatcccgggccgccttagctaagggctggaatgaagtacagagtggagacgaggaggatggcgaggaggaggaggaggaggtgctagccctagatatggacgatgaggacgacgaagatggagggaatgcgggggaggaggaggaggaggagaatgccgatgatgatggtgggagctccgtgcaaagtgaagctgaggcctctgtggatcccagtttgtcgtggggtcagaggaaaaaactttactatgacacggactatggttccaagtcccgaggccggcagagtcaacaggaggcagaggaggaggaaagagaggaggaggaggaggcacagatcattcagcggcgcctagcccaagcgctgcaagaggatgattttggtgtcgcctgggttgaggcctttgcaaaaccagtgcctcaggtagatgaggctgagacacgggtcgtgaaggatttggctaaagtttcagtgaaagagaagctgaaaatgttgcgaaaggaatcaccagaactcttggagctgatagaagacctgaaagtcaagttgacagaggttaaggatgagctggagccattgttagagttggtggaacaagggatcattccacccggaaaaggaagccaatacttgaggaccaagtacaacctctacttgaattattgctcgaacatcagtttttatttgatcctgaaagctaggagagtcccagcacatggacatcctgtcatagaaaggcttgttacctaccgaaatttgatcaacaagctgtccgttgtggatcagaagctgtcctcagaaattcgtcatctgttgacacttaaggatgatgctgtaaagaaagaactgattccaaaagcaaaatccaccaagcccaaaccaaagtctgtttcaaagacttctgctgctgcctgtgctgttacagatctttctgatgattctgattttgatgaaaaagcaaaactgaagtactataaagaaatagaagacaggcaaaagctaaagagaaagaaagaagaaaatagcactgaagaacaggctcttgaagatcaaaatgcaaagagagctattacctatcaaattgctaaaaataggggacttactcctaggagaaagaagattgatcgcaatcccagagtgaaacacagagagaagttcagaagagccaaaattagaagaagaggccaggttcgtgaagttcgtaaagaagagcaacgttatagtggtgaattatctggcattcgtgcaggagttaaaaagagcattaagcttaaatgaagtttttgcttagcataaggtttttggcagttttggatcaataaatttttacttttaactaaagtcattgtattaatatataatactttaaattttaaaaattcttgtccacaaggaaatttgtctgggttattggacaatttataagaactatgggagcaatatgaaggtgcttgagaaaagagatgatgttgaagttttccaatattctgttgaagttttccaatattaagtattagcttagggaaatttcacagttcattgtggagtgttaaacttagaacatgtgtaacttttcacataaagagaatgcatctttgacagttatcttatttgtaaggcagcctataaaatagttctgaagtattttatttacctaactataattattgggccagatacttgttaataaatgggcttaatgttaa

SEQ ID NO: 444465 - DNA, 1098 bp, Homo sapiens
  misc_feature (996)..(996): n is a, c, g, or t
ggaagaggaaattccagtagccgatcaggagtctgcaaactccggtggtaggggagcgcgctgctgtttagagccacgagttaccggagcgcctgattcctgcgccgaagtcagtggtggccgaaagtccggagtcgctgtaaaacctgagattgtgagccatggtggggagatcccggcggcgcggagcagctaagtgggcagctgtgcgagccaaggcaggtcccacgctcaccgacgaaaatggagatgatttaggattgccaccctcaccaggggacaccagctactaccaagatcaggtagatgactttcatgaggcacgatcccgggccgccttagctaagggctggaatgaagtacagagtggagacgaggaggatggcgaggaggaggaggaggaggtgctagccctagatatggacgatgaggacgacgaagatggagggaatgcgggggaggaggaggaggaggagaatgccgatgatgatggtgggagctccgtgcaaagtgaagctgaggcctctgtggatcccagtttgtcgtggggtcagaggaaaaaactttactatgacacggactatggttccaagtcccgaggccggcagagtcaacaggaggcagaggaggaggaaagagaggaggaggaggaggcacagatcattcagcggcgcctagcccaagcgctgcaagaggatgattttggtgtcgcctgggttgaggcctttgcaaaaccagtgcctcaggtagatgaggctgagacacgggtcgtgaaggatttggctaaagtttcagtgaaagagaagctgaaaatgttgcgaaaggaatcaccagaactcttggagctgatagaagacctgaaagtcaagttgacagaggttaaggatgagctggagccattgttagagttggtggaacaagggatcattccacccggaaaaggaagccaatacttgaggaccaagtactcggccgcgaccacgctaagccgaattncaacacactgccgcccgttactagtggatcgagctcggtaccaacttggcgtaatcatggcatagctgttcctgtgtgaaattggtatccgctcacaattca

SEQ ID NO: 444466 - DNA, 1975 bp, Homo sapiens
ggaagaggaaattccagtagccgatcaggagtctgcaaactccggtggtaggggagcgcgctgctgtttagagccacgagttaccggagcgcctgattcctgcgccgaagtcagtggtggccgaaagtccggagtcgctgtaaaacctgagattgtgagccatggtggggagatcccggcggcgcggagcagctaagtgggcagctgtgcgagccaaggcaggtcccacgctcaccgacgaaaatggagatgatttaggattgccaccctcaccaggggacaccagctactaccaagatcaggtagatgactttcatgaggcacgatcccgggccgccttagctaagggctggaatgaagtacagagtggagacgaggaggatggcgaggaggaggaggaggaggtgctagccctagatatggacgatgaggacgacgaagatggagggaatgcgggggaggaggaggaggaggagaatgccgatgatgatggtgggagctccgtgcaaagtgaagctgaggcctctgtggatcccagtttgtcgtggggtcagaggaaaaaactttactatgacacggactatggttccaagtcccgaggccggcagagtcaacaggaggcagaggaggaggaaagagaggaggaggaggaggcacagatcattcagcggcgcctagcccaagcgctgcaagaggatgattttggtgtcgcctgggttgaggcctttgcaaaaccagtgcctcaggtagatgaggctgagacacgggtcgtgaaggatttggctaaagtttcagtgaaagagaagctgatcaagttgacagaggttaaggatgagctggagccattgttagagttggtggaacaagggatcattccacccggaaaaggaagccaatacttgaggaccaagtacaacctctacttgaattattgctcgaacatcagtttttatttgatcctgaaagctaggagagtcccagcacatggacatcctgtcatagaaaggcttgttacctaccgaaatttgatcaacaagctgtccgttgtggatcagaagctgtcctcagaaattcgtcatctgttgacacttaaggatgatgctgtaaagaaagaactgattccaaaagcaaaatccaccaagcccaaaccaaagtctgtttcaaagacttctgctgctgcctgtgctgttacagatctttctgatgattctgattttgatgaaaaagcaaaactgaagtactataaagaaatagaagacaggcaaaagctaaagagaaagaaagaagaaaatagcactgaagaacaggctcttgaagatcaaaatgcaaagagagctattacctatcaaattgctaaaaataggggacttactcctaggagaaagaagattgatcgcaatcccagagtgaaacacagagagaagttcagaagagccaaaattagaagaagaggccaggttcgtgaagttcgtaaagaagagcaacgttatagtggtgaattatctggcattcgtgcaggagttaaaaagagcattaagcttaaatgaagtttttgcttagcataaggtttttggcagttttggatcaataaatttttacttttaactaaagtcattgtattaatatataatactttaaattttaaaaattcttgtccacaaggaaatttgtctgggttattggacaatttataagaactatgggagcaatatgaaggtgcttgagaaaagagatgatgttgaagttttccaatattctgttgaagttttccaatattaagtattagcttagggaaatttcacagttcattgtggagtgttaaacttagaacatgtgtaacttttcacataaagagaatgcatctttgacagttatcttatttgtaaggcagcctataaaatagttctgaagtattttatttacctaactataattattgggccagatacttgttaataaatgggcttaatgttaa

SEQ ID NO: 444467 - DNA, 1489 bp, Homo sapiens
ccaaggttaaatgggcgcgtgaggacagttttctccggtcctggcgggtttgcccacctgccggccagcgttctgcgggagtcaagcctggaaagcgtgtgtgcggcgcacaggcgtcagacaactggaacgcattcgaatggtgctattctttgcccacatagcgagcactttataaggtcacttatcgtcccgaatgaatggttaaatcgtggaagccgcaaagaaagccacgcagctttgactcaatacctagcccagtactcaggaacccctctcaggggtgcgcgagcggggccggaatcaagaagcctcttttggggtgggcggggaccgatctagagctcccactgcggggcaccgcctcttttcctcgccggccgcccgctaggaggcgctggggagcttgcagcccacctgcgaggcggtcccgctctccccacccctcagcccgcgcccggcggagagactacaactcccggagtgctctgggaacggagccacgggagctacaggcggagggacccgagggcgggctttccgggtgtgtgtttccggcgtcggcggccgcggccggggacggtgtgagagcggtaagatggcggcggcggcggtggtggagttccagagagcccagtctctactcagcaccgaccgggaggcctccatcgacatcctccactccatcgtgaagcgtgacattcaggaaaacgatgaagaggcagtgcaagtcaaagagcagagcatcctggaactgggatctctcctggcaaagactggacaagctgcagagcttggaggactcctgaagtatgtacgacccttcttgaattccatcagcaaggctaaagcagctcgcctggtccgatctcttcttgatctgtttcttgatatggaagcagctacagggcaggaggtcgagctgtgtttagagtgcatcgaatgggccaagtcagagaaaagaactttcttacgccaagctttggaggcaagactggtgtctttgtactttgataccaagaggtaccaggaagcattgcatttgggttctcagctgctgcgggagttgaaaaagatggacgacaaagctcttttggtggaagtacagcttttagaaagcaaaacataccatgccctgagcaacctgccgaaagcccgagctgccttaacttctgctcgaaccacagcaaatgccatctactgcccccctaaattgcaggccaccttggacatgcagtcgggtattatccatgcagcagaagagaaggactggaaaactgcgtactcatacttctatgaggcatttgagggttatgactccatcgacagccccaaggccatcacatctctgaagtacatgttgctgtgcaaaatcatgctcaacaccccagaagatgtcagcttggggaacgggaacttgccttccgttgccggaggggaaagagccttaagggggggcaggcacagcgtccggcggtttgggggttgc

SEQ ID NO: 444468 - DNA, 1368 bp, Homo sapiens
ccaaggttaaatgggcgcgtgaggacagttttctccggtcctggcgggtttgcccacctgccggccagcgttctgcgggagtcaagcctggaaagcgtgtgtgcggcgcacaggcgtcagacaactggaacgcattcgaatggtgctattctttgcccacatagcgagcactttataaggtcacttatcgtcccgaatgaatggttaaatcgtggaagccgcaaagaaagccacgcagctttgactcaatacctagcccagtactcaggaacccctctcaggggtgcgcgagcggggccggaatcaagaagcctcttttggggtgggcggggaccgatctagagctcccactgcggggcaccgcctcttttcctcgccggccgcccgctaggaggcgctggggagcttgcagcccacctgcgaggcggtcccgctctccccacccctcagcccgcgcccggcggagagactacaactcccggagtgctctgggaacggagccacgggagctacaggcggagggacccgagggcgggctttccgggtgtgtgtttccggcgtcggcggccgcggccggggacggtgtgagagcggtaagatggcggcggcggcggtggtggagttccagagagcccagtctctactcagcaccgaccgggaggcctccatcgacatcctccactccatcgtgaagcgtgacattcaggaaaacgatgaagaggcagtgcaagtcaaagagcagagcatcctggaactgggatctctcctggcaaagactggacaagctgcagagcttggaggactcctgaagtatgtacgacccttcttgaattccatcagcaaggctaaagcagctcgcctggtccgatctcttcttgatctgtttcttgatatggaagcagctacagggcaggaggtcgagctgtgtttagagtgcatcaaattgggccaagaaaatgtcagagaaaagaaccttttcctttaagcggcccaaaaagggcctttttttggggggcgccccagggggcccccaaaaaagggaaaacaccattttgtggcggacggggcttggagggaggctatcttcccgagtttaatcaaggagcagggggggagggaatattaaaaacagccgcgcttattaatttatacagtagccggggcgcggggggcgagcacaaactttcttttttatagaaagaggagagcgccccctcccaagatagaagaacaaataccagtggtggggtgacgcaaaaaacaaagcagcgggggggagagaggaggagggggaattaattttataacaacagaaccagagcagcactcgagcgcccagctactaaaaataaagagaggagcgtgtat

SEQ ID NO: 444469 - DNA, 610 bp, Homo sapiens
  misc_feature (8)..(8): n is a, c, g, or t
ggggtctntgctcttttggggtctttgctcttttggggtctttgccttttggggtcccgactcatttggggtctgtgctcttttagggtctttgctcttttggggtctttgctcaggggagtcaggctgtctgtgaaagccatgagcttctctccctctcccactcctcctctcctactttcagatggatttattccttttttaaacaatgaacatcggaaatgagactgtggggtgtggtttctctctctcttttttttttaattttctttgttgggtttttgagcaacctcatgtccccttcccagggagctttttaatttacctcttagaactcaagtggatgggaagtagagcactatgtgtcagtatgctttgttttctgacacgattacacagcgaggctttaatgccatttgggtaggtgagcttctgcacttctgttgtgctgaactgtattttcttctctcatctcctctttgtctttttctcttttcctctccttcctgccttcttctgctggcctccttttctctttctttaccttccttggattatccttccaggttttcataataaatttatattttgtaaaaggattttgttgtac

SEQ ID NO: 444470 - DNA, 877 bp, Homo sapiens
tgttctattttgtattttttttttctcttagagactaccataaaatagcatttttaaaaatttatttttagagatggaggctctctgtgttgcccaagctggacttgaactcttgggctccagcagtcctcccacatgagcctcccgagtgactgggactccaggtgcgtgccaccaagccaaacttccctttcagttcttgacattccttttctgctttgtatcatgcatctccccagatctcccctaacttcattcaaccatgtagttttataagggccagcagactatctaggaagcaggagtagcatgactttaaagtgattctctgtgccaatctctgcaactggttcctttggcaggctctgacagattaccgggcagagctccgggatgacccaatcatcagcacacacttggccaagttgtatgataacttactagaacagaatctgatccgagtcattgagcctttttccagagtacaggtgagaaccctctggggactccatttctggccaggcattctcactgtagccacctcccttccacacctgtccagaatgggaactcacttctaggggtgtgcctggtgggcaagaggccaccaagagcttgggcctctgttgataaaatgaacaaaaatcgaggagagagatgctgtgggtagaggcatgtgggttgcccctgcatgtgttctgagcagtttcctcctcgcttttagtcactgcatgtgttgtacctgttttctgtattgggtgtgtgggataagagtctgtttattgtgtgtagcagtgaagggcaggcagatgggcagagaacaagagacttaagcacggccaaggagggtcttacattagaattttgagaaatacag

SEQ ID NO: 444471 - DNA, 733 bp, Homo sapiens
cattttggtgttctttcccctaccatacggcctgtctgcccttccctccccacattggctccagcagagtagccgaaggtcctgccgccgccgccaccaccaccaccactgcagccccaaggccatcacatctctgaagtacatgttgctgtgcaaaatcatgctcaacaccccagaagatgtccaggctttggtgagcgggaagcttgcacttcggtatgcagggaggcagacagaagcattaaaatgcgtggctcaggctagcaagaacagatcactggcagattttgaaaaggctctgacagattaccgggcagagctccgggatgacccaatcatcagcacacacttggccaagttgtatgataacttactagaacagaatctgatccgagtcattgagcctttttccagagtacagattgaacacatatctagtctcatcaaactctccaaggcgacgtggaaaggaattatcacagatgatcttgacagaattcatgggattggaccagggagggtgtctgattattcgatgacccagtaataactacgaagtgcggacatccactgagcagttggtcctttaaaagcagaatgataaatggctggggcttggaaggttggggagaacggggagcgagactggccgagaccttgggttgccagggttgccggggggtcacaacatcaacctgggtgcggtctttcttctgtccgcaccccccaaccc

SEQ ID NO: 444472 - DNA, 572 bp, Homo sapiens
atcatattctgaaaatcaagcagagcctgaacagagcgggcgcgaggccaaaaacagtgctctggaaggtcattctgtagttattttcaacaggctatataacatgccaatcattatgcttatcatagacaggcttaaattgaaattataactgaatttctaatgagttcttcttggctaagggtgaaacaaatgacctgaatgctgatgaacattttggggtgtgcttgcacaccctcccttccacacctgtccagaatgggaactcacttctaggggtgtgcctggtgggcaagaggccaccaagagcttgggcctctgttgataaaatgaacaaaaatcgaggagagagatgctgtgggtagaggcatgtgggttgcccctgcatgtgttctgagcagtttcctcctcgcttttagtcactgcatgtgttgtacctgttttctgtattgggtgtgtgggataagagtctgtttattgtgtgtagcagtgaagggcaggcagatgggcagagaacaagagacttaagcacggccaaggagggtcttacattagaattttgagaaatacag

SEQ ID NO: 444473 - DNA, 3609 bp, Homo sapiens
  misc_feature (3596)..(3596): n is a, c, g, or t
ccaaggttaaatgggcgcgtgaggacagttttctccggtcctggcgggtttgcccacctgccggccagcgttctgcgggagtcaagcctggaaagcgtgtgtgcggcgcacaggcgtcagacaactggaacgcattcgaatggtgctattctttgcccacatagcgagcactttataaggtcacttatcgtcccgaatgaatggttaaatcgtggaagccgcaaagaaagccacgcagctttgactcaatacctagcccagtactcaggaacccctctcaggggtgcgcgagcggggccggaatcaagaagcctcttttggggtgggcggggaccgatctagagctcccactgcggggcaccgcctcttttcctcgccggccgcccgctaggaggcgctggggagcttgcagcccacctgcgaggcggtcccgctctccccacccctcagcccgcgcccggcggagagactacaactcccggagtgctctgggaacggagccacgggagctacaggcggagggacccgagggcgggctttccgggtgtgtgtttccggcgtcggcggccgcggccggggacggtgtgagagcggtaagatggcggcggcggcggtggtggagttccagagagcccagtctctactcagcaccgaccgggaggcctccatcgacatcctccactccatcgtgaagcgtgacattcaggaaaacgatgaagaggcagtgcaagtcaaagagcagagcatcctggaactgggatctctcctggcaaagactggacaagctgcagagcttggaggactcctgaagtatgtacgacccttcttgaattccatcagcaaggctaaagcagctcgcctggtccgatctcttcttgatctgtttcttgatatggaagcagctacagggcaggaggtcgagctgtgtttagagtgcatcgaatgggccaagtcagagaaaagaactttcttacgccaagctttggaggcaagactggtgtctttgtactttgataccaagaggtaccaggaagcattgcatttgggttctcagctgctgcgggagttgaaaaagatggacgacaaagctcttttggtggaagtacagcttttagaaagcaaaacataccatgccctgagcaacctgccgaaagcccgagctgccttaacttctgctcgaaccacagcaaatgccatctactgcccccctaaattgcaggccaccttggacatgcagtcgggtattatccatgcagcagaagagaaggactggaaaactgcgtactcatacttctatgaggcatttgagggttatgactccatcgacagccccaaggccatcacatctctgaagtacatgttgctgtgcaaaatcatgctcaacaccccagaagatgtccaggctttggtgagcgggaagcttgcacttcggtatgcagggaggcagacagaagcattaaaatgcgtggctcaggctagcaagaacagatcactggcagattttgaaaaggctctgacagattaccgggcagagctccgggatgacccaatcatcagcacacacttggccaagttgtatgataacttactagaacagaatctgatccgagtcattgagcctttttccagagtacagattgaacacatatctagtctcatcaaactctccaaggccgacgtggaaaggaaattatcacagatgattcttgacaagaaatttcatgggattttggaccagggggagggtgtcctgattattttcgatgaacccccagtagataaaacttacgaagctgctctggaaacaattcagaacatgagcaaagtagtggattccctctacaacaaagccaagaaactgacatagagttggatctgtagcggtcctttggagagtgtgtgtggcgggagagtgaaaccttgggggaaaatgctaggagattcttttttctttttgttctacttttcgctcggaaagtttttaaatcctcatttggtgcatctgtattccagccaataggtgtgccagttttcatgtaatctttactggcccaacttgggagtggggaaattgcttaaaaaaaaagaaaaagaaaaaaaaaaagattattctaaataaaaggaaaaaggcttacactacctaaagctgtgctctctgcctcctgggagagggccgcaaagccaggcaccccgccaaccactgggggtcctaatccacctgctgggcatcacctctcctcctcctcagaattgggtgtttgctgaccatcaaaagcaatgactttttattctgtttgtactgaaccaaaacaaacaactgtgtatagactgctgttttcttttttatttgaaatgaggcattttggtgttctttcccctaccatacggcctgtctgcccttccctccccacattggctccagcagagtagccgaaggtcctgccgccgccgccaccaccaccaccactgcagcaacaacagcagcagcagcagcagcgcctgcatagctccactctgacctgtgaaggaatggggatgaggccaggagctagtgtctaccacggccacacagggagcagtgtgggcccttagcccccaaggggcctgctatgcatgtggctttttttttttttttaaacacagtaaactagattagtcgtcagtgttttaattgcccctcttctcctctcctgcattcctctcctctcttctttcctctctgtcccttctctttcccctctcaaccaggagaccatcatgtctctctgccttcctcctctcccctccaggggagtcaggctgtctgtgaaagccatgagcttctctccctctcccactcctcctctcctactttcagatggatttattccttttttaaacaatgaacatcggaaatgagactgtggggtgtggtttctctctctcttttttttttaattttctttgttgggtttttgagcaacctcatgtccccttcccagggagctttttaatttacctcttagaactcaagtggatgggaagtagagcactatgtgtcagtatgctttgttttctgacacgattacacagcgaggctttaatgccatttgggtaggtgagcttctgcacttctgttgtgctgaactgtattttcttctctcatctcctctttgtctttttctcttttcctctccttcctgccttcttctgctggcctccttttctctttctttaccttccttggattatccttccaggttttcataataaatttatattttgtaaaaggattttgttgtaccaggttttgcatcctcactgaatctgactggcttttattttcctctccaaaatcaggtttttgttctcaacatctttccccatcatgtctagtcactgttttggttttggcaccatcagtatcaaatgtacaaacggttcttgctaaccaacaccaggtatatctgatgttcagatgagttccaataaaaataattttttttttttttttttttttttttttggggggaccctctaaaagccgcccggcgggcttgcaacttgggcacgggccgccgtttaaaagggccgggccgggaaaaccccgggggggnggggcaaacgcgg

SEQ ID NO: 444474 - DNA, 3283 bp, Homo sapiens
ccaaggttaaatgggcgcgtgaggacagttttctccggtcctggcgggtttgcccacctgccggccagcgttctgcgggagtcaagcctggaaagcgtgtgtgcggcgcacaggcgtcagacaactggaacgcattcgaatggtgctattctttgcccacatagcgagcactttataaggtcacttatcgtcccgaatgaatggttaaatcgtggaagccgcaaagaaagccacgcagctttgactcaatacctagcccagtactcaggaacccctctcaggggtgcgcgagcggggccggaatcaagaagcctcttttggggtgggcggggaccgatctagagctcccactgcggggcaccgcctcttttcctcgccggccgcccgctaggaggcgctggggagcttgcagcccacctgcgaggcggtcccgctctccccacccctcagcccgcgcccggcggagagactacaactcccggagtgctctgggaacggagccacgggagctacaggcggagggacccgagggcgggctttccgggtgtgtgtttccggcgtcggcggccgcggccggggacggtgtgagagcggtaagatggcggcggcggcggtggtggagttccagagagcccagtctctactcagcaccgaccgggaggcctccatcgacatcctccactccatcgtgaagcgtgacattcaggaaaacgatgaagaggcagtgcaagtcaaagagcagagcatcctggaactgggatctctcctggcaaagactggacaagctgcagagcttggaggactcctgaagtatgtacgacccttcttgaattccatcagcaaggctaaagcagctcgcctggtccgatctcttcttgatctgtttcttgatatggaagcagctacagggcaggaggtcgagctgtgtttagagtgcatcgaatgggccaagtcagagaaaagaactttcttacgccaagctttggaggcaagactggtgtctttgtactttgataccaagaggtaccaggaagcattgcatttgggttctcagctgctgcgggagttgaaaaagatggacgacaaagctcttttggtggaagtacagcttttagaaagcaaaacataccatgccctgagcaacctgccgaaagcccgagctgccttaacttctgctcgaaccacagcaaatgccatctactgcccccctaaattgcaggccaccttggacatgcagtcgggtattatccatgcagcagaagagaaggactggaaaactgcgtactcatacttctatgaggcatttgagggttatgactccatcgacagccccaaggccatcacatctctgaagtacatgttgctgtgcaaaatcatgctcaacaccccagaagatgtccaggctttggtgagcgggaagcttgcacttcggtatgcagggaggcagacagaagcattaaaatgcgtggctcaggctagcaagaacagatcactggcagattttgaaaaggctctgacagattaccgggcagagctccgggatgacccaatcatcagcacacacttggccaagttgtatgataacttactagaacagaatctgatccgagtcattgagcctttttccagagtacagattgaacacatatctagtctcatcaaactctccaaggccgacgtggaaaggaaattatcacagatgattcttgacaagaaatttcatgggattttggaccagggggagggtgtcctgattattttcgatgaacccccagtagataaaacttacgaagctgctctggaaacaattcagaacatgagcaaagtagtggattccctctacaacaaagccaagaaactgacatagagttggatctgtagcggtcctttggagagtgtgtgtggcgggagagtgaaaccttgggggaaaatgctaggagattcttttttctttttgttctacttttcgctcggaaagtttttaaatcctcatttggtgcatctgtattccagccaataggtgtgccagttttcatgtaatctttactggcccaacttgggagtggggaaattgcttaaaaaaaaagaaaaagaaaaaaaaaaagattattctaaataaaaggaaaaaggcttacactacctaaagctgtgctctctgcctcctgggagagggccgcaaagccaggcaccccgccaaccactgggggtcctaatccacctgctgggcatcacctctcctcctcctcagaattgggtgtttgctgaccatcaaaagcaatgactttttattctgtttgtactgaaccaaaacaaacaactgtgtatagactgctgttttcttttttatttgaaatgaggcattttggtgttctttcccctaccatacggcctgtctgcccttccctccccacattggctccagcagagtagccgaaggtcctgccgccgccgccaccaccaccaccactgcagcaacaacagcagcagcagcagcagcgcctgcatagctccactctgacctgtgaaggaatggggatgaggccaggagctagtgtctaccacggccacacagggagcagtgtgggcccttagcccccaaggggcctgctatgcatgtggctttttttttttttttaaacacagtaaactagattagtcgtcagtgttttaattgcccctcttctcctctcctgcattcctctcctctcttctttcctctctgtcccttctctttcccctctcaaccaggagaccatcatgtctctctgccttcctcctctcccctccaggggagtcaggctgtctgtgaaagccatgagcttctctccctctcccactcctcctctcctactttcagatggatttattccttttttaaacaatgaacatcggaaatgagactgtggggtgtggtttctctctctcttttttttttaattttctttgttgggtttttgagcaacctcatgtccccttcccagggagctttttaatttacctcttagaactcaagtggatgggaagtagagcactatgtgtcagtatgctttgttttctgacacgattacacagcgaggctttaatgccatttgggtaggtgagcttctgcacttctgttgtgctgaactgtattttcttctctcatctcctctttgtctttttctcttttcctctccttcctgccttcttctgctggcctccttttctctttctttaccttccttggattatccttccaggttttcataataaatttatattttgtaaaaggattttgttgtac

SEQ ID NO: 444475 - DNA, 2283 bp, Homo sapiens
ccaaggttaaatgggcgcgtgaggacagttttctccggtcctggcgggtttgcccacctgccggccagcgttctgcgggagtcaagcctggaaagcgtgtgtgcggcgcacaggcgtcagacaactggaacgcattcgaatggtgctattctttgcccacatagcgagcactttataaggtcacttatcgtcccgaatgaatggttaaatcgtggaagccgcaaagaaagccacgcagctttgactcaatacctagcccagtactcaggaacccctctcaggggtgcgcgagcggggccggaatcaagaagcctcttttggggtgggcggggaccgatctagagctcccactgcggggcaccgcctcttttcctcgccggccgcccgctaggaggcgctggggagcttgcagcccacctgcgaggcggtcccgctctccccacccctcagcccgcgcccggcggagagactacaactcccggagtgctctgggaacggagccacgggagctacaggcggagggacccgagggcgggctttccgggtgtgtgtttccggcgtcggcggccgcggccggggacggtgtgagagcggtaagatggcggcggcggcggtggtggagttccagagagcccagtctctactcagcaccgaccgggaggcctccatcgacatcctccactccatcgtgaagcgtgacattcaggaaaacgatgaagaggcagtgcaagtcaaagagcagagcatcctggaactgggatctctcctggcaaagactggacaagctgcagagcttggaggactcctgaagtatgtacgacccttcttgaattccatcagcaaggctaaagcagctcgcctggtccgatctcttcttgatctgtttcttgatatggaagcagctacagggcaggaggtcgagctgtgtttagagtgcatcgaatgggccaagtcagagaaaagaactttcttacgccaagctttggaggcaagactggtgtctttgtactttgataccaagaggtaccaggaagcattgcatttgggttctcagctgctgcgggagttgaaaaagatggacgacaaagctcttttggtggaagtacagcttttagaaagcaaaacataccatgccctgagcaacctgccgaaagcccgagctgccttaacttctgctcgaaccacagcaaatgccatctactgcccccctaaattgcaggccaccttggacatgcagtcgggtattatccatgcagcagaagagaaggactggaaaactgcgtactcatacttctatgaggcatttgagggttatgactccatcgacagccccaaggccatcacatctctgaagtacatgttgctgtgcaaaatcatgctcaacaccccagaagatgtccaggctttggtgagcgggaagcttgcacttcggtatgcagggaggcagacagaagcattaaaatgcgtggctcaggctagcaagaacagatcactggcagattttgaaaaggctctgacagattaccgggcagagctccgggatgacccaatcatcagcacacacttggccaagttgtatgataacttactagaacagaatctgatccgagtcattgagcctttttccagagtacagattgaacacatatctagtctcatcaaactctccaaggccgacgtggaaaggaaattatcacagatgattcttgacaagaaatttcatgggattttggaccagggggagggtgtcctgattattttcgatgaacccccagtagataaaacttacgaagctgctctggaaacaattcagaacatgagcaaagtagtggattccctctacaacaaagccaagaaactgacatagagttggatctgtagcggtcctttggagagtgtgtgtggcgggagagtgaaaccttgggggaaaatgctaggagattcttttttctttttgttctacttttcgctcggaaagtttttaaatcctcatttggtgcatctgtattccagccaataggtgtgccagttttcatgtaatctttactggcccaacttgggagtggggaaattgcttaaaaaaaaagaaaaagaaaaaaaaaaagattattctaaataaaaggaaaaaggcttacactaaaaaaaaaaaaaaccacaaaacaaacaaaactgttgtgtgggcgcgcccggggcccccggaaaagagtttttaacaccattccgtgggggcgcggggcccccgtggggtgcggcacccggggccatggcgggcccccggggaac

SEQ ID NO: 444476 - DNA, 3582 bp, Homo sapiens
ctccgaggatccgttcggcagtattaggtctgtttcttgtattggaagcgctctgggcaggaggtcgagctgtgtttagagtgcatcgaatgggccaagtcagagaaaagaactttcttacgccaagctttggaggcaagactggtgtctttgtactttgataccaagaggtaccaggaagcattgcatttgggttctcagctgctgcgggagttgaaaaagatggacgacaaagctcttttggtggaagtacagcttttagaaagcaaaacataccatgccctgagcaacctgccgaaagcccgagctgccttaacttctgctcgaaccacagcaaatgccatctactgcccccctaaattgcaggccaccttggacatgcagtcgggtattatccatgcagcagaagagaaggactggaaaactgcgtactcatacttctatgaggcatttgagggttatgactccatcgacagccccaaggccatcacatctctgaagtacatgttgctgtgcaaaatcatgctcaacaccccagaagatgtccaggctttggtgagcgggaagcttgcacttcggtatgcagggaggcagacagaagcattaaaatgcgtggctcaggctagcaagaacagatcactggcagattttgaaaaggctctgacagattaccgggcagagctccgggatgacccaatcatcagcacacacttggccaagttgtatgataacttactagaacagaatctgatccgagtcattgagcctttttccagagtacagattgaacacatatctagtctcatcaaactctccaaggccgacgtggaaaggaaattatcacagatgattcttgacaagaaatttcatgggattttggaccagggggagggtgtcctgattattttcgatgaacccccagtagataaaacttacgaagctgctctggaaacaattcagaacatgagcaaagtagtggattccctctacaacaaagccaagaaactgacatagagttggatctgtagcggtcctttggagagtgtgtgtggcgggagagtgaaaccttgggggaaaatgctaggagattcttttttctttttgttctacttttcgctcggaaagtttttaaatcctcatttggtgcatctgtattccagccaataggtgtgccagttttcatgtaatctttactggcccaacttgggagtggggaaattgcttaaaaaaaaagaaaaagaaaaaaaaaaagattattctaaataaaaggaaaaaggcttacactacctaaagctgtgctctctgcctcctgggagagggccgcaaagccaggcaccccgccaaccactgggggtcctaatccacctgctgggcatcacctctcctcctcctcagaattgggtgtttgctgaccatcaaaagcaatgactttttattctgtttgtactgaaccaaaacaaacaactgtgtatagactgctgttttcttttttatttgaaatgaggcattttggtgttctttcccctaccatacggcctgtctgcccttccctccccacattggctccagcagagtagccgaaggtcctgccgccgccgccaccaccaccaccactgcagcaacaacagcagcagcagcagcagcgcctgcatagctccactctgacctgtgaaggaatggggatgaggccaggagctagtgtctaccacggccacacagggagcagtgtgggcccttagcccccaaggggcctgctatgcatgtggctttttttttttttttaaacacagtaaactagattagtcgtcagtgttttaattgcccctcttctcctctcctgcattcctctcctctcttctttcctctctgtcccttctctttcccctctcaaccaggagaccatcatgtctctctgccttcctcctctcccctccaggggagtcaggctgtctgtgaaagccatgagcttctctccctctcccactcctcctctcctactttcagatggatttattccttttttaaacaatgaacatcggaaatgagactgtggggtgtggtttctctctctcttttttttttaattttctttgttgggtttttgagcaacctcatgtccccttcccagggagctttttaatttacctcttagaactcaagtggatgggaagtagagcactatgtgtcagtatgctttgttttctgacacgattacacagcgaggctttaatgccatttgggtaggtgagcttctgcacttctgttgtgctgaactgtattttcttctctcatctcctctttgtctttttctcttttcctctccttcctgccttcttctgctggcctccttttctctttctttaccttccttggattatccttccaggttttcataataaatttatattttgtaaaaggattttgttgtaccaggttttgcatcctcactgaatctgactggcttttattttcctctccaaaatcaggtttttgttctcaacatctttccccatcatgtctagtcactgttttggttttggcaccatcagtatcaaatgtacaaacggttcttgctaaccaacaccaggtatatctgatgttcagatgagttccaataaaaataattttttttttttcaaaaggtgtctttttcttgagtgctggagggcttccaagcaagtccagacagctctgtgtggccccacactagtctagctctcatctggccaaagctgttatctcatttgtgtaatgggagtccttaaggtaaatttggggtccaaacttggagggctttgggggcaagaaagttggtgtgtgagttctgaggttggaaatgagttcaggtgtcttcttccagggcagcatggtccagtgagcacatgtaagtttgggcagtagatcctctgagcctactttctcttctactcagtgaggatgctgcttccttggcaggtgattgtgatgtgaagcttagtaagtcatagacgtgcaggtgtctggagagtcctgacatgcagttgtggtttcgtttccttttggaatcttcaaaggcagcgattttcatattgcctcacaccctggcgggggcggggggctctgggaccactgggggacctgctaaatcctcttcagtctgagcagttcagccattgtcagttttagtattgtgtctctgtatttcacttgcagaaagagctttgcttctataaaggactttaaaaagtactccaaagagatctagttttggagtagaggggagatgttttctcaaacttagggcagtcctgagatgctcaggcagtagcccttttctcagttccctttgcgggtcttggtcagatgatgccctctagacccgtgctgtccaatatgtagccgctagccatgtgcagctgtcaggcccttgcaacgtggctggttcgagctgtgatacactgcaagtgtaaacacaaaccagacttcgaaggcttagtatgataacaaaagaaaaggagtgtaaaatatgtcaataacttttttatatatgtgttgaaatattttgggtattgggttaaataaaatatattattaaaattcaaa

SEQ ID NO: 444477 - DNA, 3394 bp, Homo sapiens
  misc_feature (19)..(20): n is a, c, g, or t
taagcaggctggtacgccnnggaggtaatggatatcgtcgacccacgcgctccgggtggaagtacagcttttagaaagcaaaacataccatgccctgagcaacctgccgaaagcccgagctgccttaacttctgctcgaaccacagcaaatgccatctactgcccccctaaattgcaggccaccttggacatgcagtcgggtattatccatgcagcagaagagaaggactggaaaactgcgtactcatacttctatgaggcatttgagggttatgactccatcgacagccccaaggccatcacatctctgaagtacatgttgctgtgcaaaatcatgctcaacaccccagaagatgtccaggctttggtgagcgggaagcttgcacttcggtatgcagggaggcagacagaagcattaaaatgcgtggctcaggctagcaagaacagatcactggcagattttgaaaaggctctgacagattaccgggcagagctccgggatgacccaatcatcagcacacacttggccaagttgtatgataacttactagaacagaatctgatccgagtcattgagcctttttccagagtacagattgaacacatatctagtctcatcaaactctccaaggccgacgtggaaaggaaattatcacagatgattcttgacaagaaatttcatgggattttggaccagggggagggtgtcctgattattttcgatgaacccccagtagataaaacttacgaagctgctctggaaacaattcagaacatgagcaaagtagtggattccctctacaacaaagccaagaaactgacatagagttggatctgtagcggtcctttggagagtgtgtgtggcgggagagtgaaaccttgggggaaaatgctaggagattcttttttctttttgttctacttttcgctcggaaagtttttaaatcctcatttggtgcatctgtattccagccaataggtgtgccagttttcatgtaatctttactggcccaacttgggagtggggaaattgcttaaaaaaaaagaaaaagaaaaaaaaaaagattattctaaataaaaggaaaaaggcttacactacctaaagctgtgctctctgcctcctgggagagggccgcaaagccaggcaccccgccaaccactgggggtcctaatccacctgctgggcatcacctctcctcctcctcagaattgggtgtttgctgaccatcaaaagcaatgactttttattctgtttgtactgaaccaaaacaaacaactgtgtatagactgctgttttcttttttatttgaaatgaggcattttggtgttctttcccctaccatacggcctgtctgcccttccctccccacattggctccagcagagtagccgaaggtcctgccgccgccgccaccaccaccaccactgcagcaacaacagcagcagcagcagcagcgcctgcatagctccactctgacctgtgaaggaatggggatgaggccaggagctagtgtctaccacggccacacagggagcagtgtgggcccttagcccccaaggggcctgctatgcatgtggctttttttttttttttaaacacagtaaactagattagtcgtcagtgttttaattgcccctcttctcctctcctgcattcctctcctctcttctttcctctctgtcccttctctttcccctctcaaccaggagaccatcatgtctctctgccttcctcctctcccctccaggggagtcaggctgtctgtgaaagccatgagcttctctccctctcccactcctcctctcctactttcagatggatttattccttttttaaacaatgaacatcggaaatgagactgtggggtgtggtttctctctctcttttttttttaattttctttgttgggtttttgagcaacctcatgtccccttcccagggagctttttaatttacctcttagaactcaagtggatgggaagtagagcactatgtgtcagtatgctttgttttctgacacgattacacagcgaggctttaatgccatttgggtaggtgagcttctgcacttctgttgtgctgaactgtattttcttctctcatctcctctttgtctttttctcttttcctctccttcctgccttcttctgctggcctccttttctctttctttaccttccttggattatccttccaggttttcataataaatttatattttgtaaaaggattttgttgtaccaggttttgcatcctcactgaatctgactggcttttattttcctctccaaaatcaggtttttgttctcaacatctttccccatcatgtctagtcactgttttggttttggcaccatcagtatcaaatgtacaaacggttcttgctaaccaacaccaggtatatctgatgttcagatgagttccaataaaaataattttttttttttcaaaaggtgtctttttcttgagtgctggagggcttccaagcaagtccagacagctctgtgtggccccacactagtctagctctcatctggccaaagctgttatctcatttgtgtaatgggagtccttaaggtaaatttggggtccaaacttggagggctttgggggcaagaaagttggtgtgtgagttctgaggttggaaatgagttcaggtgtcttcttccagggcagcatggtccagtgagcacatgtaagtttgggcagtagatcctctgagcctactttctcttctactcagtgaggatgctgcttccttggcaggtgattgtgatgtgaagcttagtaagtcatagacgtgcaggtgtctggagagtcctgacatgcagttgtggtttcgtttccttttggaatcttcaaaggcagcgattttcatattgcctcacaccctggcgggggcggggggctctgggaccactgggggacctgctaaatcctcttcagtctgagcagttcagccattgtcagttttagtattgtgtctctgtatttcacttgcagaaagagctttgcttctataaaggactttaaaaagtactccaaagagatctagttttggagtagaggggagatgttttctcaaacttagggcagtcctgagatgctcaggcagtagcccttttctcagttccctttgcgggtcttggtcagatgatgccctctagacccgtgctgtccaatatgtagccgctagccatgtgcagctgtcaggcccttgcaacgtggctggttcgagctgtgatacactgcaagtgtaaacacaaaccagacttcgaaggcttagtatgataacaaaagaaaaggagtgtaaaatatgtcaataacttttttatatatgtgttgaaatattttgggtattgggttaaataaaatatattattaaaattcaaa

SEQ ID NO: 444478 - DNA, 3357 bp, Homo sapiens
tgtcgagtaagttatcatacaacttggccaagtgtgtgctgatgattgggtcatgccctgagcaacctgccgaaagcccgagctgccttaacttctgctcgaaccacagcaaatgccatctactgcccccctaaattgcaggccaccttggacatgcagtcgggtattatccatgcagcagaagagaaggactggaaaactgcgtactcatacttctatgaggcatttgagggttatgactccatcgacagccccaaggccatcacatctctgaagtacatgttgctgtgcaaaatcatgctcaacaccccagaagatgtccaggctttggtgagcgggaagcttgcacttcggtatgcagggaggcagacagaagcattaaaatgcgtggctcaggctagcaagaacagatcactggcagattttgaaaaggctctgacagattaccgggcagagctccgggatgacccaatcatcagcacacacttggccaagttgtatgataacttactagaacagaatctgatccgagtcattgagcctttttccagagtacagattgaacacatatctagtctcatcaaactctccaaggccgacgtggaaaggaaattatcacagatgattcttgacaagaaatttcatgggattttggaccagggggagggtgtcctgattattttcgatgaacccccagtagataaaacttacgaagctgctctggaaacaattcagaacatgagcaaagtagtggattccctctacaacaaagccaagaaactgacatagagttggatctgtagcggtcctttggagagtgtgtgtggcgggagagtgaaaccttgggggaaaatgctaggagattcttttttctttttgttctacttttcgctcggaaagtttttaaatcctcatttggtgcatctgtattccagccaataggtgtgccagttttcatgtaatctttactggcccaacttgggagtggggaaattgcttaaaaaaaaagaaaaagaaaaaaaaaaagattattctaaataaaaggaaaaaggcttacactacctaaagctgtgctctctgcctcctgggagagggccgcaaagccaggcaccccgccaaccactgggggtcctaatccacctgctgggcatcacctctcctcctcctcagaattgggtgtttgctgaccatcaaaagcaatgactttttattctgtttgtactgaaccaaaacaaacaactgtgtatagactgctgttttcttttttatttgaaatgaggcattttggtgttctttcccctaccatacggcctgtctgcccttccctccccacattggctccagcagagtagccgaaggtcctgccgccgccgccaccaccaccaccactgcagcaacaacagcagcagcagcagcagcgcctgcatagctccactctgacctgtgaaggaatggggatgaggccaggagctagtgtctaccacggccacacagggagcagtgtgggcccttagcccccaaggggcctgctatgcatgtggctttttttttttttttaaacacagtaaactagattagtcgtcagtgttttaattgcccctcttctcctctcctgcattcctctcctctcttctttcctctctgtcccttctctttcccctctcaaccaggagaccatcatgtctctctgccttcctcctctcccctccaggggagtcaggctgtctgtgaaagccatgagcttctctccctctcccactcctcctctcctactttcagatggatttattccttttttaaacaatgaacatcggaaatgagactgtggggtgtggtttctctctctcttttttttttaattttctttgttgggtttttgagcaacctcatgtccccttcccagggagctttttaatttacctcttagaactcaagtggatgggaagtagagcactatgtgtcagtatgctttgttttctgacacgattacacagcgaggctttaatgccatttgggtaggtgagcttctgcacttctgttgtgctgaactgtattttcttctctcatctcctctttgtctttttctcttttcctctccttcctgccttcttctgctggcctccttttctctttctttaccttccttggattatccttccaggttttcataataaatttatattttgtaaaaggattttgttgtaccaggttttgcatcctcactgaatctgactggcttttattttcctctccaaaatcaggtttttgttctcaacatctttccccatcatgtctagtcactgttttggttttggcaccatcagtatcaaatgtacaaacggttcttgctaaccaacaccaggtatatctgatgttcagatgagttccaataaaaataattttttttttttcaaaaggtgtctttttcttgagtgctggagggcttccaagcaagtccagacagctctgtgtggccccacactagtctagctctcatctggccaaagctgttatctcatttgtgtaatgggagtccttaaggtaaatttggggtccaaacttggagggctttgggggcaagaaagttggtgtgtgagttctgaggttggaaatgagttcaggtgtcttcttccagggcagcatggtccagtgagcacatgtaagtttgggcagtagatcctctgagcctactttctcttctactcagtgaggatgctgcttccttggcaggtgattgtgatgtgaagcttagtaagtcatagacgtgcaggtgtctggagagtcctgacatgcagttgtggtttcgtttccttttggaatcttcaaaggcagcgattttcatattgcctcacaccctggcgggggcggggggctctgggaccactgggggacctgctaaatcctcttcagtctgagcagttcagccattgtcagttttagtattgtgtctctgtatttcacttgcagaaagagctttgcttctataaaggactttaaaaagtactccaaagagatctagttttggagtagaggggagatgttttctcaaacttagggcagtcctgagatgctcaggcagtagcccttttctcagttccctttgcgggtcttggtcagatgatgccctctagacccgtgctgtccaatatgtagccgctagccatgtgcagctgtcaggcccttgcaacgtggctggttcgagctgtgatacactgcaagtgtaaacacaaaccagacttcgaaggcttagtatgataacaaaagaaaaggagtgtaaaatatgtcaataacttttttatatatgtgttgaaatattttgggtattgggttaaataaaatatattattaaaattcaaa

SEQ ID NO: 444479 - DNA, 1948 bp, Homo sapiens
ccaaggttaaatgggcgcgtgaggacagttttctccggtcctggcgggtttgcccacctgccggccagcgttctgcgggagtcaagcctggaaagcgtgtgtgcggcgcacaggcgtcagacaactggaacgcattcgaatggtgctattctttgcccacatagcgagcactttataaggtcacttatcgtcccgaatgaatggttaaatcgtggaagccgcaaagaaagccacgcagctttgactcaatacctagcccagtactcaggaacccctctcaggggtgcgcgagcggggccggaatcaagaagcctcttttggggtgggcggggaccgatctagagctcccactgcggggcaccgcctcttttcctcgccggccgcccgctaggaggcgctggggagcttgcagcccacctgcgaggcggtcccgctctccccacccctcagcccgcgcccggcggagagactacaactcccggagtgctctgggaacggagccacgggagctacaggcggagggacccgagggcgggctttccgggtgtgtgtttccggcgtcggcggccgcggccggggacggtgtgagagcggtaagatggcggcggcggcggtggtggagttccagagagcccagtctctactcagcaccgaccgggaggcctccatcgacatcctccactccatcgtgaagcgtgacattcaggaaaacgatgaagaggcagtgcaagtcaaagagcagagcatcctggaactgggatctctcctggcaaagactggacaagctgcagagcttggaggactcctgaagtatgtacgacccttcttgaattccatcagcaaggctaaagcagctcgcctggtccgatctcttcttgatctgtttcttgatatggaagcagctacagggcaggaggtcgagctgtgtttagagtgcatcgaatgggccaagtcagagaaaagaactttcttacgccaagctttggaggcaagactggtgtctttgtactttgataccaagaggtaccaggaagcattgcatttgggttctcagctgctgcgggagttgaaaaagatggacgacaaagctcttttggtggaagtacagcttttagaaagcaaaacataccatgccctgagcaacctgccgaaagcccgagctgccttaacttctgctcgaaccacagcaaatgccatctactgcccccctaaattgcaggccaccttggacatgcagtcgggtattatccatgcagcagaagagaaggactggaaaactgcgtactcatacttctatgaggcatttgagggttatgactccatcgacagccccaaggccatcacatctctgaagtacatgttgctgtgcaaaatcatgctcaacaccccagaagatgtccaggctttggtgagcgggaagcttgcacttcggtatgcagggaggcagacagaagcattaaaatgcgtggctcaggctagcaagaacagatcactggcagattttgaaaaggctctgacagattaccgggcagagctccgggatgacccaatcatcagcacacacttggccaagttgtatgataacttactagaacagaatctgatccgagtcattgagcctttttccagagtacagattgaacacatatctagtctcatcaaactctccaaggcgacgtggaaaggaattatcacagatgatcttgacagaattcatgggattggaccagggagggtgtctgattattcgatgacccagtaataactacgaagtgcggacatccactgagcagttggtcctttaaaagcagaatgataaatggctggggcttggaaggttggggagaacggggagcgagactggccgagaccttgggttgccagggttgccggggggtcacaacatcaacctgggtgcggtctttcttctgtccgcaccccccaaccc

SEQ ID NO: 444480 - DNA, 1721 bp, Homo sapiens
ccaaggttaaatgggcgcgtgaggacagttttctccggtcctggcgggtttgcccacctgccggccagcgttctgcgggagtcaagcctggaaagcgtgtgtgcggcgcacaggcgtcagacaactggaacgcattcgaatggtgctattctttgcccacatagcgagcactttataaggtcacttatcgtcccgaatgaatggttaaatcgtggaagccgcaaagaaagccacgcagctttgactcaatacctagcccagtactcaggaacccctctcaggggtgcgcgagcggggccggaatcaagaagcctcttttggggtgggcggggaccgatctagagctcccactgcggggcaccgcctcttttcctcgccggccgcccgctaggaggcgctggggagcttgcagcccacctgcgaggcggtcccgctctccccacccctcagcccgcgcccggcggagagactacaactcccggagtgctctgggaacggagccacgggagctacaggcggagggacccgagggcgggctttccgggtgtgtgtttccggcgtcggcggccgcggccggggacggtgtgagagcggtaagatggcggcggcggcggtggtggagttccagagagcccagtctctactcagcaccgaccgggaggcctccatcgacatcctccactccatcgtgaagcgtgacattcaggaaaacgatgaagaggcagtgcaagtcaaagagcagagcatcctggaactgggatctctcctggcaaagactggacaagctgcagagcttggaggactcctgaagtatgtacgacccttcttgaattccatcagcaaggctaaagcagctcgcctggtccgatctcttcttgatctgtttcttgatatggaagcagctacagggcaggaggtcgagctgtgtttagagtgcatcgaatgggccaagtcagagaaaagaactttcttacgccaagctttggaggcaagactggtgtctttgtactttgataccaagaggtaccaggaagcattgcatttgggttctcagctgctgcgggagttgaaaaagatggacgacaaagctcttttggtggaagtacagcttttagaaagcaaaacataccatgccctgagcaacctgccgaaagcccgagctgccttaacttctgctcgaaccacagcaaatgccatctactgcccccctaaattgcaggccaccttggacatgcagtcgggtattatccatgcagcagaagagaaggactggaaaactgcgtactcatacttctatgaggcatttgagggttatgactccatcgacagccccaaggccatcacatctctgaagtacatgttgctgtgcaaaatcatgctcaacaccccagaagatgtccaggctttggtgagcgggaagcttgcacttcggtatgcagggaggcagacagaagcattaaaatgcgtggctcaggctagcaagaacagatcactggcagattttgaaaagcttgacagatacgggcgagctccggatgaccatcatcagccaccctggcagtgttgtactactacgattgtcggtctggctttcagtcgtggcctttttcttcactccagcccggggatttcctttcaaatgggttgcggggggggtttgccccaatggtcgacagggcccaaatttgggggggggagtttcccttcgcttcatagcatcc

SEQ ID NO: 444481 - DNA, 3287 bp, Homo sapiens
tgttctattttgtattttttttttctcttagagactaccataaaatagcatttttaaaaatttatttttagagatggaggctctctgtgttgcccaagctggacttgaactcttgggctccagcagtcctcccacatgagcctcccgagtgactgggactccaggtgcgtgccaccaagccaaacttccctttcagttcttgacattccttttctgctttgtatcatgcatctccccagatctcccctaacttcattcaaccatgtagttttataagggccagcagactatctaggaagcaggagtagcatgactttaaagtgattctctgtgccaatctctgcaactggttcctttggcaggctctgacagattaccgggcagagctccgggatgacccaatcatcagcacacacttggccaagttgtatgataacttactagaacagaatctgatccgagtcattgagcctttttccagagtacagattgaacacatatctagtctcatcaaactctccaaggccgacgtggaaaggaaattatcacagatgattcttgacaagaaatttcatgggattttggaccagggggagggtgtcctgattattttcgatgaacccccagtagataaaacttacgaagctgctctggaaacaattcagaacatgagcaaagtagtggattccctctacaacaaagccaagaaactgacatagagttggatctgtagcggtcctttggagagtgtgtgtggcgggagagtgaaaccttgggggaaaatgctaggagattcttttttctttttgttctacttttcgctcggaaagtttttaaatcctcatttggtgcatctgtattccagccaataggtgtgccagttttcatgtaatctttactggcccaacttgggagtggggaaattgcttaaaaaaaaagaaaaagaaaaaaaaaaagattattctaaataaaaggaaaaaggcttacactacctaaagctgtgctctctgcctcctgggagagggccgcaaagccaggcaccccgccaaccactgggggtcctaatccacctgctgggcatcacctctcctcctcctcagaattgggtgtttgctgaccatcaaaagcaatgactttttattctgtttgtactgaaccaaaacaaacaactgtgtatagactgctgttttcttttttatttgaaatgaggcattttggtgttctttcccctaccatacggcctgtctgcccttccctccccacattggctccagcagagtagccgaaggtcctgccgccgccgccaccaccaccaccactgcagcaacaacagcagcagcagcagcagcgcctgcatagctccactctgacctgtgaaggaatggggatgaggccaggagctagtgtctaccacggccacacagggagcagtgtgggcccttagcccccaaggggcctgctatgcatgtggctttttttttttttttaaacacagtaaactagattagtcgtcagtgttttaattgcccctcttctcctctcctgcattcctctcctctcttctttcctctctgtcccttctctttcccctctcaaccaggagaccatcatgtctctctgccttcctcctctcccctccaggggagtcaggctgtctgtgaaagccatgagcttctctccctctcccactcctcctctcctactttcagatggatttattccttttttaaacaatgaacatcggaaatgagactgtggggtgtggtttctctctctcttttttttttaattttctttgttgggtttttgagcaacctcatgtccccttcccagggagctttttaatttacctcttagaactcaagtggatgggaagtagagcactatgtgtcagtatgctttgttttctgacacgattacacagcgaggctttaatgccatttgggtaggtgagcttctgcacttctgttgtgctgaactgtattttcttctctcatctcctctttgtctttttctcttttcctctccttcctgccttcttctgctggcctccttttctctttctttaccttccttggattatccttccaggttttcataataaatttatattttgtaaaaggattttgttgtaccaggttttgcatcctcactgaatctgactggcttttattttcctctccaaaatcaggtttttgttctcaacatctttccccatcatgtctagtcactgttttggttttggcaccatcagtatcaaatgtacaaacggttcttgctaaccaacaccaggtatatctgatgttcagatgagttccaataaaaataattttttttttttcaaaaggtgtctttttcttgagtgctggagggcttccaagcaagtccagacagctctgtgtggccccacactagtctagctctcatctggccaaagctgttatctcatttgtgtaatgggagtccttaaggtaaatttggggtccaaacttggagggctttgggggcaagaaagttggtgtgtgagttctgaggttggaaatgagttcaggtgtcttcttccagggcagcatggtccagtgagcacatgtaagtttgggcagtagatcctctgagcctactttctcttctactcagtgaggatgctgcttccttggcaggtgattgtgatgtgaagcttagtaagtcatagacgtgcaggtgtctggagagtcctgacatgcagttgtggtttcgtttccttttggaatcttcaaaggcagcgattttcatattgcctcacaccctggcgggggcggggggctctgggaccactgggggacctgctaaatcctcttcagtctgagcagttcagccattgtcagttttagtattgtgtctctgtatttcacttgcagaaagagctttgcttctataaaggactttaaaaagtactccaaagagatctagttttggagtagaggggagatgttttctcaaacttagggcagtcctgagatgctcaggcagtagcccttttctcagttccctttgcgggtcttggtcagatgatgccctctagacccgtgctgtccaatatgtagccgctagccatgtgcagctgtcaggcccttgcaacgtggctggttcgagctgtgatacactgcaagtgtaaacacaaaccagacttcgaaggcttagtatgataacaaaagaaaaggagtgtaaaatatgtcaataacttttttatatatgtgttgaaatattttgggtattgggttaaataaaatatattattaaaattcaaa

SEQ ID NO: 444482 - DNA, 2949 bp, Homo sapiens
tggcctcattggaaagctccccagcttctcagtggggaatgggcagtgtggactagagtaggagttgcattgttgctattttgttttcagtccatttggcctaagacccctccaacaaagctactgtgtcagggtgatctctgactagtggatactggtccctttaatcatgtgctttgattttaggccgacgtggaaaggaaattatcacagatgattcttgacaagaaatttcatgggattttggaccagggggagggtgtcctgattattttcgatgaacccccagtagataaaacttacgaagctgctctggaaacaattcagaacatgagcaaagtagtggattccctctacaacaaagccaagaaactgacatagagttggatctgtagcggtcctttggagagtgtgtgtggcgggagagtgaaaccttgggggaaaatgctaggagattcttttttctttttgttctacttttcgctcggaaagtttttaaatcctcatttggtgcatctgtattccagccaataggtgtgccagttttcatgtaatctttactggcccaacttgggagtggggaaattgcttaaaaaaaaagaaaaagaaaaaaaaaaagattattctaaataaaaggaaaaaggcttacactacctaaagctgtgctctctgcctcctgggagagggccgcaaagccaggcaccccgccaaccactgggggtcctaatccacctgctgggcatcacctctcctcctcctcagaattgggtgtttgctgaccatcaaaagcaatgactttttattctgtttgtactgaaccaaaacaaacaactgtgtatagactgctgttttcttttttatttgaaatgaggcattttggtgttctttcccctaccatacggcctgtctgcccttccctccccacattggctccagcagagtagccgaaggtcctgccgccgccgccaccaccaccaccactgcagcaacaacagcagcagcagcagcagcgcctgcatagctccactctgacctgtgaaggaatggggatgaggccaggagctagtgtctaccacggccacacagggagcagtgtgggcccttagcccccaaggggcctgctatgcatgtggctttttttttttttttaaacacagtaaactagattagtcgtcagtgttttaattgcccctcttctcctctcctgcattcctctcctctcttctttcctctctgtcccttctctttcccctctcaaccaggagaccatcatgtctctctgccttcctcctctcccctccaggggagtcaggctgtctgtgaaagccatgagcttctctccctctcccactcctcctctcctactttcagatggatttattccttttttaaacaatgaacatcggaaatgagactgtggggtgtggtttctctctctcttttttttttaattttctttgttgggtttttgagcaacctcatgtccccttcccagggagctttttaatttacctcttagaactcaagtggatgggaagtagagcactatgtgtcagtatgctttgttttctgacacgattacacagcgaggctttaatgccatttgggtaggtgagcttctgcacttctgttgtgctgaactgtattttcttctctcatctcctctttgtctttttctcttttcctctccttcctgccttcttctgctggcctccttttctctttctttaccttccttggattatccttccaggttttcataataaatttatattttgtaaaaggattttgttgtaccaggttttgcatcctcactgaatctgactggcttttattttcctctccaaaatcaggtttttgttctcaacatctttccccatcatgtctagtcactgttttggttttggcaccatcagtatcaaatgtacaaacggttcttgctaaccaacaccaggtatatctgatgttcagatgagttccaataaaaataattttttttttttcaaaaggtgtctttttcttgagtgctggagggcttccaagcaagtccagacagctctgtgtggccccacactagtctagctctcatctggccaaagctgttatctcatttgtgtaatgggagtccttaaggtaaatttggggtccaaacttggagggctttgggggcaagaaagttggtgtgtgagttctgaggttggaaatgagttcaggtgtcttcttccagggcagcatggtccagtgagcacatgtaagtttgggcagtagatcctctgagcctactttctcttctactcagtgaggatgctgcttccttggcaggtgattgtgatgtgaagcttagtaagtcatagacgtgcaggtgtctggagagtcctgacatgcagttgtggtttcgtttccttttggaatcttcaaaggcagcgattttcatattgcctcacaccctggcgggggcggggggctctgggaccactgggggacctgctaaatcctcttcagtctgagcagttcagccattgtcagttttagtattgtgtctctgtatttcacttgcagaaagagctttgcttctataaaggactttaaaaagtactccaaagagatctagttttggagtagaggggagatgttttctcaaacttagggcagtcctgagatgctcaggcagtagcccttttctcagttccctttgcgggtcttggtcagatgatgccctctagacccgtgctgtccaatatgtagccgctagccatgtgcagctgtcaggcccttgcaacgtggctggttcgagctgtgatacactgcaagtgtaaacacaaaccagacttcgaaggcttagtatgataacaaaagaaaaggagtgtaaaatatgtcaataacttttttatatatgtgttgaaatattttgggtattgggttaaataaaatatattattaaaattcaaa

SEQ ID NO: 444483 - DNA, 2871 bp, Homo sapiens
  misc_feature (37)..(37): n is a, c, g, or t
cttcaagatatcggcccaagggcaaagctcggattgnaaccattcatcagcacacattggtccaaagtccagattgaacacatatctagtctcatcaaactctccaaggccgacgtggaaaggaaattatcacagatgattcttgacaagaaatttcatgggattttggaccagggggagggtgtcctgattattttcgatgaacccccagtagataaaacttacgaagctgctctggaaacaattcagaacatgagcaaagtagtggattccctctacaacaaagccaagaaactgacatagagttggatctgtagcggtcctttggagagtgtgtgtggcgggagagtgaaaccttgggggaaaatgctaggagattcttttttctttttgttctacttttcgctcggaaagtttttaaatcctcatttggtgcatctgtattccagccaataggtgtgccagttttcatgtaatctttactggcccaacttgggagtggggaaattgcttaaaaaaaaagaaaaagaaaaaaaaaaagattattctaaataaaaggaaaaaggcttacactacctaaagctgtgctctctgcctcctgggagagggccgcaaagccaggcaccccgccaaccactgggggtcctaatccacctgctgggcatcacctctcctcctcctcagaattgggtgtttgctgaccatcaaaagcaatgactttttattctgtttgtactgaaccaaaacaaacaactgtgtatagactgctgttttcttttttatttgaaatgaggcattttggtgttctttcccctaccatacggcctgtctgcccttccctccccacattggctccagcagagtagccgaaggtcctgccgccgccgccaccaccaccaccactgcagcaacaacagcagcagcagcagcagcgcctgcatagctccactctgacctgtgaaggaatggggatgaggccaggagctagtgtctaccacggccacacagggagcagtgtgggcccttagcccccaaggggcctgctatgcatgtggctttttttttttttttaaacacagtaaactagattagtcgtcagtgttttaattgcccctcttctcctctcctgcattcctctcctctcttctttcctctctgtcccttctctttcccctctcaaccaggagaccatcatgtctctctgccttcctcctctcccctccaggggagtcaggctgtctgtgaaagccatgagcttctctccctctcccactcctcctctcctactttcagatggatttattccttttttaaacaatgaacatcggaaatgagactgtggggtgtggtttctctctctcttttttttttaattttctttgttgggtttttgagcaacctcatgtccccttcccagggagctttttaatttacctcttagaactcaagtggatgggaagtagagcactatgtgtcagtatgctttgttttctgacacgattacacagcgaggctttaatgccatttgggtaggtgagcttctgcacttctgttgtgctgaactgtattttcttctctcatctcctctttgtctttttctcttttcctctccttcctgccttcttctgctggcctccttttctctttctttaccttccttggattatccttccaggttttcataataaatttatattttgtaaaaggattttgttgtaccaggttttgcatcctcactgaatctgactggcttttattttcctctccaaaatcaggtttttgttctcaacatctttccccatcatgtctagtcactgttttggttttggcaccatcagtatcaaatgtacaaacggttcttgctaaccaacaccaggtatatctgatgttcagatgagttccaataaaaataattttttttttttcaaaaggtgtctttttcttgagtgctggagggcttccaagcaagtccagacagctctgtgtggccccacactagtctagctctcatctggccaaagctgttatctcatttgtgtaatgggagtccttaaggtaaatttggggtccaaacttggagggctttgggggcaagaaagttggtgtgtgagttctgaggttggaaatgagttcaggtgtcttcttccagggcagcatggtccagtgagcacatgtaagtttgggcagtagatcctctgagcctactttctcttctactcagtgaggatgctgcttccttggcaggtgattgtgatgtgaagcttagtaagtcatagacgtgcaggtgtctggagagtcctgacatgcagttgtggtttcgtttccttttggaatcttcaaaggcagcgattttcatattgcctcacaccctggcgggggcggggggctctgggaccactgggggacctgctaaatcctcttcagtctgagcagttcagccattgtcagttttagtattgtgtctctgtatttcacttgcagaaagagctttgcttctataaaggactttaaaaagtactccaaagagatctagttttggagtagaggggagatgttttctcaaacttagggcagtcctgagatgctcaggcagtagcccttttctcagttccctttgcgggtcttggtcagatgatgccctctagacccgtgctgtccaatatgtagccgctagccatgtgcagctgtcaggcccttgcaacgtggctggttcgagctgtgatacactgcaagtgtaaacacaaaccagacttcgaaggcttagtatgataacaaaagaaaaggagtgtaaaatatgtcaataacttttttatatatgtgttgaaatattttgggtattgggttaaataaaatatattattaaaattcaaa

SEQ ID NO: 444484 - DNA, 2992 bp, Homo sapiens
  misc_feature (37)..(37): n is a, c, g, or t
cttcaagatatcggcccaagggcaaagctcggattgnaaccattcatcagcacacattggtccaaagtccagattgaacacatatctagtctcatcaaactctccaaggccgacgtggaaaggaaattatcacagatgattcttgacaagaaatttcatgggattttggaccagggggagggtgtcctgattattttcgatgaacccccagtagataaaacttacgaagctgctctggaaacaattcagaacatgagcaaagtagtggattccctctacaacaaagccaagaaactgacataggtgagtgctggcttcaggaccccagggctgggcagctctgtcttctgcgtgtcgagactgaaaacctcctcctggtgtcctcatggcttcctgattgacactgctctgtcttctcttgcagagttggatctgtagcggtcctttggagagtgtgtgtggcgggagagtgaaaccttgggggaaaatgctaggagattcttttttctttttgttctacttttcgctcggaaagtttttaaatcctcatttggtgcatctgtattccagccaataggtgtgccagttttcatgtaatctttactggcccaacttgggagtggggaaattgcttaaaaaaaaagaaaaagaaaaaaaaaaagattattctaaataaaaggaaaaaggcttacactacctaaagctgtgctctctgcctcctgggagagggccgcaaagccaggcaccccgccaaccactgggggtcctaatccacctgctgggcatcacctctcctcctcctcagaattgggtgtttgctgaccatcaaaagcaatgactttttattctgtttgtactgaaccaaaacaaacaactgtgtatagactgctgttttcttttttatttgaaatgaggcattttggtgttctttcccctaccatacggcctgtctgcccttccctccccacattggctccagcagagtagccgaaggtcctgccgccgccgccaccaccaccaccactgcagcaacaacagcagcagcagcagcagcgcctgcatagctccactctgacctgtgaaggaatggggatgaggccaggagctagtgtctaccacggccacacagggagcagtgtgggcccttagcccccaaggggcctgctatgcatgtggctttttttttttttttaaacacagtaaactagattagtcgtcagtgttttaattgcccctcttctcctctcctgcattcctctcctctcttctttcctctctgtcccttctctttcccctctcaaccaggagaccatcatgtctctctgccttcctcctctcccctccaggggagtcaggctgtctgtgaaagccatgagcttctctccctctcccactcctcctctcctactttcagatggatttattccttttttaaacaatgaacatcggaaatgagactgtggggtgtggtttctctctctcttttttttttaattttctttgttgggtttttgagcaacctcatgtccccttcccagggagctttttaatttacctcttagaactcaagtggatgggaagtagagcactatgtgtcagtatgctttgttttctgacacgattacacagcgaggctttaatgccatttgggtaggtgagcttctgcacttctgttgtgctgaactgtattttcttctctcatctcctctttgtctttttctcttttcctctccttcctgccttcttctgctggcctccttttctctttctttaccttccttggattatccttccaggttttcataataaatttatattttgtaaaaggattttgttgtaccaggttttgcatcctcactgaatctgactggcttttattttcctctccaaaatcaggtttttgttctcaacatctttccccatcatgtctagtcactgttttggttttggcaccatcagtatcaaatgtacaaacggttcttgctaaccaacaccaggtatatctgatgttcagatgagttccaataaaaataattttttttttttcaaaaggtgtctttttcttgagtgctggagggcttccaagcaagtccagacagctctgtgtggccccacactagtctagctctcatctggccaaagctgttatctcatttgtgtaatgggagtccttaaggtaaatttggggtccaaacttggagggctttgggggcaagaaagttggtgtgtgagttctgaggttggaaatgagttcaggtgtcttcttccagggcagcatggtccagtgagcacatgtaagtttgggcagtagatcctctgagcctactttctcttctactcagtgaggatgctgcttccttggcaggtgattgtgatgtgaagcttagtaagtcatagacgtgcaggtgtctggagagtcctgacatgcagttgtggtttcgtttccttttggaatcttcaaaggcagcgattttcatattgcctcacaccctggcgggggcggggggctctgggaccactgggggacctgctaaatcctcttcagtctgagcagttcagccattgtcagttttagtattgtgtctctgtatttcacttgcagaaagagctttgcttctataaaggactttaaaaagtactccaaagagatctagttttggagtagaggggagatgttttctcaaacttagggcagtcctgagatgctcaggcagtagcccttttctcagttccctttgcgggtcttggtcagatgatgccctctagacccgtgctgtccaatatgtagccgctagccatgtgcagctgtcaggcccttgcaacgtggctggttcgagctgtgatacactgcaagtgtaaacacaaaccagacttcgaaggcttagtatgataacaaaagaaaaggagtgtaaaatatgtcaataacttttttatatatgtgttgaaatattttgggtattgggttaaataaaatatattattaaaattcaaa

SEQ ID NO: 444485 - DNA, 1762 bp, Homo sapiens
  misc_feature (8)..(8): n is a, c, g, or t
ggggtctntgctcttttggggtctttgctcttttggggtctttgccttttggggtcccgactcatttggggtctgtgctcttttagggtctttgctcttttggggtctttgctcaggggagtcaggctgtctgtgaaagccatgagcttctctccctctcccactcctcctctcctactttcagatggatttattccttttttaaacaatgaacatcggaaatgagactgtggggtgtggtttctctctctcttttttttttaattttctttgttgggtttttgagcaacctcatgtccccttcccagggagctttttaatttacctcttagaactcaagtggatgggaagtagagcactatgtgtcagtatgctttgttttctgacacgattacacagcgaggctttaatgccatttgggtaggtgagcttctgcacttctgttgtgctgaactgtattttcttctctcatctcctctttgtctttttctcttttcctctccttcctgccttcttctgctggcctccttttctctttctttaccttccttggattatccttccaggttttcataataaatttatattttgtaaaaggattttgttgtaccaggttttgcatcctcactgaatctgactggcttttattttcctctccaaaatcaggtttttgttctcaacatctttccccatcatgtctagtcactgttttggttttggcaccatcagtatcaaatgtacaaacggttcttgctaaccaacaccaggtatatctgatgttcagatgagttccaataaaaataattttttttttttcaaaaggtgtctttttcttgagtgctggagggcttccaagcaagtccagacagctctgtgtggccccacactagtctagctctcatctggccaaagctgttatctcatttgtgtaatgggagtccttaaggtaaatttggggtccaaacttggagggctttgggggcaagaaagttggtgtgtgagttctgaggttggaaatgagttcaggtgtcttcttccagggcagcatggtccagtgagcacatgtaagtttgggcagtagatcctctgagcctactttctcttctactcagtgaggatgctgcttccttggcaggtgattgtgatgtgaagcttagtaagtcatagacgtgcaggtgtctggagagtcctgacatgcagttgtggtttcgtttccttttggaatcttcaaaggcagcgattttcatattgcctcacaccctggcgggggcggggggctctgggaccactgggggacctgctaaatcctcttcagtctgagcagttcagccattgtcagttttagtattgtgtctctgtatttcacttgcagaaagagctttgcttctataaaggactttaaaaagtactccaaagagatctagttttggagtagaggggagatgttttctcaaacttagggcagtcctgagatgctcaggcagtagcccttttctcagttccctttgcgggtcttggtcagatgatgccctctagacccgtgctgtccaatatgtagccgctagccatgtgcagctgtcaggcccttgcaacgtggctggttcgagctgtgatacactgcaagtgtaaacacaaaccagacttcgaaggcttagtatgataacaaaagaaaaggagtgtaaaatatgtcaataacttttttatatatgtgttgaaatattttgggtattgggttaaataaaatatattattaaaattcaaa

SEQ ID NO: 444486 - DNA, 1813 bp, Homo sapiens
ggctccttgggttgagagaggccagacttgcagtcatcttcgataactctatttctctttttctttctctcttcctctttctccctcattcttatctttcctctttctctttcccctctcaaccaggagaccatcatgtctctctgccttcctcctctcccctccaggggagtcaggctgtctgtgaaagccatgagcttctctccctctcccactcctcctctcctactttcagatggatttattccttttttaaacaatgaacatcggaaatgagactgtggggtgtggtttctctctctcttttttttttaattttctttgttgggtttttgagcaacctcatgtccccttcccagggagctttttaatttacctcttagaactcaagtggatgggaagtagagcactatgtgtcagtatgctttgttttctgacacgattacacagcgaggctttaatgccatttgggtaggtgagcttctgcacttctgttgtgctgaactgtattttcttctctcatctcctctttgtctttttctcttttcctctccttcctgccttcttctgctggcctccttttctctttctttaccttccttggattatccttccaggttttcataataaatttatattttgtaaaaggattttgttgtaccaggttttgcatcctcactgaatctgactggcttttattttcctctccaaaatcaggtttttgttctcaacatctttccccatcatgtctagtcactgttttggttttggcaccatcagtatcaaatgtacaaacggttcttgctaaccaacaccaggtatatctgatgttcagatgagttccaataaaaataattttttttttttcaaaaggtgtctttttcttgagtgctggagggcttccaagcaagtccagacagctctgtgtggccccacactagtctagctctcatctggccaaagctgttatctcatttgtgtaatgggagtccttaaggtaaatttggggtccaaacttggagggctttgggggcaagaaagttggtgtgtgagttctgaggttggaaatgagttcaggtgtcttcttccagggcagcatggtccagtgagcacatgtaagtttgggcagtagatcctctgagcctactttctcttctactcagtgaggatgctgcttccttggcaggtgattgtgatgtgaagcttagtaagtcatagacgtgcaggtgtctggagagtcctgacatgcagttgtggtttcgtttccttttggaatcttcaaaggcagcgattttcatattgcctcacaccctggcgggggcggggggctctgggaccactgggggacctgctaaatcctcttcagtctgagcagttcagccattgtcagttttagtattgtgtctctgtatttcacttgcagaaagagctttgcttctataaaggactttaaaaagtactccaaagagatctagttttggagtagaggggagatgttttctcaaacttagggcagtcctgagatgctcaggcagtagcccttttctcagttccctttgcgggtcttggtcagatgatgccctctagacccgtgctgtccaatatgtagccgctagccatgtgcagctgtcaggcccttgcaacgtggctggttcgagctgtgatacactgcaagtgtaaacacaaaccagacttcgaaggcttagtatgataacaaaagaaaaggagtgtaaaatatgtcaataacttttttatatatgtgttgaaatattttgggtattgggttaaataaaatatattattaaaattcaaa

SEQ ID NO: 444487 - DNA, 291 bp, Homo sapiens
gccatctactgcccccctaaattgcaggccaccttggacatgcagtcgggtaacagacgtagctattcctgggatgtgttttcttaaagctcatcttattttataggtggaaggaatgggggttggggctggagaataaaattggctgatttggctctagcttcttcagagaaccagttagaaagctacctttctaactagctgctcccctcctgttaactgcctaaaatgtattaagaacatacctatctgtggttgaccaggcaatctgacttttagaaccaaacttag

SEQ ID NO: 444488 - DNA, 1385 bp, Homo sapiens
ccaaggttaaatgggcgcgtgaggacagttttctccggtcctggcgggtttgcccacctgccggccagcgttctgcgggagtcaagcctggaaagcgtgtgtgcggcgcacaggcgtcagacaactggaacgcattcgaatggtgctattctttgcccacatagcgagcactttataaggtcacttatcgtcccgaatgaatggttaaatcgtggaagccgcaaagaaagccacgcagctttgactcaatacctagcccagtactcaggaacccctctcaggggtgcgcgagcggggccggaatcaagaagcctcttttggggtgggcggggaccgatctagagctcccactgcggggcaccgcctcttttcctcgccggccgcccgctaggaggcgctggggagcttgcagcccacctgcgaggcggtcccgctctccccacccctcagcccgcgcccggcggagagactacaactcccggagtgctctgggaacggagccacgggagctacaggcggagggacccgagggcgggctttccgggtgtgtgtttccggcgtcggcggccgcggccggggacggtgtgagagcggtaagatggcggcggcggcggtggtggagttccagagagcccagtctctactcagcaccgaccgggaggcctccatcgacatcctccactccatcgtgaagcgtgacattcaggaaaacgatgaagaggcagtgcaagtcaaagagcagagcatcctggaactgggatctctcctggcaaagactggacaagctgcagagcttggaggactcctgaagtatgtacgacccttcttgaattccatcagcaaggctaaagcagctcgcctggtccgatctcttcttgatctgtttcttgatatggaagcagctacagggcaggaggtcgagctgtgtttagagtgcatcgaatgggccaagtcagagaaaagaactttcttacgccaagctttggaggcaagactggtgtctttgtactttgataccaagaggtaccaggaagcattgcatttgggttcttaacttgttggggggagttgaaaaagattggccaccaaaagcccttttggggggaaggccaagtttttagaaagcaaaaaaaacccattccctgggcaaacctgcccaaaggcccagagttgcttataatttttgtttaaacccacaaaaatggcccttttttggccccctaaaatggggggcccctttggaataccccggcggggttttttcccctcgcccaaaaaaaaagggcgggaaaaaccggcccttacctttttttgggggtttggggggggttgtttctttgaggggccccagggccaaatttttgtgagaagtggtgggtggggaa

SEQ ID NO: 444489 - DNA, 1625 bp, Homo sapiens
ccaaggttaaatgggcgcgtgaggacagttttctccggtcctggcgggtttgcccacctgccggccagcgttctgcgggagtcaagcctggaaagcgtgtgtgcggcgcacaggcgtcagacaactggaacgcattcgaatggtgctattctttgcccacatagcgagcactttataaggtcacttatcgtcccgaatgaatggttaaatcgtggaagccgcaaagaaagccacgcagctttgactcaatacctagcccagtactcaggaacccctctcaggggtgcgcgagcggggccggaatcaagaagcctcttttggggtgggcggggaccgatctagagctcccactgcggggcaccgcctcttttcctcgccggccgcccgctaggaggcgctggggagcttgcagcccacctgcgaggcggtcccgctctccccacccctcagcccgcgcccggcggagagactacaactcccggagtgctctgggaacggagccacgggagctacaggcggagggacccgagggcgggctttccgggtgtgtgtttccggcgtcggcggccgcggccggggacggtgtgagagcggtaagatggcggcggcggcggtggtggagttccagagagcccagtctctactcagcaccgaccgggaggcctccatcgacatcctccactccatcggtaaaggtcgccgcgccgcctccccggccccgccggcccagctcggcttatgtcggtcggcggcagcggagaggggcccggctagccggctctgatgctgctgactcactgtgtgaggggggccgggccgggggcgcaggccgctcggagctccccagagcctcccaggtctcactcttgtgggagggcttgaggcaatccccgggtcccctcgccggctgctgactcacggggggctcagcgtagggtgggagagtgggccgagccgggcccccggggatccctccctagccatgtccccggctctggcccgcacgagctggtctgggacccggagcagtgccggccggcgtgcttgtcacggactggtcctagagtctctacttgaaaggccttggcgaaaccagctctggacaggcatttcccgccgttgtaatcagcacagcctgctccgggtgggagcgcgagcgcttgctcttctctgggagtttccttccacgggacgctgggagctgctactcctcagccccacggcagaaagctccactaagaggagggtctctttcagaatgtgggaaattcaggggtgacacacacctcagattggcatttggtttgtggaggtggccgagacgctcatctgctctgtgtagggtgtaagagtgaggtgttggagcgggaccgcctggctagaggaggtgactaatctttccagactgcctgtaggggttggaagtgagttaagggagttagttgtcagccgcggagttcagggaattctttggaacgggtcggctgcatgttgccggaaaaattaaaatttcttaacgctgtaataacgatggtcttacacctacacacaacaggaaaactgaaatgggaatcccagccagtcgcttccggcagctttctgttgggattcaagtgtgaacagaa

SEQ ID NO: 444490 - DNA, 4435 bp, Homo sapiens
ccaaggttaaatgggcgcgtgaggacagttttctccggtcctggcgggtttgcccacctgccggccagcgttctgcgggagtcaagcctggaaagcgtgtgtgcggcgcacaggcgtcagacaactggaacgcattcgaatggtgctattctttgcccacatagcgagcactttataaggtcacttatcgtcccgaatgaatggttaaatcgtggaagccgcaaagaaagccacgcagctttgactcaatacctagcccagtactcaggaacccctctcaggggtgcgcgagcggggccggaatcaagaagcctcttttggggtgggcggggaccgatctagagctcccactgcggggcaccgcctcttttcctcgccggccgcccgctaggaggcgctggggagcttgcagcccacctgcgaggcggtcccgctctccccacccctcagcccgcgcccggcggagagactacaactcccggagtgctctgggaacggagccacgggagctacaggcggagggacccgagggcgggctttccgggtgtgtgtttccggcgtcggcggccgcggccggggacggtgtgagagcggtaagatggcggcggcggcggtggtggagttccagagagcccagtctctactcagcaccgaccgggaggcctccatcgacatcctccactccatcgtgaagcgtgacattcaggaaaacgatgaagaggcagtgcaagtcaaagagcagagcatcctggaactgggatctctcctggcaaagactggacaagctgcagagcttggaggactcctgaagtatgtacgacccttcttgaattccatcagcaaggctaaagcagctcgcctggtccgatctcttcttgatctgtttcttgatatggaagcagctacagggcaggaggtcgagctgtgtttagagtgcatcgaatgggccaagtcagagaaaagaactttcttacgccaagctttggaggcaagactggtgtctttgtactttgataccaagaggtaccaggaagcattgcatttgggttctcagctgctgcgggagttgaaaaagatggacgacaaagctcttttggtggaagtacagcttttagaaagcaaaacataccatgccctgagcaacctgccgaaagcccgagctgccttaacttctgctcgaaccacagcaaatgccatctactgcccccctaaattgcaggccaccttggacatgcagtcgggtattatccatgcagcagaagagaaggactggaaaactgcgtactcatacttctatgaggcatttgagggttatgactccatcgacagccccaaggccatcacatctctgaagtacatgttgctgtgcaaaatcatgctcaacaccccagaagatgtccaggctttggtgagcgggaagcttgcacttcggtatgcagggaggcagacagaagcattaaaatgcgtggctcaggctagcaagaacagatcactggcagattttgaaaaggctctgacagattaccgggcagagctccgggatgacccaatcatcagcacacacttggccaagttgtatgataacttactagaacagaatctgatccgagtcattgagcctttttccagagtacagattgaacacatatctagtctcatcaaactctccaaggccgacgtggaaaggaaattatcacagatgattcttgacaagaaatttcatgggattttggaccagggggagggtgtcctgattattttcgatgaacccccagtagataaaacttacgaagctgctctggaaacaattcagaacatgagcaaagtagtggattccctctacaacaaagccaagaaactgacatagagttggatctgtagcggtcctttggagagtgtgtgtggcgggagagtgaaaccttgggggaaaatgctaggagattcttttttctttttgttctacttttcgctcggaaagtttttaaatcctcatttggtgcatctgtattccagccaataggtgtgccagttttcatgtaatctttactggcccaacttgggagtggggaaattgcttaaaaaaaaagaaaaagaaaaaaaaaaagattattctaaataaaaggaaaaaggcttacactacctaaagctgtgctctctgcctcctgggagagggccgcaaagccaggcaccccgccaaccactgggggtcctaatccacctgctgggcatcacctctcctcctcctcagaattgggtgtttgctgaccatcaaaagcaatgactttttattctgtttgtactgaaccaaaacaaacaactgtgtatagactgctgttttcttttttatttgaaatgaggcattttggtgttctttcccctaccatacggcctgtctgcccttccctccccacattggctccagcagagtagccgaaggtcctgccgccgccgccaccaccaccaccactgcagcaacaacagcagcagcagcagcagcgcctgcatagctccactctgacctgtgaaggaatggggatgaggccaggagctagtgtctaccacggccacacagggagcagtgtgggcccttagcccccaaggggcctgctatgcatgtggctttttttttttttttaaacacagtaaactagattagtcgtcagtgttttaattgcccctcttctcctctcctgcattcctctcctctcttctttcctctctgtcccttctctttcccctctcaaccaggagaccatcatgtctctctgccttcctcctctcccctccaggggagtcaggctgtctgtgaaagccatgagcttctctccctctcccactcctcctctcctactttcagatggatttattccttttttaaacaatgaacatcggaaatgagactgtggggtgtggtttctctctctcttttttttttaattttctttgttgggtttttgagcaacctcatgtccccttcccagggagctttttaatttacctcttagaactcaagtggatgggaagtagagcactatgtgtcagtatgctttgttttctgacacgattacacagcgaggctttaatgccatttgggtaggtgagcttctgcacttctgttgtgctgaactgtattttcttctctcatctcctctttgtctttttctcttttcctctccttcctgccttcttctgctggcctccttttctctttctttaccttccttggattatccttccaggttttcataataaatttatattttgtaaaaggattttgttgtaccaggttttgcatcctcactgaatctgactggcttttattttcctctccaaaatcaggtttttgttctcaacatctttccccatcatgtctagtcactgttttggttttggcaccatcagtatcaaatgtacaaacggttcttgctaaccaacaccaggtatatctgatgttcagatgagttccaataaaaataattttttttttttcaaaaggtgtctttttcttgagtgctggagggcttccaagcaagtccagacagctctgtgtggccccacactagtctagctctcatctggccaaagctgttatctcatttgtgtaatgggagtccttaaggtaaatttggggtccaaacttggagggctttgggggcaagaaagttggtgtgtgagttctgaggttggaaatgagttcaggtgtcttcttccagggcagcatggtccagtgagcacatgtaagtttgggcagtagatcctctgagcctactttctcttctactcagtgaggatgctgcttccttggcaggtgattgtgatgtgaagcttagtaagtcatagacgtgcaggtgtctggagagtcctgacatgcagttgtggtttcgtttccttttggaatcttcaaaggcagcgattttcatattgcctcacaccctggcgggggcggggggctctgggaccactgggggacctgctaaatcctcttcagtctgagcagttcagccattgtcagttttagtattgtgtctctgtatttcacttgcagaaagagctttgcttctataaaggactttaaaaagtactccaaagagatctagttttggagtagaggggagatgttttctcaaacttagggcagtcctgagatgctcaggcagtagcccttttctcagttccctttgcgggtcttggtcagatgatgccctctagacccgtgctgtccaatatgtagccgctagccatgtgcagctgtcaggcccttgcaacgtggctggttcgagctgtgatacactgcaagtgtaaacacaaaccagacttcgaaggcttagtatgataacaaaagaaaaggagtgtaaaatatgtcaataacttttttatatatgtgttgaaatattttgggtattgggttaaataaaatatattattaaaattcaaa

SEQ ID NO: 444491 - DNA, 3269 bp, Homo sapiens
ccaaggttaaatgggcgcgtgaggacagttttctccggtcctggcgggtttgcccacctgccggccagcgttctgcgggagtcaagcctggaaagcgtgtgtgcggcgcacaggcgtcagacaactggaacgcattcgaatggtgctattctttgcccacatagcgagcactttataaggtcacttatcgtcccgaatgaatggttaaatcgtggaagccgcaaagaaagccacgcagctttgactcaatacctagcccagtactcaggaacccctctcaggggtgcgcgagcggggccggaatcaagaagcctcttttggggtgggcggggaccgatctagagctcccactgcggggcaccgcctcttttcctcgccggccgcccgctaggaggcgctggggagcttgcagcccacctgcgaggcggtcccgctctccccacccctcagcccgcgcccggcggagagactacaactcccggagtgctctgggaacggagccacgggagctacaggcggagggacccgagggcgggctttccgggtgtgtgtttccggcgtcggcggccgcggccggggacggtgtgagagcggtaagatggcggcggcggcggtggtggagttccagagagcccagtctctactcagcaccgaccgggaggcctccatcgacatcctccactccatcgtgaagcgtgacattcaggaaaacgatgaagaggcagtgcaagtcaaagagcagagcatcctggaactgggatctctcctggcaaagactggacaagctgcagagcttggaggactcctgaagtatgtacgacccttcttgaattccatcagcaaggctaaagcagctcgcctggtccgatctcttcttgatctgtttcttgatatggaagcagctacagggcaggaggtcgagctgtgtttagagtgcatcgaatgggccaagtcagagaaaagaactttcttacgccaagctttggaggcaagactggtgtctttgtactttgataccaagaggtaccaggaagcattgcatttgggttctcagctgctgcgggagttgaaaaagatggacgacaaagctcttttggtggaagtacagcttttagaaagcaaaacataccatgccctgagcaacctgccgaaagcccgagctgccttaacttctgctcgaaccacagcaaatgccatctactgcccccctaaattgcaggccaccttggacatgcagtcgggtattatccatgcagcagaagagaaggactggaaaactgcgtactcatacttctatgaggcatttgagggttatgactccatcgacagccccaaggccatcacatctctgaagtacatgttgctgtgcaaaatcatgctcaacaccccagaagatgtccaggctttggtgagcgggaagcttgcacttcggtatgcagggaggcagacagaagcattaaaatgcgtggctcaggctagcaagaacagatcactggcagattttgaaaaggctctgacagattaccgggcagagctccgggatgacccaatcatcagcacacacttggccaagttgtatgataacttactagaacagaatctgatccgagtcattgagcctttttccagagtacagattgaacacatatctagtctcatcaaactctccaaggccgacgtggaaaggaaattatcacagatgattcttgacaagaaatttcatgggattttggaccagggggagggtgtcctgattattttcgatgaacccccagtagataaaacttacgaagctgctctggaaacaattcagaacatgagcaaagtagtggattccctctacaacaaagccaagaaactgacatagagttggatctgtagcggtcctttggagagtgtgtgtggcgggagagtgaaaccttgggggaaaatgctaggagattcttttttctttttgttctacttttcgctcggaaagtttttaaatcctcatttggtgcatctgtattccagccaataggtgtgccagttttcatgtaatctttactggcccaacttgggagtggggaaattgcttaaaaaaaaagaaaaagaaaaaaaaaaagattattctaaataaaaggaaaaaggcttacactacctaaagctgtgctctctgcctcctgggagagggccgcaaagccaggcaccccgccaaccactgggggtcctaatccacctgctgggcatcacctctcctcctcctcagaattgggtgtttgctgaccatcaaaagcaatgactttttattctgtttgtactgaaccaaaacaaacaactgtgtatagactgctgttttcttttttatttgaaatgaggcattttggtgttctttcccctaccatacggcctgtctgcccttccctccccacattggctccagcagagtagccgaaggtcctgccgccgccgccaccaccaccaccactgcagcaacaacagcagcagcagcagcagcgcctgcatagctccactctgacctgtgaaggaatggggatgaggccaggagctagtgtctaccacggccacacagggagcagtgtgggcccttagcccccaaggggcctgctatgcatgtggctttttttttttttttaaacacagtaaactagattagtcgtcagtgttttaattgcccctcttctcctctcctgcattcctctcctctcttctttcctctctgtcccttctctttcccctctcaaccaggagaccatcatgtctctctgccttcctcctctcccctccaggggagtcaggctgtctgtgaaagccatgagcttctctccctctcccactcctcctctcctactttcagatggatttattccttttttaaacaatgaacatcggaaatgagactgtggggtgtggtttctctctctcttttttttttaattttctttgttgggtttttgagcaacctcatgtccccttcccagggagctttttaatttacctcttagaactcaagtggatgggaagtagagcactatgtgtcagtatgctttgttttctgacacgattacacagcgaggctttaatgccatttgggtaggtgagcttactgtaacccaaaaaactaagaatgatatgactgtttggagtgaagaagtagaaattgaaagagaagtgctcttagaaaagttcatcaatggtgctaaggaaatttgctatgctcttcgagctgagggttattgggctgactttattgacccatcatctggttt

SEQ ID NO: 444492 - DNA, 4556 bp, Homo sapiens
ccaaggttaaatgggcgcgtgaggacagttttctccggtcctggcgggtttgcccacctgccggccagcgttctgcgggagtcaagcctggaaagcgtgtgtgcggcgcacaggcgtcagacaactggaacgcattcgaatggtgctattctttgcccacatagcgagcactttataaggtcacttatcgtcccgaatgaatggttaaatcgtggaagccgcaaagaaagccacgcagctttgactcaatacctagcccagtactcaggaacccctctcaggggtgcgcgagcggggccggaatcaagaagcctcttttggggtgggcggggaccgatctagagctcccactgcggggcaccgcctcttttcctcgccggccgcccgctaggaggcgctggggagcttgcagcccacctgcgaggcggtcccgctctccccacccctcagcccgcgcccggcggagagactacaactcccggagtgctctgggaacggagccacgggagctacaggcggagggacccgagggcgggctttccgggtgtgtgtttccggcgtcggcggccgcggccggggacggtgtgagagcggtaagatggcggcggcggcggtggtggagttccagagagcccagtctctactcagcaccgaccgggaggcctccatcgacatcctccactccatcgtgaagcgtgacattcaggaaaacgatgaagaggcagtgcaagtcaaagagcagagcatcctggaactgggatctctcctggcaaagactggacaagctgcagagcttggaggactcctgaagtatgtacgacccttcttgaattccatcagcaaggctaaagcagctcgcctggtccgatctcttcttgatctgtttcttgatatggaagcagctacagggcaggaggtcgagctgtgtttagagtgcatcgaatgggccaagtcagagaaaagaactttcttacgccaagctttggaggcaagactggtgtctttgtactttgataccaagaggtaccaggaagcattgcatttgggttctcagctgctgcgggagttgaaaaagatggacgacaaagctcttttggtggaagtacagcttttagaaagcaaaacataccatgccctgagcaacctgccgaaagcccgagctgccttaacttctgctcgaaccacagcaaatgccatctactgcccccctaaattgcaggccaccttggacatgcagtcgggtattatccatgcagcagaagagaaggactggaaaactgcgtactcatacttctatgaggcatttgagggttatgactccatcgacagccccaaggccatcacatctctgaagtacatgttgctgtgcaaaatcatgctcaacaccccagaagatgtccaggctttggtgagcgggaagcttgcacttcggtatgcagggaggcagacagaagcattaaaatgcgtggctcaggctagcaagaacagatcactggcagattttgaaaaggctctgacagattaccgggcagagctccgggatgacccaatcatcagcacacacttggccaagttgtatgataacttactagaacagaatctgatccgagtcattgagcctttttccagagtacagattgaacacatatctagtctcatcaaactctccaaggccgacgtggaaaggaaattatcacagatgattcttgacaagaaatttcatgggattttggaccagggggagggtgtcctgattattttcgatgaacccccagtagataaaacttacgaagctgctctggaaacaattcagaacatgagcaaagtagtggattccctctacaacaaagccaagaaactgacataggtgagtgctggcttcaggaccccagggctgggcagctctgtcttctgcgtgtcgagactgaaaacctcctcctggtgtcctcatggcttcctgattgacactgctctgtcttctcttgcagagttggatctgtagcggtcctttggagagtgtgtgtggcgggagagtgaaaccttgggggaaaatgctaggagattcttttttctttttgttctacttttcgctcggaaagtttttaaatcctcatttggtgcatctgtattccagccaataggtgtgccagttttcatgtaatctttactggcccaacttgggagtggggaaattgcttaaaaaaaaagaaaaagaaaaaaaaaaagattattctaaataaaaggaaaaaggcttacactacctaaagctgtgctctctgcctcctgggagagggccgcaaagccaggcaccccgccaaccactgggggtcctaatccacctgctgggcatcacctctcctcctcctcagaattgggtgtttgctgaccatcaaaagcaatgactttttattctgtttgtactgaaccaaaacaaacaactgtgtatagactgctgttttcttttttatttgaaatgaggcattttggtgttctttcccctaccatacggcctgtctgcccttccctccccacattggctccagcagagtagccgaaggtcctgccgccgccgccaccaccaccaccactgcagcaacaacagcagcagcagcagcagcgcctgcatagctccactctgacctgtgaaggaatggggatgaggccaggagctagtgtctaccacggccacacagggagcagtgtgggcccttagcccccaaggggcctgctatgcatgtggctttttttttttttttaaacacagtaaactagattagtcgtcagtgttttaattgcccctcttctcctctcctgcattcctctcctctcttctttcctctctgtcccttctctttcccctctcaaccaggagaccatcatgtctctctgccttcctcctctcccctccaggggagtcaggctgtctgtgaaagccatgagcttctctccctctcccactcctcctctcctactttcagatggatttattccttttttaaacaatgaacatcggaaatgagactgtggggtgtggtttctctctctcttttttttttaattttctttgttgggtttttgagcaacctcatgtccccttcccagggagctttttaatttacctcttagaactcaagtggatgggaagtagagcactatgtgtcagtatgctttgttttctgacacgattacacagcgaggctttaatgccatttgggtaggtgagcttctgcacttctgttgtgctgaactgtattttcttctctcatctcctctttgtctttttctcttttcctctccttcctgccttcttctgctggcctccttttctctttctttaccttccttggattatccttccaggttttcataataaatttatattttgtaaaaggattttgttgtaccaggttttgcatcctcactgaatctgactggcttttattttcctctccaaaatcaggtttttgttctcaacatctttccccatcatgtctagtcactgttttggttttggcaccatcagtatcaaatgtacaaacggttcttgctaaccaacaccaggtatatctgatgttcagatgagttccaataaaaataattttttttttttcaaaaggtgtctttttcttgagtgctggagggcttccaagcaagtccagacagctctgtgtggccccacactagtctagctctcatctggccaaagctgttatctcatttgtgtaatgggagtccttaaggtaaatttggggtccaaacttggagggctttgggggcaagaaagttggtgtgtgagttctgaggttggaaatgagttcaggtgtcttcttccagggcagcatggtccagtgagcacatgtaagtttgggcagtagatcctctgagcctactttctcttctactcagtgaggatgctgcttccttggcaggtgattgtgatgtgaagcttagtaagtcatagacgtgcaggtgtctggagagtcctgacatgcagttgtggtttcgtttccttttggaatcttcaaaggcagcgattttcatattgcctcacaccctggcgggggcggggggctctgggaccactgggggacctgctaaatcctcttcagtctgagcagttcagccattgtcagttttagtattgtgtctctgtatttcacttgcagaaagagctttgcttctataaaggactttaaaaagtactccaaagagatctagttttggagtagaggggagatgttttctcaaacttagggcagtcctgagatgctcaggcagtagcccttttctcagttccctttgcgggtcttggtcagatgatgccctctagacccgtgctgtccaatatgtagccgctagccatgtgcagctgtcaggcccttgcaacgtggctggttcgagctgtgatacactgcaagtgtaaacacaaaccagacttcgaaggcttagtatgataacaaaagaaaaggagtgtaaaatatgtcaataacttttttatatatgtgttgaaatattttgggtattgggttaaataaaatatattattaaaattcaaa

SEQ ID NO: 444493 - DNA, 3693 bp, Homo sapiens
tattgattatctgcggaagttcggtcatcaggaggtcgtatatagtacatcgtgtcgtatagtacgaccctatcttgaatcccattacgtgaaggatatccactcaccgcgggggccgatctctccttgatctagtagctcgatattggacaccagtatatgagtcgtattacacgaccacgggtcgtcagttgcatcgaatgggccaagtcagagaaaagaactttcttacgccaagctttggaggcaagactggtgtctttgtactttgataccaagaggtaccaggaagcattgcatttgggttctcagctgctgcgggagttgaaaaagatggacgacaaagctcttttggtggaagtacagcttttagaaagcaaaacataccatgccctgagcaacctgccgaaagcccgagctgccttaacttctgctcgaaccacagcaaatgccatctactgcccccctaaattgcaggccaccttggacatgcagtcgggtattatccatgcagcagaagagaaggactggaaaactgcgtactcatacttctatgaggcatttgagggttatgactccatcgacagccccaaggccatcacatctctgaagtacatgttgctgtgcaaaatcatgctcaacaccccagaagatgtccaggctttggtgagcgggaagcttgcacttcggtatgcagggaggcagacagaagcattaaaatgcgtggctcaggctagcaagaacagatcactggcagattttgaaaaggctctgacagattaccgggcagagctccgggatgacccaatcatcagcacacacttggccaagttgtatgataacttactagaacagaatctgatccgagtcattgagcctttttccagagtacagattgaacacatatctagtctcatcaaactctccaaggccgacgtggaaaggaaattatcacagatgattcttgacaagaaatttcatgggattttggaccagggggagggtgtcctgattattttcgatgaacccccagtagataaaacttacgaagctgctctggaaacaattcagaacatgagcaaagtagtggattccctctacaacaaagccaagaaactgacatagagttggatctgtagcggtcctttggagagtgtgtgtggcgggagagtgaaaccttgggggaaaatgctaggagattcttttttctttttgttctacttttcgctcggaaagtttttaaatcctcatttggtgcatctgtattccagccaataggtgtgccagttttcatgtaatctttactggcccaacttgggagtggggaaattgcttaaaaaaaaagaaaaagaaaaaaaaaaagattattctaaataaaaggaaaaaggcttacactacctaaagctgtgctctctgcctcctgggagagggccgcaaagccaggcaccccgccaaccactgggggtcctaatccacctgctgggcatcacctctcctcctcctcagaattgggtgtttgctgaccatcaaaagcaatgactttttattctgtttgtactgaaccaaaacaaacaactgtgtatagactgctgttttcttttttatttgaaatgaggcattttggtgttctttcccctaccatacggcctgtctgcccttccctccccacattggctccagcagagtagccgaaggtcctgccgccgccgccaccaccaccaccactgcagcaacaacagcagcagcagcagcagcgcctgcatagctccactctgacctgtgaaggaatggggatgaggccaggagctagtgtctaccacggccacacagggagcagtgtgggcccttagcccccaaggggcctgctatgcatgtggctttttttttttttttaaacacagtaaactagattagtcgtcagtgttttaattgcccctcttctcctctcctgcattcctctcctctcttctttcctctctgtcccttctctttcccctctcaaccaggagaccatcatgtctctctgccttcctcctctcccctccaggggagtcaggctgtctgtgaaagccatgagcttctctccctctcccactcctcctctcctactttcagatggatttattccttttttaaacaatgaacatcggaaatgagactgtggggtgtggtttctctctctcttttttttttaattttctttgttgggtttttgagcaacctcatgtccccttcccagggagctttttaatttacctcttagaactcaagtggatgggaagtagagcactatgtgtcagtatgctttgttttctgacacgattacacagcgaggctttaatgccatttgggtaggtgagcttctgcacttctgttgtgctgaactgtattttcttctctcatctcctctttgtctttttctcttttcctctccttcctgccttcttctgctggcctccttttctctttctttaccttccttggattatccttccaggttttcataataaatttatattttgtaaaaggattttgttgtaccaggttttgcatcctcactgaatctgactggcttttattttcctctccaaaatcaggtttttgttctcaacatctttccccatcatgtctagtcactgttttggttttggcaccatcagtatcaaatgtacaaacggttcttgctaaccaacaccaggtatatctgatgttcagatgagttccaataaaaataattttttttttttcaaaaggtgtctttttcttgagtgctggagggcttccaagcaagtccagacagctctgtgtggccccacactagtctagctctcatctggccaaagctgttatctcatttgtgtaatgggagtccttaaggtaaatttggggtccaaacttggagggctttgggggcaagaaagttggtgtgtgagttctgaggttggaaatgagttcaggtgtcttcttccagggcagcatggtccagtgagcacatgtaagtttgggcagtagatcctctgagcctactttctcttctactcagtgaggatgctgcttccttggcaggtgattgtgatgtgaagcttagtaagtcatagacgtgcaggtgtctggagagtcctgacatgcagttgtggtttcgtttccttttggaatcttcaaaggcagcgattttcatattgcctcacaccctggcgggggcggggggctctgggaccactgggggacctgctaaatcctcttcagtctgagcagttcagccattgtcagttttagtattgtgtctctgtatttcacttgcagaaagagctttgcttctataaaggactttaaaaagtactccaaagagatctagttttggagtagaggggagatgttttctcaaacttagggcagtcctgagatgctcaggcagtagcccttttctcagttccctttgcgggtcttggtcagatgatgccctctagacccgtgctgtccaatatgtagccgctagccatgtgcagctgtcaggcccttgcaacgtggctggttcgagctgtgatacactgcaagtgtaaacacaaaccagacttcgaaggcttagtatgataacaaaagaaaaggagtgtaaaatatgtcaataacttttttatatatgtgttgaaatattttgggtattgggttaaataaaatatattattaaaattcaaa

SEQ ID NO: 444494 - DNA, 1938 bp, Homo sapiens
ccaaggttaaatgggcgcgtgaggacagttttctccggtcctggcgggtttgcccacctgccggccagcgttctgcgggagtcaagcctggaaagcgtgtgtgcggcgcacaggcgtcagacaactggaacgcattcgaatggtgctattctttgcccacatagcgagcactttataaggtcacttatcgtcccgaatgaatggttaaatcgtggaagccgcaaagaaagccacgcagctttgactcaatacctagcccagtactcaggaacccctctcaggggtgcgcgagcggggccggaatcaagaagcctcttttggggtgggcggggaccgatctagagctcccactgcggggcaccgcctcttttcctcgccggccgcccgctaggaggcgctggggagcttgcagcccacctgcgaggcggtcccgctctccccacccctcagcccgcgcccggcggagagactacaactcccggagtgctctgggaacggagccacgggagctacaggcggagggacccgagggcgggctttccgggtgtgtgtttccggcgtcggcggccgcggccggggacggtgtgagagcggtaagatggcggcggcggcggtggtggagttccagagagcccagtctctactcagcaccgaccgggaggcctccatcgacatcctccactccatcgtgaagcgtgacattcaggaaaacgatgaagaggcagtgcaagtcaaagagcagagcatcctggaactgggatctctcctggcaaagactggacaagctgcagagcttggaggactcctgaagtatgtacgacccttcttgaattccatcagcaaggctaaagcagctcgcctggtccgatctcttcttgatctgtttcttgatatggaagcagctacagggcaggaggtcgagctgtgtttagagtgcatcgaatgggccaagtcagagaaaagaactttcttacgccaagctttggaggcaagactggtgtctttgtactttgataccaagaggtaccaggaagcattgcatttgggttctcagctgctgcgggagttgaaaaagatggacgacaaagctcttttggtggaagtacagcttttagaaagcaaaacataccatgccctgagcaacctgccgaaagcccgagctgccttaacttctgctcgaaccacagcaaatgccatctactgcccccctaaattgcaggccaccttggacatgcagtcgggtattatccatgcagcagaagagaaggactggaaaactgcgtactcatacttctatgaggcatttgagggttatgactccatcgacagccccaaggccatcacatctctgaagtacatgttgctgtgcaaaatcatgctcaacaccccagaagatgtccaggctttggtgagcgggaagcttgcacttcggtatgcagggaggcagacagaagcattaaaatgcgtggctcaggctagcaagaacagatcactggcagattttgaaaaggctctgacagattaccgggcagagctccgggatgacccaatcatcagcacacacttggccaagttgtatgataacttactagaacagaatctgatccgagtcattgagcctttttccagagtacagattgaacacatatctagtctcatcaaactctccaaggccgacgtggaaaggaaattatcacagatgattcttgacaagaaatttcatgggattttggaccaatgggagggggtccctgttattttagatgaaccccttgtgcattaaaatttcaaatctgctatggaatccattttatacgtgggccatttaatgggattccctttagaacaaagccaataaacttccctctttgtgtgatttcttctcgtccttttataatttttttttttacgtttaatttttactctttgtggatattt

SEQ ID NO: 444495 - DNA, 2025 bp, Homo sapiens
ccaaggttaaatgggcgcgtgaggacagttttctccggtcctggcgggtttgcccacctgccggccagcgttctgcgggagtcaagcctggaaagcgtgtgtgcggcgcacaggcgtcagacaactggaacgcattcgaatggtgctattctttgcccacatagcgagcactttataaggtcacttatcgtcccgaatgaatggttaaatcgtggaagccgcaaagaaagccacgcagctttgactcaatacctagcccagtactcaggaacccctctcaggggtgcgcgagcggggccggaatcaagaagcctcttttggggtgggcggggaccgatctagagctcccactgcggggcaccgcctcttttcctcgccggccgcccgctaggaggcgctggggagcttgcagcccacctgcgaggcggtcccgctctccccacccctcagcccgcgcccggcggagagactacaactcccggagtgctctgggaacggagccacgggagctacaggcggagggacccgagggcgggctttccgggtgtgtgtttccggcgtcggcggccgcggccggggacggtgtgagagcggtaagatggcggcggcggcggtggtggagttccagagagcccagtctctactcagcaccgaccgggaggcctccatcgacatcctccactccatcgtgaagcgtgacattcaggaaaacgatgaagaggcagtgcaagtcaaagagcagagcatcctggaactgggatctctcctggcaaagactggacaagctgcagagcttggaggactcctgaagtatgtacgacccttcttgaattccatcagcaaggctaaagcagctcgcctggtccgatctcttcttgatctgtttcttgatatggaagcagctacagggcaggaggtcgagctgtgtttagagtgcatcgaatgggccaagtcagagaaaagaactttcttacgccaagctttggaggcaagactggtgtctttgtactttgataccaagaggtaccaggaagcattgcatttgggttctcagctgctgcgggagttgaaaaagatggacgacaaagctcttttggtggaagtacagcttttagaaagcaaaacataccatgccctgagcaacctgccgaaagcccgagctgccttaacttctgctcgaaccacagcaaatgccatctactgcccccctaaattgcaggccaccttggacatgcagtcgggtattatccatgcagcagaagagaaggactggaaaactgcgtactcatacttctatgaggcatttgagggttatgactccatcgacagccccaaggccatcacatctctgaagtacatgttgctgtgcaaaatcatgctcaacaccccagaagatgtccaggctttggtgagcgggaagcttgcacttcggtatgcagggaggcagacagaagcattaaaatgcgtggctcaggctagcaagaacagatcactggcagattttgaaaaggctctgacagattaccgggcagagctccgggatgacccaatcatcagcacacacttggccaagttgtatgataacttactagaacagaatctgatccgagtcattgagcctttttccagagtacaggtgagaaccctctggggactccatttctggccaggcattctcactgtagccacctcccttccacacctgtccagaatgggaactcacttctaggggtgtgcctggtgggcaagaggccaccaagagcttgggcctctgttgataaaatgaacaaaaatcgaggagagagatgctgtgggtagaggcatgtgggttgcccctgcatgtgttctgagcagtttcctcctcgcttttagtcactgcatgtgttgtacctgttttctgtattgggtgtgtgggataagagtctgtttattgtgtgtagcagtgaagggcaggcagatgggcagagaacaagagacttaagcacggccaaggagggtcttacattagaattttgagaaatacag

SEQ ID NO: 444496 - DNA, 1769 bp, Homo sapiens
ccaaggttaaatgggcgcgtgaggacagttttctccggtcctggcgggtttgcccacctgccggccagcgttctgcgggagtcaagcctggaaagcgtgtgtgcggcgcacaggcgtcagacaactggaacgcattcgaatggtgctattctttgcccacatagcgagcactttataaggtcacttatcgtcccgaatgaatggttaaatcgtggaagccgcaaagaaagccacgcagctttgactcaatacctagcccagtactcaggaacccctctcaggggtgcgcgagcggggccggaatcaagaagcctcttttggggtgggcggggaccgatctagagctcccactgcggggcaccgcctcttttcctcgccggccgcccgctaggaggcgctggggagcttgcagcccacctgcgaggcggtcccgctctccccacccctcagcccgcgcccggcggagagactacaactcccggagtgctctgggaacggagccacgggagctacaggcggagggacccgagggcgggctttccgggtgtgtgtttccggcgtcggcggccgcggccggggacggtgtgagagcggtaagatggcggcggcggcggtggtggagttccagagagcccagtctctactcagcaccgaccgggaggcctccatcgacatcctccactccatcgtgaagcgtgacattcaggaaaacgatgaagaggcagtgcaagtcaaagagcagagcatcctggaactgggatctctcctggcaaagactggacaagctgcagagcttggaggactcctgaagtatgtacgacccttcttgaattccatcagcaaggctaaagcagctcgcctggtccgatctcttcttgatctgtttcttgatatggaagcagctacagggcaggaggtcgagctgtgtttagagtgcatcgaatgggccaagtcagagaaaagaactttcttacgccaagctttggaggcaagactggtgtctttgtactttgataccaagaggtaccaggaagcattgcatttgggttctcagctgctgcgggagttgaaaaagatggacgacaaagctcttttggtggaagtacagcttttagaaagcaaaacataccatgccctgagcaacctgccgaaagcccgagctgccttaacttctgctcgaaccacagcaaatgccatctactgcccccctaaattgcaggccaccttggacatgcagtcgggtattatccatgcagcagaagagaaggactggaaaactgcgtactcatacttctatgaggcatttgagggttatgactccatcgacagccccaaggccatcacatctctgaagtacatgttgctgtgcaaaatcatgctcaacaccccagaagatgtccaggctttggtgagcgggaagcttgcacttcggtatgcagggaggcagacagaagcattaaaatgcgtggctcaggctagcaagaacagatcactggcagattttgaaaagtccgggaagctgaaagtccccgaatgggtggataccgtcaagctggccaagcacaaagagcttgctccctacgatgagaactggttctacacgcgagctgcttccacagcgcggcacctgtacctccggggtggcgctggggttggctccatgaccaagatctatgggggacgtcagagaaacggcgtcatgcccagccacttcagccgaggctccaagagtgtggccgccgggtcctccaagcctggaggggctgaaa

SEQ ID NO: 444497 - DNA, 819 bp, Homo sapiens
gcggctgtctagaggatccctcataggttcgcaggcacacctgtgcagatgaatccagccttctctaggggagagagggtatcccggcttaagagcagggctctcctgagttaaggaagtgtcttccccagagcccattccgtcagacgttcatatcatgtaactcagtccttttctgattatgtattcaccaagcaaacttaagagttggcttgtcaccagacctacaccctgcgaacctatgaaggttcgcagggaaccttccagaagtgggcagctgtggtggtgccttctggagaggagcagagatacacgtgccatgtgcagcatgaggggctacccgagcccgtcaccctgagatggaagccggcttcccagcccaccatccccatcgtgggcatcattgctggcctggttctccttggatctgtggtctctggagctgtggttgctgctgtgatatggaggaagaagagctcaggtggaaaaggagggagctactctaaggctgagtggagcgacagtgcccaggggtctgagtctcacagcttgtaaagcctgagacagctgccttgtgtgcgactgagatgcacagctgccttgtgtgcgactgagatgcaggatttcctcacgcctcccctatgtgtcttaggggactctggcttctctttttgcaagggcctctgaatctgtctgtgtccctgttagcacaatgtgaggaggtagagaaacagtccacctctgtgtctaccatgacccccttcctcacactgacctgtgtcgaacctatgaggtaccgagctcgattgtatatgtact

SEQ ID NO: 444498 - DNA, 143 bp, Homo sapiens
gcggccgcctactactactactactgctcgaattcaagcttctaacgatgtacggggattaacagcatctgcttcattcccctcaccttcccaggctgatctgaggtaaactttgaagtaaaataaaagctgtgtttgagcat

SEQ ID NO: 444499 - DNA, 2310 bp, Homo sapiens
  misc_feature (18)..(18): n is a, c, g, or t
aaacagtccacctctgtntctaccatgacccccttcctcacactgacctgtgttccttccctgttctcttttctattaaaaataagaacctgggccctgggcttctaccctgcggagatcacactgacctggcagcaggatggggagggccatacccaggacacggagctcgtggagaccaggcctgcaggggatggaaccttccagaagtgggcagctgtggtggtgccttctggagaggagcagagatacacgtgccatgtgcagcatgaggggctacccgagcccgtcaccctgagatggaagccggcttcccagcccaccatccccatcgtgggcatcattgctggcctggttctccttggatctgtggtctctggagctgtggttgctgctgtgatatggaggaagaagagctcaggtggaaaaggagggagctactctaaggctgagtggagcgacagtgcccaggggtctgagtctcacagcttgtaaagcctgagacagctgccttgtgtgcgactgagatgcacagctgccttgtgtgcgactgagatgcaggatttcctcacgcctcccctatgtgtcttaggggactctggcttctctttttgcaagggcctctgaatctgtctgtgtccctgttagcacaatgtgaggaggtagagaaacagtccacctctgtgtctaccatgacccccttcctcacactgacctgtgttccttccctgttctcttttctattaaaaataagaacctgggcagagtgcggcagctcatgcctgtaatcccagcacttagggaggccgaggagggcagatcacgaggtcaggagatcgaaaccatcctggctaacacggtgaaaccccgtctctactaaaaaatacaaaaaattagctgggcgcagaggcacgggcctgtagtcccagctactcaggaggcggaggcaggagaatggcgtcaacccgggaggcggaggttgcagtgagccaggattgtgcgactgcactccagcctgggtgacagggtgaaacgccatctcaaaaaataaaaattaaaaaataaaaaaagaacctggatctcaatttaatttttcatattcttgcaatgaaatggacttgaggaagctaagatcatagctagaaatacagataattccacagcacatctctagcaaatttagcctattcctattctctagcctattccttaccacctgtaatcttgaccatataccttggagttgaatattgttttcatactgctgtggtttgaatgttccctccaacactcatgttgagacttaatccctaatgtggcaatactgaaaggtggggcctttgagatgtgattggatcgtaaggctgtgccttcattcatgggttaatggattaatgggttatcacaggaatgggactggtggctttataagaagaggaaaagagaactgagctagcatgcccagcccacagagagcctccactagagtgatgctaagtggaaatgtgaggtgcagctgccacagagggcccccaccagggaaatgtctagtgtctagtggatccaggccacaggagagagtgccttgtggagcgctgggagcaggacctgaccaccaccaggaccccagaactgtggagtcagtggcagcatgcagcgcccccttgggaaagctttaggcaccagcctgcaacccattcgagcagccacgtaggctgcacccagcaaagccacaggcacggggctacctgaggccttgggggcccaatccctgctccagtgtgtccgtgaggcagcacacgaagtcaaaagagattattctcttcccacagataccttttctctcccatgaccctttaacagcatctgcttcattcccctcaccttcccaggctgatctgaggtaaactttgaagtaaaataaaagctgtgtttgagcatcatttgtatttcatttgtgcgttttgtgccttgttgttttaattttttaaccacattcaagctatcctttggcttccaatgccatggtccacccagaactgcattcactggcccgtgttctagttctggtcatgccgactttcccgttttcctggtgaatccctgtaatcacctgagtctcattctgtcaggtgatatccagtaagaaggcaacatgtgcggtgagaaagcccagggagtcctgggtgtgaatttttactttgccatttcttcctgtgtgacacgcggtggggcttcacctgtctgagctccagttcctcatcttgtacgtgtgcactctagccgtgtgcactctcatgcagtaccgag

SEQ ID NO: 444500 - DNA, 2370 bp, Homo sapiens
gcggctgtctagaggatccctcataggttcgcaggcacacctgtgcagatgaatccagccttctctaggggagagagggtatcccggcttaagagcagggctctcctgagttaaggaagtgtcttccccagagcccattccgtcagacgttcatatcatgtaactcagtccttttctgattatgtattcaccaagcaaacttaagagttggcttgtcaccagacctacaccctgcgaacctatgaaggttcgcagggaaccttccagaagtgggcagctgtggtggtgccttctggagaggagcagagatacacgtgccatgtgcagcatgaggggctacccgagcccgtcaccctgagatggaagccggcttcccagcccaccatccccatcgtgggcatcattgctggcctggttctccttggatctgtggtctctggagctgtggttgctgctgtgatatggaggaagaagagctcaggtggaaaaggagggagctactctaaggctgagtggagcgacagtgcccaggggtctgagtctcacagcttgtaaagcctgagacagctgccttgtgtgcgactgagatgcacagctgccttgtgtgcgactgagatgcaggatttcctcacgcctcccctatgtgtcttaggggactctggcttctctttttgcaagggcctctgaatctgtctgtgtccctgttagcacaatgtgaggaggtagagaaacagtccacctctgtgtctaccatgacccccttcctcacactgacctgtgttccttccctgttctcttttctattaaaaataagaacctgggcagagtgcggcagctcatgcctgtaatcccagcacttagggaggccgaggagggcagatcacgaggtcaggagatcgaaaccatcctggctaacacggtgaaaccccgtctctactaaaaaatacaaaaaattagctgggcgcagaggcacgggcctgtagtcccagctactcaggaggcggaggcaggagaatggcgtcaacccgggaggcggaggttgcagtgagccaggattgtgcgactgcactccagcctgggtgacagggtgaaacgccatctcaaaaaataaaaattaaaaaataaaaaaagaacctggatctcaatttaatttttcatattcttgcaatgaaatggacttgaggaagctaagatcatagctagaaatacagataattccacagcacatctctagcaaatttagcctattcctattctctagcctattccttaccacctgtaatcttgaccatataccttggagttgaatattgttttcatactgctgtggtttgaatgttccctccaacactcatgttgagacttaatccctaatgtggcaatactgaaaggtggggcctttgagatgtgattggatcgtaaggctgtgccttcattcatgggttaatggattaatgggttatcacaggaatgggactggtggctttataagaagaggaaaagagaactgagctagcatgcccagcccacagagagcctccactagagtgatgctaagtggaaatgtgaggtgcagctgccacagagggcccccaccagggaaatgtctagtgtctagtggatccaggccacaggagagagtgccttgtggagcgctgggagcaggacctgaccaccaccaggaccccagaactgtggagtcagtggcagcatgcagcgcccccttgggaaagctttaggcaccagcctgcaacccattcgagcagccacgtaggctgcacccagcaaagccacaggcacggggctacctgaggccttgggggcccaatccctgctccagtgtgtccgtgaggcagcacacgaagtcaaaagagattattctcttcccacagataccttttctctcccatgaccctttaacagcatctgcttcattcccctcaccttcccaggctgatctgaggtaaactttgaagtaaaataaaagctgtgtttgagcatcatttgtatttcatttgtgcgttttgtgccttgttgttttaattttttaaccacattcaagctatcctttggcttccaatgccatggtccacccagaactgcattcactggcccgtgttctagttctggtcatgccgactttcccgttttcctggtgaatccctgtaatcacctgagtctcattctgtcaggtgatatccagtaagaaggcaacatgtgcggtgagaaagcccagggagtcctgggtgtgaatttttactttgccatttcttcctgtgtgacacgcggtggggcttcacctgtctgagctccagttcctcatcttgtacgtgtgcactctagccgtgtgcactctcatgcagtaccgag

SEQ ID NO: 444501 - DNA, 1941 bp, Homo sapiens
  misc_feature (18)..(18): n is a, c, g, or t
aaacagtccacctctgtntctaccatgacccccttcctcacactgacctgtgttccttccctgttctcttttctattaaaaataagaacctgggccctgggcttctaccctgcggagatcacactgacctggcagcaggatggggagggccatacccaggacacggagctcgtggagaccaggcctgcaggggatggaaccttccagaagtgggcagctgtggtggtgccttctggagaggagcagagatacacgtgccatgtgcagcatgaggggctacccgagcccgtcaccctgagatggaagccggcttcccagcccaccatccccatcgtgggcatcattgctggcctggttctccttggatctgtggtctctggagctgtggttgctgctgtgatatggaggaagaagagctcaggtggaaaaggagggagctactctaaggctgagtggagcgacagtgcccaggggtctgagtctcacagcttgtaaagcctgagacagctgccttgtgtgcgactgagatgcacagctgccttgtgtgcgactgagatgcaggatttcctcacgcctcccctatgtgtcttaggggactctggcttctctttttgcaagggcctctgaatctgtctgtgtccctgttagcacaatgtgaggaggtagagaaacagtccacctctgtgtctaccatgacccccttcctcacactgacctgtgttccttccctgttctcttttctattaaaaataagaacctgggcagagtgcggcagctcatgcctgtaatcccagcacttagggaggccgaggagggcagatcacgaggtcaggagatcgaaaccatcctggctaacacggtgaaaccccgtctctactaaaaaatacaaaaaattagctgggcgcagaggcacgggcctgtagtcccagctactcaggaggcggaggcaggagaatggcgtcaacccgggaggcggaggttgcagtgagccaggattgtgcgactgcactccagcctgggtgacagggtgaaacgccatctcaaaaaataaaaattaaaaaataaaaaaagaacctggatctcaatttaatttttcatattcttgcaatgaaatggacttgaggaagctaagatcatagctagaaatacagataattccacagcacatctctagcaaatttagcctattcctattctctagcctattccttaccacctgtaatcttgaccatataccttggagttgaatattgttttcatactgctgtggtttgaatgttccctccaacactcatgttgagacttaatccctaatgtggcaatactgaaaggtggggcctttgagatgtgattggatcgtaaggctgtgccttcattcatgggttaatggattaatgggttatcacaggaatgggactggtggctttataagaagaggaaaagagaactgagctagcatgcccagcccacagagagcctccactagagtgatgctaagtggaaatgtgaggtgcagctgccacagagggcccccaccagggaaatgtctagtgtctagtggatccaggccacaggagagagtgccttgtggagcgctgggagcaggacctgaccaccaccaggaccccagaactgtggagtcagtggcagcatgcagcgcccccttgggaaagctttaggcaccagcctgcaacccattcgagcagccacgtaggctgcacccagcaaagccacaggcacggggctacctgaggccttgggggcccaatccctgctccagtgtgtccgtgaggcagcacacgaagtcaaaagagattattctcttcccacagataccttttctctcccatgaccctttaacagcatctgcttcattcccctcaccttcccaggctgatctgaggtaaactttgaagtaaaataaaagctgtgtttgagcat

SEQ ID NO: 444502 - DNA, 2308 bp, Homo sapiens
  misc_feature (18)..(18): n is a, c, g, or t
aaacagtccacctctgtntctaccatgacccccttcctcacactgacctgtgttccttccctgttctcttttctattaaaaataagaacctgggccctgggcttctaccctgcggagatcacactgacctggcagcaggatggggagggccatacccaggacacggagctcgtggagaccaggcctgcaggggatggaaccttccagaagtgggcagctgtggtggtgccttctggagaggagcagagatacacgtgccatgtgcagcatgaggggctacccgagcccgtcaccctgagatggaagccggcttcccagcccaccatccccatcgtgggcatcattgctggcctggttctccttggatctgtggtctctggagctgtggttgctgctgtgatatggaggaagaagagctcagaaaaggagggagctactctaaggctgagtggagcgacagctgcccagggctctgagtctcacagcttgtaaagccctgagacagctgccttgtgtgcgactgagatgcacagctgccttgtgtgcgactgagatgcaggatttcctcacgcctcccctatgtgtcttaggggactctggcttctctttttgcaagggcctctgaatctgtctgtgtccctgttagcacaatgtgaggaggtagagaaacagtccacctctgtgtctaccatgacccccttcctcacactgacctgtgttccttccctgttctcttttctattaaaaataagaacctgggcagagtgcggcagctcatgcctgtaatcccagcacttagggaggccgaggagggcagatcacgaggtcaggagatcgaaaccatcctggctaacacggtgaaaccccgtctctactaaaaaatacaaaaaattagctgggcgcagaggcacgggcctgtagtcccagctactcaggaggcggaggcaggagaatggcgtcaacccgggaggcggaggttgcagtgagccaggattgtgcgactgcactccagcctgggtgacagggtgaaacgccatctcaaaaaataaaaattaaaaaataaaaaaagaacctggatctcaatttaatttttcatattcttgcaatgaaatggacttgaggaagctaagatcatagctagaaatacagataattccacagcacatctctagcaaatttagcctattcctattctctagcctattccttaccacctgtaatcttgaccatataccttggagttgaatattgttttcatactgctgtggtttgaatgttccctccaacactcatgttgagacttaatccctaatgtggcaatactgaaaggtggggcctttgagatgtgattggatcgtaaggctgtgccttcattcatgggttaatggattaatgggttatcacaggaatgggactggtggctttataagaagaggaaaagagaactgagctagcatgcccagcccacagagagcctccactagagtgatgctaagtggaaatgtgaggtgcagctgccacagagggcccccaccagggaaatgtctagtgtctagtggatccaggccacaggagagagtgccttgtggagcgctgggagcaggacctgaccaccaccaggaccccagaactgtggagtcagtggcagcatgcagcgcccccttgggaaagctttaggcaccagcctgcaacccattcgagcagccacgtaggctgcacccagcaaagccacaggcacggggctacctgaggccttgggggcccaatccctgctccagtgtgtccgtgaggcagcacacgaagtcaaaagagattattctcttcccacagataccttttctctcccatgaccctttaacagcatctgcttcattcccctcaccttcccaggctgatctgaggtaaactttgaagtaaaataaaagctgtgtttgagcatcatttgtatttcatttgtgcgttttgtgccttgttgttttaattttttaaccacattcaagctatcctttggcttccaatgccatggtccacccagaactgcattcactggcccgtgttctagttctggtcatgccgactttcccgttttcctggtgaatccctgtaatcacctgagtctcattctgtcaggtgatatccagtaagaaggcaacatgtgcggtgagaaagcccagggagtcctgggtgtgaatttttactttgccatttcttcctgtgtgacacgcggtggggcttcacctgtctgagctccagttcctcatcttgtacgtgtgcactctagccgtgtgcactctcatgcagtaccgag

SEQ ID NO: 444503 - DNA, 2252 bp, Homo sapiens
  misc_feature (18)..(18): n is a, c, g, or t
aaacagtccacctctgtntctaccatgacccccttcctcacactgacctgtgttccttccctgttctcttttctattaaaaataagaacctgggccctgggcttctaccctgcggagatcacactgacctggcagcaggatggggagggccatacccaggacacggagctcgtggagaccaggcctgcaggggatggaaccttccagaagtgggcagctgtggtggtgccttctggagaggagcagagatacacgtgccatgtgcagcatgaggggctacccgagcccgtcaccctgagatggaagccggcttcccagcccaccatccccatcgtgggcatcattgctggcctggttctccttggatctgtggtctctggagctgtggttgctgctgtgatatggaggaagaagagctcagtctcacagcttgtaaagccctgagacagctgccttgtgtgcgactgagatgcacagctgccttgtgtgcgactgagatgcaggatttcctcacgcctcccctatgtgtcttaggggactctggcttctctttttgcaagggcctctgaatctgtctgtgtccctgttagcacaatgtgaggaggtagagaaacagtccacctctgtgtctaccatgacccccttcctcacactgacctgtgttccttccctgttctcttttctattaaaaataagaacctgggcagagtgcggcagctcatgcctgtaatcccagcacttagggaggccgaggagggcagatcacgaggtcaggagatcgaaaccatcctggctaacacggtgaaaccccgtctctactaaaaaatacaaaaaattagctgggcgcagaggcacgggcctgtagtcccagctactcaggaggcggaggcaggagaatggcgtcaacccgggaggcggaggttgcagtgagccaggattgtgcgactgcactccagcctgggtgacagggtgaaacgccatctcaaaaaataaaaattaaaaaataaaaaaagaacctggatctcaatttaatttttcatattcttgcaatgaaatggacttgaggaagctaagatcatagctagaaatacagataattccacagcacatctctagcaaatttagcctattcctattctctagcctattccttaccacctgtaatcttgaccatataccttggagttgaatattgttttcatactgctgtggtttgaatgttccctccaacactcatgttgagacttaatccctaatgtggcaatactgaaaggtggggcctttgagatgtgattggatcgtaaggctgtgccttcattcatgggttaatggattaatgggttatcacaggaatgggactggtggctttataagaagaggaaaagagaactgagctagcatgcccagcccacagagagcctccactagagtgatgctaagtggaaatgtgaggtgcagctgccacagagggcccccaccagggaaatgtctagtgtctagtggatccaggccacaggagagagtgccttgtggagcgctgggagcaggacctgaccaccaccaggaccccagaactgtggagtcagtggcagcatgcagcgcccccttgggaaagctttaggcaccagcctgcaacccattcgagcagccacgtaggctgcacccagcaaagccacaggcacggggctacctgaggccttgggggcccaatccctgctccagtgtgtccgtgaggcagcacacgaagtcaaaagagattattctcttcccacagataccttttctctcccatgaccctttaacagcatctgcttcattcccctcaccttcccaggctgatctgaggtaaactttgaagtaaaataaaagctgtgtttgagcatcatttgtatttcatttgtgcgttttgtgccttgttgttttaattttttaaccacattcaagctatcctttggcttccaatgccatggtccacccagaactgcattcactggcccgtgttctagttctggtcatgccgactttcccgttttcctggtgaatccctgtaatcacctgagtctcattctgtcaggtgatatccagtaagaaggcaacatgtgcggtgagaaagcccagggagtcctgggtgtgaatttttactttgccatttcttcctgtgtgacacgcggtggggcttcacctgtctgagctccagttcctcatcttgtacgtgtgcactctagccgtgtgcactctcatgcagtaccgag

SEQ ID NO: 444504 - DNA, 1872 bp, Homo sapiens
cgagctcggtaccctgtggagaccgggtctccggggtctgagtctcaccgcttgtaaagcctgagacagctgccttgtgtgcgactgagatgcacagctgccttgtgtgcgactgagatgcaggatttcctcacgcctcccctatgtgtcttaggggactctggcttctctttttgcaagggcctctgaatctgtctgtgtccctgttagcacaatgtgaggaggtagagaaacagtccacctctgtgtctaccatgacccccttcctcacactgacctgtgttccttccctgttctcttttctattaaaaataagaacctgggcagagtgcggcagctcatgcctgtaatcccagcacttagggaggccgaggagggcagatcacgaggtcaggagatcgaaaccatcctggctaacacggtgaaaccccgtctctactaaaaaatacaaaaaattagctgggcgcagaggcacgggcctgtagtcccagctactcaggaggcggaggcaggagaatggcgtcaacccgggaggcggaggttgcagtgagccaggattgtgcgactgcactccagcctgggtgacagggtgaaacgccatctcaaaaaataaaaattaaaaaataaaaaaagaacctggatctcaatttaatttttcatattcttgcaatgaaatggacttgaggaagctaagatcatagctagaaatacagataattccacagcacatctctagcaaatttagcctattcctattctctagcctattccttaccacctgtaatcttgaccatataccttggagttgaatattgttttcatactgctgtggtttgaatgttccctccaacactcatgttgagacttaatccctaatgtggcaatactgaaaggtggggcctttgagatgtgattggatcgtaaggctgtgccttcattcatgggttaatggattaatgggttatcacaggaatgggactggtggctttataagaagaggaaaagagaactgagctagcatgcccagcccacagagagcctccactagagtgatgctaagtggaaatgtgaggtgcagctgccacagagggcccccaccagggaaatgtctagtgtctagtggatccaggccacaggagagagtgccttgtggagcgctgggagcaggacctgaccaccaccaggaccccagaactgtggagtcagtggcagcatgcagcgcccccttgggaaagctttaggcaccagcctgcaacccattcgagcagccacgtaggctgcacccagcaaagccacaggcacggggctacctgaggccttgggggcccaatccctgctccagtgtgtccgtgaggcagcacacgaagtcaaaagagattattctcttcccacagataccttttctctcccatgaccctttaacagcatctgcttcattcccctcaccttcccaggctgatctgaggtaaactttgaagtaaaataaaagctgtgtttgagcatcatttgtatttcatttgtgcgttttgtgccttgttgttttaattttttaaccacattcaagctatcctttggcttccaatgccatggtccacccagaactgcattcactggcccgtgttctagttctggtcatgccgactttcccgttttcctggtgaatccctgtaatcacctgagtctcattctgtcaggtgatatccagtaagaaggcaacatgtgcggtgagaaagcccagggagtcctgggtgtgaatttttactttgccatttcttcctgtgtgacacgcggtggggcttcacctgtctgagctccagttcctcatcttgtacgtgtgcactctagccgtgtgcactctcatgcagtaccgag

SEQ ID NO: 444505 - DNA, 2276 bp, Homo sapiens
  misc_feature (18)..(18): n is a, c, g, or t
aaacagtccacctctgtntctaccatgacccccttcctcacactgacctgtgttccttccctgttctcttttctattaaaaataagaacctgggccctgggcttctaccctgcggagatcacactgacctggcagcaggatggggagggccatacccaggacacggagctcgtggagaccaggcctgcaggggatggaaccttccagaagtgggcagctgtggtggtgccttctggagaggagcagagatacacgtgccatgtgcagcatgaggggctacccgagcccgtcaccctgagatggaagccggcttcccagcccaccatccccatcgtgggcatcattgctggcctggttctccttggatctgtggtctctggagctgtggttgctgctgtgatatggaggaagaagagctcaggtggaaaaggagggagctactctaaggctgagtggagcgacagtgcccaggggtctgagtctcacagcttgtaaagcctgagacagctgccttgtgtgcgactgagatgcacagctgccttgtgtgcgactgagatgcaggatttcctcacgcctcccctatgtgtcttaggggactctggcttctctttttgcaagggcctctgaatctgtctgtgtccctgttagcacaatgtgaggaggtagagaaacagtccacctctgtgtctaccatgacccccttcctcacactgacctgtgttccttccctgttctcttttctattaaaaataagaacctgggcagagtgcggcagctcatgcctgtaatcccagcacttagggaggccgaggagggcagatcacgaggtcaggagatcgaaaccatcctggctaacacggtgaaaccccgtctctactaaaaaatacaaaaaattagctgggcgcagaggcacgggcctgtagtcccagctactcaggaggcggaggcaggagaatggcgtcaacccgggaggcggaggttgcagtgagccaggattgtgcgactgcactccagcctgggtgacagggtgaaacgccatctcaaaaaataaaaattaaaaaataaaaaaagaacctggatctcaatttaatttttcatattcttgcaatgaaatggacttgaggaagctaagatcatagctagaaatacagataattccacagcacatctctagcaaatttagcctattcctattctctagcctattccttaccacctgtaatcttgaccatataccttggagttgaatattgttttcatactgctgtggtttgaatgttccctccaacactcatgttgagacttaatccctaatgtggcaatactgaaaggtggggcctttgagatgtgattggatctaatgggttatcacaggaatgggactggtggctttataagaagaggaaaagagaactgagctagcatgcccagcccacagagagcctccactagagtgatgctaagtggaaatgtgaggtgcagctgccacagagggcccccaccagggaaatgtctagtgtctagtggatccaggccacaggagagagtgccttgtggagcgctgggagcaggacctgaccaccaccaggaccccagaactgtggagtcagtggcagcatgcagcgcccccttgggaaagctttaggcaccagcctgcaacccattcgagcagccacgtaggctgcacccagcaaagccacaggcacggggctacctgaggccttgggggcccaatccctgctccagtgtgtccgtgaggcagcacacgaagtcaaaagagattattctcttcccacagataccttttctctcccatgaccctttaacagcatctgcttcattcccctcaccttcccaggctgatctgaggtaaactttgaagtaaaataaaagctgtgtttgagcatcatttgtatttcatttgtgcgttttgtgccttgttgttttaattttttaaccacattcaagctatcctttggcttccaatgccatggtccacccagaactgcattcactggcccgtgttctagttctggtcatgccgactttcccgttttcctggtgaatccctgtaatcacctgagtctcattctgtcaggtgatatccagtaagaaggcaacatgtgcggtgagaaagcccagggagtcctgggtgtgaatttttactttgccatttcttcctgtgtgacacgcggtggggcttcacctgtctgagctccagttcctcatcttgtacgtgtgcactctagccgtgtgcactctcatgcagtaccgag

SEQ ID NO: 444506 - DNA, 1683 bp, Homo sapiens
  misc_feature (20)..(20): n is a, c, g, or t
agatacagggaaggaacacnggtcaatgtgaggaggtagagaaacagtccacctctgtgtctaccatgacccccttcctcacactgacctgtgttccttccctgttctcttttctattaaaaataagaacctgggcagagtgcggcagctcatgcctgtaatcccagcacttagggaggccgaggagggcagatcacgaggtcaggagatcgaaaccatcctggctaacacggtgaaaccccgtctctactaaaaaatacaaaaaattagctgggcgcagaggcacgggcctgtagtcccagctactcaggaggcggaggcaggagaatggcgtcaacccgggaggcggaggttgcagtgagccaggattgtgcgactgcactccagcctgggtgacagggtgaaacgccatctcaaaaaataaaaattaaaaaataaaaaaagaacctggatctcaatttaatttttcatattcttgcaatgaaatggacttgaggaagctaagatcatagctagaaatacagataattccacagcacatctctagcaaatttagcctattcctattctctagcctattccttaccacctgtaatcttgaccatataccttggagttgaatattgttttcatactgctgtggtttgaatgttccctccaacactcatgttgagacttaatccctaatgtggcaatactgaaaggtggggcctttgagatgtgattggatcgtaaggctgtgccttcattcatgggttaatggattaatgggttatcacaggaatgggactggtggctttataagaagaggaaaagagaactgagctagcatgcccagcccacagagagcctccactagagtgatgctaagtggaaatgtgaggtgcagctgccacagagggcccccaccagggaaatgtctagtgtctagtggatccaggccacaggagagagtgccttgtggagcgctgggagcaggacctgaccaccaccaggaccccagaactgtggagtcagtggcagcatgcagcgcccccttgggaaagctttaggcaccagcctgcaacccattcgagcagccacgtaggctgcacccagcaaagccacaggcacggggctacctgaggccttgggggcccaatccctgctccagtgtgtccgtgaggcagcacacgaagtcaaaagagattattctcttcccacagataccttttctctcccatgaccctttaacagcatctgcttcattcccctcaccttcccaggctgatctgaggtaaactttgaagtaaaataaaagctgtgtttgagcatcatttgtatttcatttgtgcgttttgtgccttgttgttttaattttttaaccacattcaagctatcctttggcttccaatgccatggtccacccagaactgcattcactggcccgtgttctagttctggtcatgccgactttcccgttttcctggtgaatccctgtaatcacctgagtctcattctgtcaggtgatatccagtaagaaggcaacatgtgcggtgagaaagcccagggagtcctgggtgtgaatttttactttgccatttcttcctgtgtgacacgcggtggggcttcacctgtctgagctccagttcctcatcttgtacgtgtgcactctagccgtgtgcactctcatgcagtaccgag

SEQ ID NO: 444507 - DNA, 1836 bp, Homo sapiens
ttacagtcttatgagacactcacgcagaagattagctaagccgtgtccagattcctaatccacataaattgtgagaaaaatgtgctgttttaagctggcaagtttgtagtaacattgctacacagcaaaacataactaatacaccttgctttccgactactgtagtttccgtaagcctgaagtccttaagacaagtgatcagtgaagagtgaagcaacctttaccctaatacatggttgccactcctggcagtcccaaataagctttaaaaaccctcttctgccgggtgtggtggcggcagctcatgcctgtaatcccagcacttagggaggccgaggagggcagatcacgaggtcaggagatcgaaaccatcctggctaacacggtgaaaccccgtctctactaaaaaatacaaaaaattagctgggcgcagaggcacgggcctgtagtcccagctactcaggaggcggaggcaggagaatggcgtcaacccgggaggcggaggttgcagtgagccaggattgtgcgactgcactccagcctgggtgacagggtgaaacgccatctcaaaaaataaaaattaaaaaataaaaaaagaacctggatctcaatttaatttttcatattcttgcaatgaaatggacttgaggaagctaagatcatagctagaaatacagataattccacagcacatctctagcaaatttagcctattcctattctctagcctattccttaccacctgtaatcttgaccatataccttggagttgaatattgttttcatactgctgtggtttgaatgttccctccaacactcatgttgagacttaatccctaatgtggcaatactgaaaggtggggcctttgagatgtgattggatcgtaaggctgtgccttcattcatgggttaatggattaatgggttatcacaggaatgggactggtggctttataagaagaggaaaagagaactgagctagcatgcccagcccacagagagcctccactagagtgatgctaagtggaaatgtgaggtgcagctgccacagagggcccccaccagggaaatgtctagtgtctagtggatccaggccacaggagagagtgccttgtggagcgctgggagcaggacctgaccaccaccaggaccccagaactgtggagtcagtggcagcatgcagcgcccccttgggaaagctttaggcaccagcctgcaacccattcgagcagccacgtaggctgcacccagcaaagccacaggcacggggctacctgaggccttgggggcccaatccctgctccagtgtgtccgtgaggcagcacacgaagtcaaaagagattattctcttcccacagataccttttctctcccatgaccctttaacagcatctgcttcattcccctcaccttcccaggctgatctgaggtaaactttgaagtaaaataaaagctgtgtttgagcatcatttgtatttcatttgtgcgttttgtgccttgttgttttaattttttaaccacattcaagctatcctttggcttccaatgccatggtccacccagaactgcattcactggcccgtgttctagttctggtcatgccgactttcccgttttcctggtgaatccctgtaatcacctgagtctcattctgtcaggtgatatccagtaagaaggcaacatgtgcggtgagaaagcccagggagtcctgggtgtgaatttttactttgccatttcttcctgtgtgacacgcggtggggcttcacctgtctgagctccagttcctcatcttgtacgtgtgcactctagccgtgtgcactctcatgcagtaccgag

SEQ ID NO: 444508 - DNA, 2256 bp, Homo sapiens
  misc_feature (18)..(18): n is a, c, g, or t
aaacagtccacctctgtntctaccatgacccccttcctcacactgacctgtgttccttccctgttctcttttctattaaaaataagaacctgggccctgggcttctaccctgcggagatcacactgacctggcagcaggatggggagggccatacccaggacacggagctcgtggagaccaggcctgcaggggatggaaccttccagaagtgggcagctgtggtggtgccttctggagaggagcagagatacacgtgccatgtgcagcatgaggggctacccgagcccgtcaccctgagatggaagccggcttcccagcccaccatccccatcgtgggcatcattgctggcctggttctccttggatctgtggtctctggagctgtggttgctgctgtgatatggaggaagaagagctcaggtggaaaaggagggagctactctaaggctgagtggagcgacagtgcccaggggtctgagtctcacagcttgtaaagcctgagacagctgccttgtgtgcgactgagatgcacagctgccttgtgtgcgactgagatgcaggatttcctcacgcctcccctatgtgtcttaggggactctggcttctctttttgcaagggcctctgaatctgtctgtgtccctgttagcacaatgtgaggaggtagagaaacagtccacctctgtgtctaccatgacccccttcctcacactgacctgtgttccttccctgttctcttttctattaaaaataagaacctgggcagagtgcggcagctcatgcctgtaatcccagcacttagggaggccgaggagggcagatcacgaggtcaggagatcgaaaccatcctggctaacacggtgaaaccccgtctctactaaaaaatacaaaaaattagctgggcgcagaggcacgggcctgtagtcccagctactcaggaggcggaggcaggagaatggcgtcaacccgggaggcggaggttgcagtgagccaggattgtgcgactgcactccagcctgggtgacagggtgaaacgccatctcaaaaaataaaaattaaaaaataaaaaaagaacctggatctcaatttaatttttcatattcttgcaatgaaatggacttgaggaagctaagatcatagctagaaatacagataattccacagcacatctctagcaaatttagcctattcctattctctagcctattccttaccacctgtaatcttgaccatataccttggagttgaatattgttttcatactgctgtggtttgaatgttccctccaacactcatgttgagacttaatccctaatgtggcaatactgaaaggtggggcctttgagatgtgattggatcgtaaggctgtgccttcattcatgggttaatggattaatgggttatcacaggaatgggactggtggctttataagaagagggctaagtggaaatgtgaggtgcagctgccacagagggcccccaccagggaaatgtctagtgtctagtggatccaggccacaggagagagtgccttgtggagcgctgggagcaggacctgaccaccaccaggaccccagaactgtggagtcagtggcagcatgcagcgcccccttgggaaagctttaggcaccagcctgcaacccattcgagcagccacgtaggctgcacccagcaaagccacaggcacggggctacctgaggccttgggggcccaatccctgctccagtgtgtccgtgaggcagcacacgaagtcaaaagagattattctcttcccacagataccttttctctcccatgaccctttaacagcatctgcttcattcccctcaccttcccaggctgatctgaggtaaactttgaagtaaaataaaagctgtgtttgagcatcatttgtatttcatttgtgcgttttgtgccttgttgttttaattttttaaccacattcaagctatcctttggcttccaatgccatggtccacccagaactgcattcactggcccgtgttctagttctggtcatgccgactttcccgttttcctggtgaatccctgtaatcacctgagtctcattctgtcaggtgatatccagtaagaaggcaacatgtgcggtgagaaagcccagggagtcctgggtgtgaatttttactttgccatttcttcctgtgtgacacgcggtggggcttcacctgtctgagctccagttcctcatcttgtacgtgtgcactctagccgtgtgcactctcatgcagtaccgag

SEQ ID NO: 444509 - DNA, 1929 bp, Homo sapiens
  misc_feature (18)..(18): n is a, c, g, or t
  misc_feature (1922)..(1924): n is a, c, g, or t
aaacagtccacctctgtntctaccatgacccccttcctcacactgacctgtgttccttccctgttctcttttctattaaaaataagaacctgggccctgggcttctaccctgcggagatcacactgacctggcagcaggatggggagggccatacccaggacacggagctcgtggagaccaggcctgcaggggatggaaccttccagaagtgggcagctgtggtggtgccttctggagaggagcagagatacacgtgccatgtgcagcatgaggggctacccgagcccgtcaccctgagatggaagccggcttcccagcccaccatccccatcgtgggcatcattgctggcctggttctccttggatctgtggtctctggagctgtggttgctgctgtgatatggaggaagaagagctcaggtggaaaaggagggagctactctaaggctgagtggagcgacagtgcccaggggtctgagtctcacagcttgtaaagcctgagacagctgccttgtgtgcgactgagatgcacagctgccttgtgtgcgactgagatgcaggatttcctcacgcctcccctatgtgtcttaggggactctggcttctctttttgcaagggcctctgaatctgtctgtgtccctgttagcacaatgtgaggaggtagagaaacagtccacctctgtgtctaccatgacccccttcctcacactgacctgtgttccttccctgttctcttttctattaaaaataagaacctgggcagagtgcggcagctcatgcctgtaatcccagcacttagggaggccgaggagggcagatcacgaggtcaggagatcgaaaccatcctggctaacacggtgaaaccccgtctctactaaaaaatacaaaaaattagctgggcgcagaggcacgggcctgtagtcccagctactcaggaggcggaggcaggagaatggcgtcaacccgggaggcggaggttgcagtgagccaggattgtgcgactgcactccagcctgggtgacagggtgaaacgccatctcaaaaaataaaaattaaaaaataaaaaaagaacctggatctcaatttaatttttcatattcttgcaatgaaatggacttgaggaagctaagatcatagctagaaatacagataattccacagcacatctctagcaaatttagcctattcctattctctagcctattccttaccacctgtaatcttgaccatataccttggagttgaatattgttttcatactgctgtggtttgaatgttccctccaacactcatgttgagacttaatccctaatgtggcaatactgaaaggtggggcctttgagatgtgattggatcgtaaggctgtgccttcattcatgggttaatggattaatgggttatcacaggaatgggactggtggctttataagaagaggaaaagagaactgagctagcatgcccagcccacagagagcctccactagagtgatgctaagtggaaatgtgaggtgcagctgccacagagggcccccaccagggaaatgtctagtgtctagtggatccaggccacaggagagagtgccttgtggagcgctgggagcaggacctgaccaccaccaggaccccagaactgtggagtcagtggcagcatgcagcgcccccttgggaaagctttaggcaccagcctgcaacccattcgagcagccacgtaggctgcacccagcaaagccacaggcacggggctacctgaggccttgggggcccaatccctgctccagtgtgtccgtgaggcagcacacgaagtcaaaagagattattctcttcccacagataccttttctctcccatgaccctgcgggggctggccaccataatctttgattacccttcaagtaaaatacacgctgtgtttgtgacccnnnggggg

SEQ ID NO: 444510 - DNA, 2261 bp, Homo sapiens
  misc_feature (18)..(18): n is a, c, g, or t
aaacagtccacctctgtntctaccatgacccccttcctcacactgacctgtgttccttccctgttctcttttctattaaaaataagaacctgggccctgggcttctaccctgcggagatcacactgacctggcagcaggatggggagggccatacccaggacacggagctcgtggagaccaggcctgcaggggatggaaccttccagaagtgggcagctgtggtggtgccttctggagaggagcagagatacacgtgccatgtgcagcatgaggggctacccgagcccgtcaccctgagatggaagccggcttcccagcccaccatccccatcgtgggcatcattgctggcctggttctccttggatctgtggtctctggagctgtggttgctgctgtgatatggaggaagaagagctcaggtggaaaaggagggagctactctaaggctgagtggagcgacagtgcccaggggtctgagtctcacagcttgtaaagcctgagacagctgccttgtgtgcgactgagatgcacagctgccttgtgtgcgactgagatgcaggatttcctcacgcctcccctatgtgtcttaggggactctggcttctctttttgcaagggcctctgaatctgtctgtgtccctgttagcacaatgtgaggaggtagagaaacagtccacctctgtgtctaccatgacccccttcctcacactgacctgtgttccttccctgttctcttttctattaaaaataagaacctgggcagagtgcggcagctcatgcctgtaatcccagcacttagggaggccgaggagggcagatcacgaggtcaggagatcgaaaccatcctggctaacacggtgaaaccccgtctctactaaaaaatacaaaaaattagctgggcgcagaggcacgggcctgtagtcccagctactcaggaggcggaggcaggagaatggcgtcaacccgggaggcggaggttgcagtgagccaggattgtgcgactgcactccagcctgggtgacagggtgaaacgccatctcaaaaaataaaaattaaaaaataaaaaaagaacctggatctcaatttaatttttcatattcttgcaatgaaatggacttgaggaagctaagatcatagctagaaatacagataattccacagcacatctctagcaaatttagcctattcctattctctagcctattccttaccacctgtaatcttgaccatataccttggagttgaatattgttttcatactgctgtggtttgaatgttccctccaacactcatgttgagacttaatccctaatgtggcaatactgaaaggtggggcctttgagatgtgattggatcgtaaggctgtgccttcattcatgggttaatggattaatgggttatcacaggaatgggactggtggctttataagaagaggaaaagagaactgagctagcatgcccagcccacagagagcctccactagagtgatgctaagtggaaatgtgaggtgcagctgccacagagggcccccaccagggaaatgtctagtgtctagtggatccaggccacaggagagagtgccttgtggagcgctgggagcaggacctgaccaccaccaggaccccagaactgtggagtcagtggcagcatgcagcgcccccttgggaaagctttaggcaccagcctgcaacccattcgagcagccacgtaggctgcacccagcaaagccacaggcacggggctacctgaggccttgggggcccaatccctgctccagtgtgtccgtgaggcagcacacgaagtcttaacagcatctgcttcattcccctcaccttcccaggctgatctgaggtaaactttgaagtaaaataaaagctgtgtttgagcatcatttgtatttcatttgtgcgttttgtgccttgttgttttaattttttaaccacattcaagctatcctttggcttccaatgccatggtccacccagaactgcattcactggcccgtgttctagttctggtcatgccgactttcccgttttcctggtgaatccctgtaatcacctgagtctcattctgtcaggtgatatccagtaagaaggcaacatgtgcggtgagaaagcccagggagtcctgggtgtgaatttttactttgccatttcttcctgtgtgacacgcggtggggcttcacctgtctgagctccagttcctcatcttgtacgtgtgcactctagccgtgtgcactctcatgcagtaccgag

SEQ ID NO: 444511 - DNA, 1485 bp, Homo sapiens
  misc_feature (1)..(1): n is a, c, g, or t
  misc_feature (22)..(22): n is a, c, g, or t
  misc_feature (36)..(36): n is a, c, g, or t
  misc_feature (81)..(81): n is a, c, g, or t
  misc_feature (83)..(83): n is a, c, g, or t
naactgagctagcatgcccagnccacagagagcctncactagagtgatgctaagtggaaatgtgaggtgcagctgccacananggcccccaccagggaaatgtctagtgtctagtggatccaggccacaggagagagtgccttgtggagcgctgggagcaggacctgaccaccaccaggaccactccagcctgggtgacagggtgaaacgccatctcaaaaaataaaaattaaaaaataaaaaaagaacctggatctcaatttaatttttcatattcttgcaatgaaatggacttgaggaagctaagatcatagctagaaatacagataattccacagcacatctctagcaaatttagcctattcctattctctagcctattccttaccacctgtaatcttgaccatataccttggagttgaatattgttttcatactgctgtggtttgaatgttccctccaacactcatgttgagacttaatccctaatgtggcaatactgaaaggtggggcctttgagatgtgattggatcgtaaggctgtgccttcattcatgggttaatggattaatgggttatcacaggaatgggactggtggctttataagaagaggaaaagagaactgagctagcatgcccagcccacagagagcctccactagagtgatgctaagtggaaatgtgaggtgcagctgccacagagggcccccaccagggaaatgtctagtgtctagtggatccaggccacaggagagagtgccttgtggagcgctgggagcaggacctgaccaccaccaggaccccagaactgtggagtcagtggcagcatgcagcgcccccttgggaaagctttaggcaccagcctgcaacccattcgagcagccacgtaggctgcacccagcaaagccacaggcacggggctacctgaggccttgggggcccaatccctgctccagtgtgtccgtgaggcagcacacgaagtcaaaagagattattctcttcccacagataccttttctctcccatgaccctttaacagcatctgcttcattcccctcaccttcccaggctgatctgaggtaaactttgaagtaaaataaaagctgtgtttgagcatcatttgtatttcatttgtgcgttttgtgccttgttgttttaattttttaaccacattcaagctatcctttggcttccaatgccatggtccacccagaactgcattcactggcccgtgttctagttctggtcatgccgactttcccgttttcctggtgaatccctgtaatcacctgagtctcattctgtcaggtgatatccagtaagaaggcaacatgtgcggtgagaaagcccagggagtcctgggtgtgaatttttactttgccatttcttcctgtgtgacacgcggtggggcttcacctgtctgagctccagttcctcatcttgtacgtgtgcactctagccgtgtgcactctcatgcagtaccgag

SEQ ID NO: 444512 - DNA, 2175 bp, Homo sapiens
  misc_feature (18)..(18): n is a, c, g, or t
aaacagtccacctctgtntctaccatgacccccttcctcacactgacctgtgttccttccctgttctcttttctattaaaaataagaacctgggccctgggcttctaccctgcggagatcacactgacctggcagcaggatggggagggccatacccaggacacggagctcgtggagaccaggcctgcaggggatggaaccttccagaagtgggcagctgtggtggtgccttctggagaggagcagagatacacgtgccatgtgcagcatgaggggctacccgagcccgtcaccctgagatggaagccggcttcccagcccaccatccccatcgtgggcatcattgctggcctggttctccttggatctgtggtctctggagctgtggttgctgctgtgatatggaggaagaagagctcaggtggaaaaggagggagctactctaaggctgagtggagcgacagtgcccaggggtctgagtctcacagcttgtaaagcctgagacagctgccttgtgtgcgactgagatgcacagctgccttgtgtgcgactgagatgcaggatttcctcacgcctcccctatgtgtcttaggggactctggcttctctttttgcaagggcctctgaatctgtctgtgtccctgttagcacaatgtgaggaggtagagaaacagtccacctctgtgtctaccatgacccccttcctcacactgacctgtgttccttccctgttctcttttctattaaaaataagaacctgggcagagtgcggcagctcatgcctgtaatcccagcacttagggaggccgaggagggcagatcacgaggtcaggagatcgaaaccatcctggctaacacggtgaaaccccgtctctactaaaaaatacaaaaaattagctgggcgcagaggcacgggcctgtagtcccagctactcaggaggcggaggcaggagaatggcgtcaacccgggaggcggaggttgcagtgagccaggattgtgcgactgcactccagcctgggtgacagggtgaaacgccatctcaaaaaataaaaattaaaaaataaaaaaagaacctggatctcaatttaatttttcatattcttgcaatgaaatggacttgaggaagctaagatcatagctagaaatacagataattccacagcacatctctagcaaatttagcctattcctattctctagcctattccttaccacctgtaatcttgaccatataccttggagttgaatattgttttcatactgctgtggtttgaatgttccctccaacactcatgttgagacttaatccctaatgtggcaatactgaaaggtggggcctttgagatgtgattggatcgtaaggctgtgccttcattcatgggttaatggattaatgggttatcacaggaatgggactggtggctttataagaagaggaaaagagaactgagctagcatgcccagcccacagagagcctccactagagtgatgctaagtggaaatgtgaggtgcagctgccacgcccccttgggaaagctttaggcaccagcctgcaacccattcgagcagccacgtaggctgcacccagcaaagccacaggcacggggctacctgaggccttgggggcccaatccctgctccagtgtgtccgtgaggcagcacacgaagtcaaaagagattattctcttcccacagataccttttctctcccatgaccctttaacagcatctgcttcattcccctcaccttcccaggctgatctgaggtaaactttgaagtaaaataaaagctgtgtttgagcatcatttgtatttcatttgtgcgttttgtgccttgttgttttaattttttaaccacattcaagctatcctttggcttccaatgccatggtccacccagaactgcattcactggcccgtgttctagttctggtcatgccgactttcccgttttcctggtgaatccctgtaatcacctgagtctcattctgtcaggtgatatccagtaagaaggcaacatgtgcggtgagaaagcccagggagtcctgggtgtgaatttttactttgccatttcttcctgtgtgacacgcggtggggcttcacctgtctgagctccagttcctcatcttgtacgtgtgcactctagccgtgtgcactctcatgcagtaccgag

SEQ ID NO: 444513 - DNA, 1806 bp, Homo sapiens
  misc_feature (18)..(18): n is a, c, g, or t
aaacagtccacctctgtntctaccatgacccccttcctcacactgacctgtgttccttccctgttctcttttctattaaaaataagaacctgggccctgggcttctaccctgcggagatcacactgacctggcagcaggatggggagggccatacccaggacacggagctcgtggagaccaggcctgcaggggatggaaccttccagaagtgggcagctgtggtggtgccttctggagaggagcagagatacacgtgccatgtgcagcatgaggggctacccgagcccgtcaccctgagatggaagccggcttcccagcccaccatccccatcgtgggcatcattgctggcctggttctccttggatctgtggtctctggagctgtggttgctgctgtgatatggaggaagaagagctcaggtggaaaaggagggagctactctaaggctgagtggagcgacagtgcccaggggtctgagtctcacagcttgtaaagcctgagacagctgccttgtgtgcgactgagatgcacagctgccttgtgtgcgactgagatgcaggatttcctcacgcctcccctatgtgtcttaggggactctggcttctctttttgcaagggcctctgaatctgtctgtgtccctgttagcacaatgtgaggaggtagagaaacagtccacctctgtgtctaccatgacccccttcctcacactgacctgtgttccttccctgttctcttttctattaaaaataagaacctgggcagagtgcggcagctcatgcctgtaatcccagcacttagggaggccgaggagggcagatcacgaggtcaggagatcgaaaccatcctggctaacacggtgaaaccccgtctctactaaaaaatacaaaaaattagctgggcgcagaggcacgggcctgtagtcccagctactcaggaggcggaggcaggagaatggcgtcaacccgggaggcggaggttgcagtgagccaggattgtgcgactgcactccagcctgggtgacagggtgaaacgccatctcaaaaaataaaaattaaaaaataaaaaaagaacctggatctcaatttaatttttcatattcttgcaatgaaatggacttgaggaagctaagatcatagctagaaatacagataattccacagcacatctctagcaaatttagcctattcctattctctagcctattccttaccacctgtaatcttgaccatataccttggagttgaatattgttttcatactgctgtggtttgaatgttccctccaacactcatgttgagacttaatccctaatgtggcaatactgaaaggtggggcctttgagatgtgattggatcgtaaggctgtgccttcattcatgggttaatggattaatgggttatcacaggaatgggactggtggctttataagaagaggaaaagagaactgagctagcatgcccagcccacagagagcctccactagagtgatgctaagtggaaatgtgaggtgcagctgccacgcccccttgggaaagctttaggcaccagcctgcaacccattcgagcagccacgtaggctgcacccagcaaagccacaggcacggggctacctgaggccttgggggcccaatccctgctccagtgtgtccgtgaggcagcacacgaagtcaaaagagattattctcttcccacagataccttttctctcccatgaccctttaacagcatctgcttcattcccctcaccttcccaggctgatctgaggtaaactttgaagtaaaataaaagctgtgtttgagcat

SEQ ID NO: 444514 - DNA, 894 bp, Homo sapiens
tgaggggcgagctgctaactcaggggcgagctgctaactcaggggcgagctgctaactcaggggcgagctgctcgctcaggggcgagctgctaactcaggggcgagcagagggcccccaccagggaaatgtctagtgtctagtggatccaggccacaggagagagtgccttgtggagcgctgggagcaggacctgaccaccaccaggaccccagaactgtggagtcagtggcagcatgcagcgcccccttgggaaagctttaggcaccagcctgcaacccattcgagcagccacgtaggctgcacccagcaaagccacaggcacggggctacctgaggccttgggggcccaatccctgctccagtgtgtccgtgaggcagcacacgaagtcaaaagagattattctcttcccacagataccttttctctcccatgaccctttaacagcatctgcttcattcccctcaccttcccaggctgatctgaggtaaactttgaagtaaaataaaagctgtgtttgagcatcatttgtatttcatttgtgcgttttgtgccttgttgttttaattttttaaccacattcaagctatcctttggcttccaatgccatggtccacccagaactgcattcactggcccgtgttctagttctggtcatgccgactttcccgttttcctggtgaatccctgtaatcacctgagtctcattctgtcaggtgatatccagtaagaaggcaacatgtgcggtgagaaagcccagggagtcctgggtgtgaatttttactttgccatttcttcctgtgtgacacgcggtggggcttcacctgtctgagctccagttcctcatcttgtacgtgtgcactctagccgtgtgcactctcatgcagtaccgag

SEQ ID NO: 444515 - DNA, 769 bp, Homo sapiens
  misc_feature (18)..(18): n is a, c, g, or t
aaacagtccacctctgtntctaccatgacccccttcctcacactgacctgtgttccttccctgttctcttttctattaaaaataagaacctgggccctgggcttctaccctgcggagatcacactgacctggcagcaggatggggagggccatacccaggacacggagctcgtggagaccaggcctgcaggggatggaaccttccagaagtgggcagctgtggtggtgccttctggagaggagcagagatacacgtgccatgtgcagcatgaggggctacccgagcccgtcaccctgagatggaagccggcttcccagcccaccatccccatcgtgggcatcattgctggcctggttctccttggatctgtggtctctggagctgtggttgctgctgtgatatggaggaagaagagctcaggtggaaaaggagggagctactctaaggctgagtggagcgacagtgcccaggggtctgagtctcacagcttgtaaagcctgagacagctgccttgtgtgcgactgagatgcacagctgccttgtgtgcgactgagatgcaggatttcctcacgcctcccctatgtgtcttaggggactctggcttctctttttgcaagggcctctgaatctgtctgtgtccctgttagcacaatgtgaggaggtagagaaacagtccacctctgtgtctaccatgacccccttcctcacactgacctgtgttccttccctgttctcttttctattaaaaataagaacctgggcagagtg

SEQ ID NO: 444516 - DNA, 1525 bp, Homo sapiens
  misc_feature (18)..(18): n is a, c, g, or t
  misc_feature (772)..(772): n is a, c, g, or t
aaacagtccacctctgtntctaccatgacccccttcctcacactgacctgtgttccttccctgttctcttttctattaaaaataagaacctgggccctgggcttctaccctgcggagatcacactgacctggcagcaggatggggagggccatacccaggacacggagctcgtggagaccaggcctgcaggggatggaaccttccagaagtgggcagctgtggtggtgccttctggagaggagcagagatacacgtgccatgtgcagcatgaggggctacccgagcccgtcaccctgagatggaagccggcttcccagcccaccatccccatcgtgggcatcattgctggcctggttctccttggatctgtggtctctggagctgtggttgctgctgtgatatggaggaagaagagctcaggtggaaaaggagggagctactctaaggctgagtggagcgacagtgcccaggggtctgagtctcacagcttgtaaagcctgagacagctgccttgtgtgcgactgagatgcacagctgccttgtgtgcgactgagatgcaggatttcctcacgcctcccctatgtgtcttaggggactctggcttctctttttgcaagggcctctgaatctgtctgtgtccctgttagcacaatgtgaggaggtagagaaacagtccacctctgtgtctaccatgacccccttcctcacactgacctgtgttccttccctgttctcttttctattaaaaataagaacctgggcagagtgaanaaaaaaaaaaaaaaaaaaaaaaaaaaaaaaaaaaaaaaaaaggggggggcagcagaaaaatatccccgaagggaggccaaaaatgaacggatacccagagattttgtagaacagagggcggcccaaaaaggagagcgcataaaaaagagaagacacgcggcagagcttaacacaacgctagagagctgggaaacaagcgcagacacacgagagaacacgacggcgaagaagcccccaacacgcgaggaggggagacacaaacaggcgggaacaagcacccagacgagaaataagagcgccagaggagaaaatagaacatagagagcagatcaagggggcaccaccgggacaaaataggtgcgaggggcgtggaaaagcttatgtgctccccggcgacgaagtatatatagagaaaataatggacggagggggcagtaaacgcaagctatactgcgcagagactggagagtaatccagatccaatagctatacacaagacgtgacttagataaactaaaacgacgacacaaacaatactcaatctaaaactaattaataacgctgatattacactcgaaccacagatttatataataaaacacctgtacacacaaacaataaaaaacataaacaatccacaaaaacaacactacacaatctacaatatgaactaccatacataagaacaataaagcacatacatgcactagagacacaaataagaaaagaaccacaaagaaaatacacactaca

SEQ ID NO: 444517 - DNA, 818 bp, Homo sapiens
  misc_feature (18)..(18): n is a, c, g, or t
aaacagtccacctctgtntctaccatgacccccttcctcacactgacctgtgttccttccctgttctcttttctattaaaaataagaacctgggccctgggcttctaccctgcggagatcacactgacctggcagcaggatggggagggccatacccaggacacggagctcgtggagaccaggcctgcaggggatggaaccttccagaagtgggcagctgtggtggtgccttctggagaggagcagagatacacgtgccatgtgcagcatgaggggctacccgagcccgtcaccctgagatggaagccggcttcccagcccaccatccccatcgtgggcatcattgctggcctggttctccttggatctgtggtctctggagctgtggttgctgctgtgatatggaggaagaagagctcaggtggaaaaggagggagctactctaaggctgagtggagcgacagtgcccaggggtctgagtctcacagcttgtaaagcctgagacagctgccttgtgtgcgactgagatgcacagctgccttgtgtgcgactgagatgcaggatttcctcacgcctcccctatgtgtcttaggggactctggcttctctttttgcaagggcctctgaatctgtctgtgtccctgttagcacaatgtgaggaggtagagaaacagtccacctctgtgtctaccatgacccccttcctcacactgacctgtgttgtgatctgcctgcctcagttcccaaagtgctgagatgacaggtgtgagccatcagacccagcatttttttttttaaatttaaattaaaacttaagc

SEQ ID NO: 444518 - DNA, 689 bp, Homo sapiens
  misc_feature (18)..(18): n is a, c, g, or t
aaacagtccacctctgtntctaccatgacccccttcctcacactgacctgtgttccttccctgttctcttttctattaaaaataagaacctgggccctgggcttctaccctgcggagatcacactgacctggcagcaggatggggagggccatacccaggacacggagctcgtggagaccaggcctgcaggggatggaaccttccagaagtgggcagctgtggtggtgccttctggagaggagcagagatacacgtgccatgtgcagcatgaggggctacccgagcccgtcaccctgagatggagtaaggagggggatgggaggtcatgtctcttctcagggaaagcgggagcccttctggagcccttccgcagggtcagggctgaggcctgggggtcagggccccttacgttcccctccccagagccggcttcccagcccaccatccccatcgtgggcatcattgctggcctggttctccttggatctgtggtctctggagctgtggttgctgctgtgatatggaggaagaagagctcaggtggggaagggagaagggtggggtctgagttttcttgtcccactgggtgtttcaagccctaggtaaaagtgtgtcctgcctcgttactgggaagcaccatccacacacacgagcctacctcgtgccgaattcctgcagcacgggggat

SEQ ID NO: 444519 - DNA, 422 bp, Homo sapiens
gcccctcacaggacattttcttccaacaggtggaaaaggagggagctactctaaggctgagtgtaagtgcggggctgggagcgtggaggagctcgcccaccctataattcctcctgcaccacatctcctgtgggctctgaccaggtcttgtttttgttctaccccagggagcgacagtgcccaggggtctgagtctcacagcttgtaaaggtgagattctgggggtctgaagtgggtggagggtggggcagaggggacaggactgggttgtggggattttttgattcagaatttttgagtgtgtggtgggctgttcagagtgtcatcacttaccgtgactgacctgaatttgttcatgactattttcttctgtagcctgagacagctgccttgtgtgcgactgagatgcacagctgccttgt

SEQ ID NO: 444520 - DNA, 2330 bp, Homo sapiens
ggacaccattgagaatgtcaaggctaagatccaagacaaggaaggcatccctcctgaccagcaggggttgatctttgccggaatacagctggaagatggtcgtaccctgtctgactactacatccagaagtgcgcctgggtgcgcacccaggcgcacttctggaaggttccatacccaggacacggagctcgtggagaccaggcctgcaggggatggaaccttccagaagtgggcagctgtggtggtgccttctggagaggagcagagatacacgtgccatgtgcagcatgaggggctacccgagcccgtcaccctgagatggaagccggcttcccagcccaccatccccatcgtgggcatcattgctggcctggttctccttggatctgtggtctctggagctgtggttgctgctgtgatatggaggaagaagagctcaggtggaaaaggagggagctactctaaggctgagtggagcgacagtgcccaggggtctgagtctcacagcttgtaaagcctgagacagctgccttgtgtgcgactgagatgcacagctgccttgtgtgcgactgagatgcaggatttcctcacgcctcccctatgtgtcttaggggactctggcttctctttttgcaagggcctctgaatctgtctgtgtccctgttagcacaatgtgaggaggtagagaaacagtccacctctgtgtctaccatgacccccttcctcacactgacctgtgttccttccctgttctcttttctattaaaaataagaacctgggcagagtgcggcagctcatgcctgtaatcccagcacttagggaggccgaggagggcagatcacgaggtcaggagatcgaaaccatcctggctaacacggtgaaaccccgtctctactaaaaaatacaaaaaattagctgggcgcagaggcacgggcctgtagtcccagctactcaggaggcggaggcaggagaatggcgtcaacccgggaggcggaggttgcagtgagccaggattgtgcgactgcactccagcctgggtgacagggtgaaacgccatctcaaaaaataaaaattaaaaaataaaaaaagaacctggatctcaatttaatttttcatattcttgcaatgaaatggacttgaggaagctaagatcatagctagaaatacagataattccacagcacatctctagcaaatttagcctattcctattctctagcctattccttaccacctgtaatcttgaccatataccttggagttgaatattgttttcatactgctgtggtttgaatgttccctccaacactcatgttgagacttaatccctaatgtggcaatactgaaaggtggggcctttgagatgtgattggatcgtaaggctgtgccttcattcatgggttaatggattaatgggttatcacaggaatgggactggtggctttataagaagaggaaaagagaactgagctagcatgcccagcccacagagagcctccactagagtgatgctaagtggaaatgtgaggtgcagctgccacagagggcccccaccagggaaatgtctagtgtctagtggatccaggccacaggagagagtgccttgtggagcgctgggagcaggacctgaccaccaccaggaccccagaactgtggagtcagtggcagcatgcagcgcccccttgggaaagctttaggcaccagcctgcaacccattcgagcagccacgtaggctgcacccagcaaagccacaggcacggggctacctgaggccttgggggcccaatccctgctccagtgtgtccgtgaggcagcacacgaagtcaaaagagattattctcttcccacagataccttttctctcccatgaccctttaacagcatctgcttcattcccctcaccttcccaggctgatctgaggtaaactttgaagtaaaataaaagctgtgtttgagcatcatttgtatttcatttgtgcgttttgtgccttgttgttttaattttttaaccacattcaagctatcctttggcttccaatgccatggtccacccagaactgcattcactggcccgtgttctagttctggtcatgccgactttcccgttttcctggtgaatccctgtaatcacctgagtctcattctgtcaggtgatatccagtaagaaggcaacatgtgcggtgagaaagcccagggagtcctgggtgtgaatttttactttgccatttcttcctgtgtgacacgcggtggggcttcacctgtctgagctccagttcctcatcttgtacgtgtgcactctagccgtgtgcactctcatgcagtaccgag

SEQ ID NO: 444521 - DNA, 2461 bp, Homo sapiens
tgggtgactctgaggatcccaagctctggaaaaggggaaggagacgctgcttcacctggagcccccaaagacacacgtgactcaccaccccatctctgaccatgaggccaccctgaggtgctgggccctgggcttctaccctgcggagatcacactgacctggcagcaggatggggagggccatacccaggacacggagctcgtggagaccaggcctgcaggggatggaaccttccagaagtgggcagctgtggtggtgccttctggagaggagcagagatacacgtgccatgtgcagcatgaggggctacccgagcccgtcaccctgagatggagtaaggagggggatgggaggtcatgtctcttctcagggaaagcgggagcccttctggagcccttccgcagggtcagggctgaggcctgggggtcagggccccttacgttcccctccccagagccggcttcccagcccaccatccccatcgtgggcatcattgctggcctggttctccttggatctgtggtctctggagctgtggttgctgctgtgatatggaggaagaagagctcaggtggaaaaggagggagctactctaaggctgagtggagcgacagtgcccaggggtctgagtctcacagcttgtaaagcctgagacagctgccttgtgtgcgactgagatgcacagctgccttgtgtgcgactgagatgcaggatttcctcacgcctcccctatgtgtcttaggggactctggcttctctttttgcaagggcctctgaatctgtctgtgtccctgttagcacaatgtgaggaggtagagaaacagtccacctctgtgtctaccatgacccccttcctcacactgacctgtgttccttccctgttctcttttctattaaaaataagaacctgggcagagtgcggcagctcatgcctgtaatcccagcacttagggaggccgaggagggcagatcacgaggtcaggagatcgaaaccatcctggctaacacggtgaaaccccgtctctactaaaaaatacaaaaaattagctgggcgcagaggcacgggcctgtagtcccagctactcaggaggcggaggcaggagaatggcgtcaacccgggaggcggaggttgcagtgagccaggattgtgcgactgcactccagcctgggtgacagggtgaaacgccatctcaaaaaataaaaattaaaaaataaaaaaagaacctggatctcaatttaatttttcatattcttgcaatgaaatggacttgaggaagctaagatcatagctagaaatacagataattccacagcacatctctagcaaatttagcctattcctattctctagcctattccttaccacctgtaatcttgaccatataccttggagttgaatattgttttcatactgctgtggtttgaatgttccctccaacactcatgttgagacttaatccctaatgtggcaatactgaaaggtggggcctttgagatgtgattggatcgtaaggctgtgccttcattcatgggttaatggattaatgggttatcacaggaatgggactggtggctttataagaagaggaaaagagaactgagctagcatgcccagcccacagagagcctccactagagtgatgctaagtggaaatgtgaggtgcagctgccacagagggcccccaccagggaaatgtctagtgtctagtggatccaggccacaggagagagtgccttgtggagcgctgggagcaggacctgaccaccaccaggaccccagaactgtggagtcagtggcagcatgcagcgcccccttgggaaagctttaggcaccagcctgcaacccattcgagcagccacgtaggctgcacccagcaaagccacaggcacggggctacctgaggccttgggggcccaatccctgctccagtgtgtccgtgaggcagcacacgaagtcaaaagagattattctcttcccacagataccttttctctcccatgaccctttaacagcatctgcttcattcccctcaccttcccaggctgatctgaggtaaactttgaagtaaaataaaagctgtgtttgagcatcatttgtatttcatttgtgcgttttgtgccttgttgttttaattttttaaccacattcaagctatcctttggcttccaatgccatggtccacccagaactgcattcactggcccgtgttctagttctggtcatgccgactttcccgttttcctggtgaatccctgtaatcacctgagtctcattctgtcaggtgatatccagtaagaaggcaacatgtgcggtgagaaagcccagggagtcctgggtgtgaatttttactttgccatttcttcctgtgtgacacgcggtggggcttcacctgtctgagctccagttcctcatcttgtacgtgtgcactctagccgtgtgcactctcatgcagtaccgag

SEQ ID NO: 444522 - DNA, 2415 bp, Homo sapiens
  misc_feature (18)..(18): n is a, c, g, or t
aaacagtccacctctgtntctaccatgacccccttcctcacactgacctgtgttccttccctgttctcttttctattaaaaataagaacctgggccctgggcttctaccctgcggagatcacactgacctggcagcaggatggggagggccatacccaggacacggagctcgtggagaccaggcctgcaggggatggaaccttccagaagtgggcagctgtggtggtgccttctggagaggagcagagatacacgtgccatgtgcagcatgaggggctacccgagcccgtcaccctgagatggaagccggcttcccagcccaccatccccatcgtgggcatcattgctggcctggttctccttggatctgtggtctctggagctgtggttgctgctgtgatatggaggaagaagagctcaggtggaaaaggagggagctactctaaggctgagtgtaagtgcggggctgggagcgtggaggagctcgcccaccctataattcctcctgcaccacatctcctgtgggctctgaccaggtcttgtttttgttctaccccagggagcgacagtgcccaggggtctgagtctcacagcttgtaaagcctgagacagctgccttgtgtgcgactgagatgcacagctgccttgtgtgcgactgagatgcaggatttcctcacgcctcccctatgtgtcttaggggactctggcttctctttttgcaagggcctctgaatctgtctgtgtccctgttagcacaatgtgaggaggtagagaaacagtccacctctgtgtctaccatgacccccttcctcacactgacctgtgttccttccctgttctcttttctattaaaaataagaacctgggcagagtgcggcagctcatgcctgtaatcccagcacttagggaggccgaggagggcagatcacgaggtcaggagatcgaaaccatcctggctaacacggtgaaaccccgtctctactaaaaaatacaaaaaattagctgggcgcagaggcacgggcctgtagtcccagctactcaggaggcggaggcaggagaatggcgtcaacccgggaggcggaggttgcagtgagccaggattgtgcgactgcactccagcctgggtgacagggtgaaacgccatctcaaaaaataaaaattaaaaaataaaaaaagaacctggatctcaatttaatttttcatattcttgcaatgaaatggacttgaggaagctaagatcatagctagaaatacagataattccacagcacatctctagcaaatttagcctattcctattctctagcctattccttaccacctgtaatcttgaccatataccttggagttgaatattgttttcatactgctgtggtttgaatgttccctccaacactcatgttgagacttaatccctaatgtggcaatactgaaaggtggggcctttgagatgtgattggatcgtaaggctgtgccttcattcatgggttaatggattaatgggttatcacaggaatgggactggtggctttataagaagaggaaaagagaactgagctagcatgcccagcccacagagagcctccactagagtgatgctaagtggaaatgtgaggtgcagctgccacagagggcccccaccagggaaatgtctagtgtctagtggatccaggccacaggagagagtgccttgtggagcgctgggagcaggacctgaccaccaccaggaccccagaactgtggagtcagtggcagcatgcagcgcccccttgggaaagctttaggcaccagcctgcaacccattcgagcagccacgtaggctgcacccagcaaagccacaggcacggggctacctgaggccttgggggcccaatccctgctccagtgtgtccgtgaggcagcacacgaagtcaaaagagattattctcttcccacagataccttttctctcccatgaccctttaacagcatctgcttcattcccctcaccttcccaggctgatctgaggtaaactttgaagtaaaataaaagctgtgtttgagcatcatttgtatttcatttgtgcgttttgtgccttgttgttttaattttttaaccacattcaagctatcctttggcttccaatgccatggtccacccagaactgcattcactggcccgtgttctagttctggtcatgccgactttcccgttttcctggtgaatccctgtaatcacctgagtctcattctgtcaggtgatatccagtaagaaggcaacatgtgcggtgagaaagcccagggagtcctgggtgtgaatttttactttgccatttcttcctgtgtgacacgcggtggggcttcacctgtctgagctccagttcctcatcttgtacgtgtgcactctagccgtgtgcactctcatgcagtaccgag

SEQ ID NO: 444523 - DNA, 2237 bp, Homo sapiens
  misc_feature (18)..(18): n is a, c, g, or t
aaacagtccacctctgtntctaccatgacccccttcctcacactgacctgtgttccttccctgttctcttttctattaaaaataagaacctgggccctgggcttctaccctgcggagatcacactgacctggcagcaggatggggagggccatacccaggacacggagctcgtggagaccaggcctgcaggggatggaaccttccagaagtgggcagctgtggtggtgccttctggagaggagcagagatacacgtgccatgtgcagcatgaggggctacccgagcccgtcaccctgagatggaagccggcttcccagcccaccatccccatcgtgggcatcattgctggcctggttctccttggatctgtggtctctggagctgtggttgctgctgtgatatggaggaagaagagctcaggtggaaaaggagggagctactctaaggctgagtggagcgacagtgcccaggggtctgagtctcacagcttgtaaagcctgagacagctgccttgtgtgcgactgagatgcacagctgccttgtgtgcgactgagatgcaggatttcctcacgcctcccctatgtgtcttaggggactctggcttctctttttgcaagggcctctgaatctgtctgtgtccctgttagcacaatgtgaggaggtagagaaacagtccacctctgtgtctaccatgacccccttcctcacactgacctgtgttccttccctgttctcttttctattaaaaataagaacctgggcagagtgcggcagctcatgcctgtaatcccagcacttagggaggccgaggagggcagatcacgaggtcaggagatcgaaaccatcctggctaacacggtgaaaccccgtctctactaaaaaagcgtcaacccgggaggcggaggttgcagtgagccaggattgtgcgactgcactccagcctgggtgacagggtgaaacgccatctcaaaaaataaaaattaaaaaataaaaaaagaacctggatctcaatttaatttttcatattcttgcaatgaaatggacttgaggaagctaagatcatagctagaaatacagataattccacagcacatctctagcaaatttagcctattcctattctctagcctattccttaccacctgtaatcttgaccatataccttggagttgaatattgttttcatactgctgtggtttgaatgttccctccaacactcatgttgagacttaatccctaatgtggcaatactgaaaggtggggcctttgagatgtgattggatcgtaaggctgtgccttcattcatgggttaatggattaatgggttatcacaggaatgggactggtggctttataagaagaggaaaagagaactgagctagcatgcccagcccacagagagcctccactagagtgatgctaagtggaaatgtgaggtgcagctgccacagagggcccccaccagggaaatgtctagtgtctagtggatccaggccacaggagagagtgccttgtggagcgctgggagcaggacctgaccaccaccaggaccccagaactgtggagtcagtggcagcatgcagcgcccccttgggaaagctttaggcaccagcctgcaacccattcgagcagccacgtaggctgcacccagcaaagccacaggcacggggctacctgaggccttgggggcccaatccctgctccagtgtgtccgtgaggcagcacacgaagtcaaaagagattattctcttcccacagataccttttctctcccatgaccctttaacagcatctgcttcattcccctcaccttcccaggctgatctgaggtaaactttgaagtaaaataaaagctgtgtttgagcatcatttgtatttcatttgtgcgttttgtgccttgttgttttaattttttaaccacattcaagctatcctttggcttccaatgccatggtccacccagaactgcattcactggcccgtgttctagttctggtcatgccgactttcccgttttcctggtgaatccctgtaatcacctgagtctcattctgtcaggtgatatccagtaagaaggcaacatgtgcggtgagaaagcccagggagtcctgggtgtgaatttttactttgccatttcttcctgtgtgacacgcggtggggcttcacctgtctgagctccagttcctcatcttgtacgtgtgcactctagccgtgtgcactctcatgcagtaccgag

SEQ ID NO: 444524 - DNA, 2120 bp, Homo sapiens
  misc_feature (18)..(18): n is a, c, g, or t
aaacagtccacctctgtntctaccatgacccccttcctcacactgacctgtgttccttccctgttctcttttctattaaaaataagaacctgggccctgggcttctaccctgcggagatcacactgacctggcagcaggatggggagggccatacccaggacacggagctcgtggagaccaggcctgcaggggatggaaccttccagaagtgggcagctgtggtggtgccttctggagaggagcagagatacacgtgccatgtgcagcatgaggggctacccgagcccgtcaccctgagatggaagccggcttcccagcccaccatccccatcgtgggcatcattgctggcctggttctccttggatctgtggtctctggagctgtggttgctgctgtgatatggaggaagaagagctcaggtggaaaaggagggagctactctaaggctgagtggagcgacagtgcccaggggtctgagtctcacagcttgtaaagcctgagacagctgccttgtgtgcgactgagatgcacagctgccttgtgtgcgactgagatgcaggatttcctcacgcctcccctatgtgtcttaggggactctggcttctctttttgcaagggcctctgaatctgtctgtgtccctgttagcacaatgtgaggaggtagagaaacagtccacctctgtgtctaccatgacccccttcctcacactgacctgtgttccttccctgttctcttttctattaaaaataagaacctgggcagagtgcggcagctcatgcctgtaatcccagcacttagggaggccgaggagggcagatcacgaggtcaggagatcgaaaccatcctggctaacacggtgaaaccccgtctctactaaaaaatacaaaaaattagctgggcgcagaggcacgggcctgtagtcccagctactcaggaggcggaggcaggagaatggcgtcaacccgggaggcggaggttgcagtgagccaggattgtgcgactgcactccagcctgggtgacagggtgaaacgccatctcaaaaaataaaaattaaaaaataaaaaaagaacctggatctcaatttaatttttcatattcttgcaatgaaatggacttgaggaagctaagatcatagctagaaatacagataattccacagcacatctctagcaaatttagcctattcctattctctagcctattccttaccacctgtaatcttgaccatataccttggagttgaatattgttttcatactgctgtggtttgaatgttccctccaacactcatgttgagacttaatccctaatgtggcaatactgaaaggtggggcctttgagatgtgattggatcgtaaggctgtgccttcattcatgggttaatggattaatgggttatcacaggaatgggactggtggctttataagaagaggaaaagagaactgagctagcatgcccagcccacagagagcctccactagagtgatgctaagtggaaatgtgaggtgcagctgccacagagggcccccaccagggaaatgtctagtgtctagtggatccaggccacaggagagagtgccttgtggagcgctgggagcaggacctgaccaccaccaggaccccagaactgtggagtcagtggcagcatgcagcgcccccttgggaaagctttaggcaccagcctgcaacccattcgagcagccacgtaggctgcacccagcaaagccacaggcacggggctacctgaggccttgggggcccaatccctgctccagtgtgtccgtgaggcagcacacgaagtcaaaagagattattctcttcccacagataccttttctctcccatgaccctttaacagcatctgcttcattcccctcaccttcccaggctgatctgaggtaaactttgaagtaaaataaaagctgtgtttgagcataaaaataaaatggcactctaattaaactgctttacagcctgcaggacaccttagggccagcttggtaatactctagattccactgtcgtcccaacccagattcttccacctcacttattccttcaccaacatgcaagtcctttccttccctgccagccagatagatggacagatggcaa

SEQ ID NO: 444525 - DNA, 2088 bp, Homo sapiens
  misc_feature (18)..(18): n is a, c, g, or t
aaacagtccacctctgtntctaccatgacccccttcctcacactgacctgtgttccttccctgttctcttttctattaaaaataagaacctgggccctgggcttctaccctgcggagatcacactgacctggcagcaggatggggagggccatacccaggacacggagctcgtggagaccaggcctgcaggggatggaaccttccagaagtgggcagctgtggtggtgccttctggagaggagcagagatacacgtgccatgtgcagcatgaggggctacccgagcccgtcaccctgagatggagtaaggagggggatgggaggtcatgtctcttctcagggaaagcgggagcccttctggagcccttccgcagggtcagggctgaggcctgggggtcagggccccttacgttcccctccccagagccggcttcccagcccaccatccccatcgtgggcatcattgctggcctggttctccttggatctgtggtctctggagctgtggttgctgctgtgatatggaggaagaagagctcaggtggggaagggagaagggtggggtctgagttttcttgtcccactgggtgtttcaagccctaggtaaaagtgtgtcctgcctcgttactgggaagcaccatccacacacacgagcctacccagcctggggccctgtgtgccagcacctactctttttttttgagacggagtcttggctctgtcacccaggctggagcgtcaacccgggaggcggaggttgcagtgagccaggattgtgcgactgcactccagcctgggtgacagggtgaaacgccatctcaaaaaataaaaattaaaaaataaaaaaagaacctggatctcaatttaatttttcatattcttgcaatgaaatggacttgaggaagctaagatcatagctagaaatacagataattccacagcacatctctagcaaatttagcctattcctattctctagcctattccttaccacctgtaatcttgaccatataccttggagttgaatattgttttcatactgctgtggtttgaatgttccctccaacactcatgttgagacttaatccctaatgtggcaatactgaaaggtggggcctttgagatgtgattggatcgtaaggctgtgccttcattcatgggttaatggattaatgggttatcacaggaatgggactggtggctttataagaagaggaaaagagaactgagctagcatgcccagcccacagagagcctccactagagtgatgctaagtggaaatgtgaggtgcagctgccacagagggcccccaccagggaaatgtctagtgtctagtggatccaggccacaggagagagtgccttgtggagcgctgggagcaggacctgaccaccaccaggaccccagaactgtggagtcagtggcagcatgcagcgcccccttgggaaagctttaggcaccagcctgcaacccattcgagcagccacgtaggctgcacccagcaaagccacaggcacggggctacctgaggccttgggggcccaatccctgctccagtgtgtccgtgaggcagcacacgaagtcaaaagagattattctcttcccacagataccttttctctcccatgaccctttaacagcatctgcttcattcccctcaccttcccaggctgatctgaggtaaactttgaagtaaaataaaagctgtgtttgagcatcatttgtatttcatttgtgcgttttgtgccttgttgttttaattttttaaccacattcaagctatcctttggcttccaatgccatggtccacccagaactgcattcactggcccgtgttctagttctggtcatgccgactttcccgttttcctggtgaatccctgtaatcacctgagtctcattctgtcaggtgatatccagtaagaaggcaacatgtgcggtgagaaagcccagggagtcctgggtgtgaatttttactttgccatttcttcctgtgtgacacgcggtggggcttcacctgtctgagctccagttcctcatcttgtacgtgtgcactctagccgtgtgcactctcatgcagtaccgag

SEQ ID NO: 444526 - DNA, 1863 bp, Homo sapiens
  misc_feature (18)..(18): n is a, c, g, or t
aaacagtccacctctgtntctaccatgacccccttcctcacactgacctgtgttccttccctgttctcttttctattaaaaataagaacctgggccctgggcttctaccctgcggagatcacactgacctggcagcaggatggggagggccatacccaggacacggagctcgtggagaccaggcctgcaggggatggaaccttccagaagtgggcagctgtggtggtgccttctggagaggagcagagatacacgtgccatgtgcagcatgaggggctacccgagcccgtcaccctgagatggaagccggcttcccagcccaccatccccatcgtgggcatcattgctggcctggttctccttggatctgtggtctctggagctgtggttgctgctgtgatatggaggaagaagagctcaggtggaaaaggagggagctactctaaggctgagtggagcgacagtgcccaggggtctgagtctcacagcttgtaaagcctgagacagctgccttgtgtgcgactgagatgcacagctgccttgtgtgcgactgagatgcaggatttcctcacgcctcccctatgtgtcttaggggactctggcttctctttttgcaagggcctctgaatctgtctgtgtccctgttagcacaatgtgaggaggtagagaaacagtccacctctgtgtctaccatgacccccttcctcacactgacctgtgttccttccctgttctcttttctattaaaaataagaacctgggcagagtgcggcagctcatgcctgtaatcccagcacttagggaggccgaggagggcagatcacgaggtcaggagatcgaaaccatcctggctaacacggtgaaaccccgtctctactaaaaaatacaaaaaattagctgggcgcagaggcacgggcctgtagtcccagctactcaggaggcggaggcaggagaatggcgtcaacccgggaggcggaggttgcagtgagccaggattgtgcgactgcactccagcctgggtgacagggtgaaacgccatctcaaaaaataaaaattaaaaaataaaaaaagaacctggatctcaatttaatttttcatattcttgcaatgaaatggacttgaggaagctaagatcatagctagaaatacagataattccacagcacatctctagcaaatttagcctattcctattctctagcctattccttaccacctgtaatcttgaccatataccttggagttgaatattgttttcatactgctgtggtttgaatgttccctccaacactcatgttgagacttaatccctaatgtggcaatactgaaaggtggggcctttgagatgtgattggatcgtaaggctgtgccttcattcatgggttaatggattaatgggttatcacaggaatgggactggtggctttataagaagaggaaaagagaactgagctagcatgcccagcccacagagagcctccactagagtgatgctaagtggaaatgtgaggtgcagctgccacagagggcccccaccagggaaatgtctagtgtctagtggatccaggccacaggagagcgcccccttgggaaagctttaggcaccagcctgcaacccattcgagcagccacgtaggctgcacccagcaaagccacaggcacggggctacctgaggccttgggggcccaatccctgctccagtgtgtccgtgaggcagcacacgaagtcaaaagagattattctcttcccacagataccttttctctcccatgaccctttaacagcatctgcttcattcccctcaccttcccaggctgatctgaggtaaactttgaagtaaaataaaagctgtgtttgagcat

SEQ ID NO: 444527 - DNA, 1747 bp, Homo sapiens
  misc_feature (18)..(18): n is a, c, g, or t
aaacagtccacctctgtntctaccatgacccccttcctcacactgacctgtgttccttccctgttctcttttctattaaaaataagaacctgggccctgggcttctaccctgcggagatcacactgacctggcagcaggatggggagggccatacccaggacacggagctcgtggagaccaggcctgcaggggatggaaccttccagaagtgggcagctgtggtggtgccttctggagaggagcagagatacacgtgccatgtgcagcatgaggggctacccgagcccgtcaccctgagatggaagccggcttcccagcccaccatccccatcgtgggcatcattgctggcctggttctccttggatctgtggtctctggagctgtggttgctgctgtgatatggaggaagaagagctcaggtggaaaaggagggagctactctaaggctgagtggagcgacagtgcccaggggtctgagtctcacagcttgtaaagcctgagacagctgccttgtgtgcgactgagatgcacagctgccttgtgtgcgactgagatgcaggatttcctcacgcctcccctatgtgtcttaggggactctggcttctctttttgcaagggcctctgaatctgtctgtgtccctgttagcacaatgtgaggaggtagagaaacagtccacctctgtgtctaccatgacccccttcctcacactgacctgtgttccttccctgttctcttttctattaaaaataagaacctgggcagagtgcggcagctcatgcctgtaatcccagcacttagggaggccgaggagggcagatcacgaggtcaggagatcgaaaccatcctggctaacacggtgaaaccccgtctctactaaaaaatacaaaaaattagctgggcgcagaggcacgggcctgtagtcccagctactcaggaggcggaggcaggagaatggcgtcaacccgggaggcggaggttgcagtgagccaggattgtgcgactgcactccagcctgggtgacagggtgaaacgccatctcaaaaaataaaaattaaaaaataaaaaaagaacctggatctcaatttaatttttcatattcttgcaatgaaatggacttgaggaagctaagatcatagctagaaatacagataattccacagcacatctctagcaaatttagcctattcctattctctagcctattccttaccacctgtaatcttgaccatataccttggagttgaatattgttttcatactgctgtggtttgaatgttccctccaacactcatgttgagacttaatccctaatgtggcaatactgaaaggtggggcctttgagatgtgattggatcgtaaggctgtgccttcattcatgggttaatggattaatgggttatcacaggaatgggactggtggctttataagaagaggaaaagagaactgagctagcatgcccagcccacagagagcctccactagagtgatgctaagtggaaatgtgaggtgcagctgccacagagggcccccaccagggaaatgtctagtgtctagtggatccaggccacaggagaggctccagtgtgtccgtgaggcagcacacgaagtcaaaagagattattctcttcccacagataccttttctctcccatgaccctttaacagcatctgcttcattcccctcaccttcccaggctgatctgaggtaaactttgaagtaaaataaaagctgtgtttgagcat

SEQ ID NO: 444528 - DNA, 2207 bp, Homo sapiens
  misc_feature (18)..(18): n is a, c, g, or t
aaacagtccacctctgtntctaccatgacccccttcctcacactgacctgtgttccttccctgttctcttttctattaaaaataagaacctgggccctgggcttctaccctgcggagatcacactgacctggcagcaggatggggagggccatacccaggacacggagctcgtggagaccaggcctgcaggggatggaaccttccagaagtgggcagctgtggtggtgccttctggagaggagcagagatacacgtgccatgtgcagcatgaggggctacccgagcccgtcaccctgagatggaagccggcttcccagcccaccatccccatcgtgggcatcattgctggcctggttctccttggatctgtggtctctggagctgtggttgctgctgtgatatggaggaagaagagctcaggtggaaaaggagggagctactctaaggctgagtggagcgacagtgcccaggggtctgagtctcacagcttgtaaagcctgagacagctgccttgtgtgcgactgagatgcacagctgccttgtgtgcgactgagatgcaggatttcctcacgcctcccctatgtgtcttaggggactctggcttctctttttgcaagggcctctgaatctgtctgtgtccctgttagcacaatgtgaggaggtagagaaacagtccacctctgtgtctaccatgacccccttcctcacactgacctgtgttccttccctgttctcttttctattaaaaataagaacctgggcagagtgcggcagctcatgcctgtaatcccagcacttagggaggccgaggagggcagatcacgaggtcaggagatcgaaaccatcctggctaacacggtgaaaccccgtctctactaaaaaatacaaaaaattagctgggcgcagaggcacgggcctgtagtcccagctactcaggaggcggaggcaggagaatggcgtcaacccgggaggcggaggttgcagtgagccaggattgtgcgactgcactccagcctgggtgacagggtgaaacgccatctcaaaaaataaaaattaaaaaataaaaaaagaacctggatctcaatttaatttttcatattcttgcaatgaaatggacttgaggaagctaagatcatagctagaaatacagataattccacagcacatctctagcaaatttagcctattcctattctctagcctattccttaccacctgtaatcttgaccatataccttggagttgaatattgttttcatactgctgtggtttgaatgttccctccaacactcatgttgagacttaatccctaatgtggcaatactgaaaggtggggcctttgagatgtgattggatcgtaaggctgtgccttcattcatgggttaatggattaatgggttatcacaggaatgggactggtggctttataagaagagggctaagtggaaatgtgaggtgcagctgccacagagggcccccaccagggaaatgtctagtgtctagtggatccaggccacaggagagagtgccttgtggagcgctgggagcaggacctgaccaccaccaggaccccagaactgtggagtcagtggcagcatgcagcgcccccttgggaaagctttaggcaccagcctgcaacccattcgagcagccacgtaggctgcacccagcaaagccacaggcacggggctacctgaggccttgggggcccaatccctgctccagtgtgtccgtgaggcagcacacgaagtcttaacagcatctgcttcattcccctcaccttcccaggctgatctgaggtaaactttgaagtaaaataaaagctgtgtttgagcatcatttgtatttcatttgtgcgttttgtgccttgttgttttaattttttaaccacattcaagctatcctttggcttccaatgccatggtccacccagaactgcattcactggcccgtgttctagttctggtcatgccgactttcccgttttcctggtgaatccctgtaatcacctgagtctcattctgtcaggtgatatccagtaagaaggcaacatgtgcggtgagaaagcccagggagtcctgggtgtgaatttttactttgccatttcttcctgtgtgacacgcggtggggcttcacctgtctgagctccagttcctcatcttgtacgtgtgcactctagccgtgtgcactctcatgcagtaccgag

SEQ ID NO: 444529 - DNA, 759 bp, Homo sapiens
  misc_feature (18)..(18): n is a, c, g, or t
aaacagtccacctctgtntctaccatgacccccttcctcacactgacctgtgttccttccctgttctcttttctattaaaaataagaacctgggccctgggcttctaccctgcggagatcacactgacctggcagcaggatggggagggccatacccaggacacggagctcgtggagaccaggcctgcaggggatggaaccttccagaagtgggcagctgtggtggtgccttctggagaggagcagagatacacgtgccatgtgcagcatgaggggctacccgagcccgtcaccctgagatggaagccggcttcccagcccaccatccccatcgtgggcatcattgctggcctggttctccttggatctgtggtctctggagctgtggttgctgctgtgatatggaggaagaagagctcaggtggaaaaggagggagctactctaaggctgagtggagcgacagtgcccaggggtctgagtctcacagcttgtaaagcctgagacagctgccttgtgtgcgactgagatgcacagctgccttgtgtgcgactgagatgcaggatttcctcacgcctcccctatgtgtcttaggggactctggcttctctttttgcaagggcctctgaatctgtctgtgtccctgttagcacaatgtgaggaggtagagaaacagtccacctctgtgtctaccatgacccccttcctcacactgacctgtgtcgaacctatgaggtaccgagctcgattgtatatgtact

SEQ ID NO: 444530 - DNA, 738 bp, Homo sapiens
  misc_feature (18)..(18): n is a, c, g, or t
aaacagtccacctctgtntctaccatgacccccttcctcacactgacctgtgttccttccctgttctcttttctattaaaaataagaacctgggccctgggcttctaccctgcggagatcacactgacctggcagcaggatggggagggccatacccaggacacggagctcgtggagaccaggcctgcaggggatggaaccttccagaagtgggcagctgtggtggtgccttctggagaggagcagagatacacgtgccatgtgcagcatgaggggctacccgagcccgtcaccctgagatggaagccggcttcccagcccaccatccccatcgtgggcatcattgctggcctggttctccttggatctgtggtctctggagctgtggttgctgctgtgatatggaggaagaagagctcaggtggaaaaggagggagctactctaaggctgagtggagcgacagtgcccaggggtctgagtctcacagcttgtaaagcctgagacagctgccttgtgtgcgactgagatgcacagctgccttgtgtgcgactgagatgcaggatttcctcacgcctcccctatgtgtcttaggggactctggcttctctttttgcaagggcctctgaatctgtctgtgtccctgttagcacaatgtgaggaggtagagaaacagtccacctctgtcgtccggcgtgtcctgctacctgtcctctgtcctggctcaagctattgggtac

SEQ ID NO: 444531 - DNA, 695 bp, Homo sapiens
  misc_feature (18)..(18): n is a, c, g, or t
aaacagtccacctctgtntctaccatgacccccttcctcacactgacctgtgttccttccctgttctcttttctattaaaaataagaacctgggccctgggcttctaccctgcggagatcacactgacctggcagcaggatggggagggccatacccaggacacggagctcgtggagaccaggcctgcaggggatggaaccttccagaagtgggcagctgtggtggtgccttctggagaggagcagagatacacgtgccatgtgcagcatgaggggctacccgagcccgtcaccctgagatggaagccggcttcccagcccaccatccccatcgtgggcatcattgctggcctggttctccttggatctgtggtctctggagctgtggttgctgctgtgatatggaggaagaagagctcaggtggggaagggagaagggtggggtctgagttttcttgtcccactgggtgtttcaagccctaggtaaaagtgtgtcctgcctcgttactgggaagcaccatccacacacacgagcctacccagcctggggccctgtgtgccagcacctactctttttttttgagacggagtcttggctctgtcacccaggctggagtgcaatggcgtggtttcagctcactgcaacctccgcctcccaggttcaagcaattctcctgcctcagcctccctagtag

SEQ ID NO: 444532 - DNA, 817 bp, Homo sapiens
gggggcctgtctgcattctactatataaagcagcagagacgttgactagcgcatatttgctaagagcaccatgcgcgcagcagccatctccactccaaagttagacaaaatgccaggaatgttcttctctgctaacccaaaggaattgaaaggaaccactcattcacttctagacgacaaaatgcaaaaaaggaggccaaagacttttggaatggatatgaaagcatacctgagatctatgatcccacatctggaatctggaatgaaatcttccaagtccaaggatgtactttctgctgctgaagtaatgcaatggtctcaatctctggaaaaacttcttgccaaccaaagtaagtataactattgaatgtttctgggttcagctaaatactctaaaaaattgaatggcttcactaaatatagtattctgggtaggatagtatgcaaaaggttgtattctagtttgtctgtagttactgataacttcagcatagtatgcctcttaataatgctgacttagcactcaattctgccaactccttttagacaaatttgccaagacaattaggtattttcatagatcattatggagataaaattaaacattgtgctgggattctgatatgtaaaaattttaaaagtaagccaaatattttaatatgtacattgccattttgaaatctgcctaaagaatgtatttttctacacttggatgtaacaagtatgattcattcattcaattaattaaattatctttcatacattcatcattcatctcacccttatgtagaggacattgtagaggtaccaaggattc

SEQ ID NO: 444533 - DNA, 1412 bp, Homo sapiens
gggggcctgtctgcattctactatataaagcagcagagacgttgactagcgcatatttgctaagagcaccatgcgcgcagcagccatctccactccaaagttagacaaaatgccaggaatgttcttctctgctaacccaaaggaattgaaaggaaccactcattcacttctagacgacaaaatgcaaaaaaggaggccaaagacttttggaatggatatgaaagcatacctgagatctatgatcccacatctggaatctggaatgaaatcttccaagtccaaggatgtactttctgctgctgaagtaatgcaatggtctcaatctctggaaaaacttcttgccaaccaaactggtcaaaatgtctttggaagtttcctaaagtctgaattcagtgaggagaatattgagttctggctggcttgtgaagactataagaaaacagagtctgatcttttgccctgtaaagcagaagagatatataaagcatttgtgcattcagatgctgctaaacaaatcaatattgacttccgcactcgagaatctacagccaagaagattaaagcaccaacccccacgtgttttgatgaagcacaaaaagtcatatatactcttatggaaaaggactcttatcccaggttcctcaaatcagatatttacttaaatcttctaaatgacctgcaggctaatagcctaaagtgactggtccctggctgaagggaattaacagatagtatcaagcgcagaaggaatgtgccagtatggctccctgggtgaacagcttggccttttttgggtgtcttgacaggccaagaagaacaaatgactcagaatggattaacatgaaagttatccaggcgcagagttgaagaagcataagcaagacaaaaacagagagaccgcagaaggaggaagatactgtggtactgtcataaaaaacagtggagctctgtattagaaagcccctcagaactgggaaggccaggtaactctagttacacagaaactgtgactaaagtctatgaaactgattacaacagactgtaagaatcaaagtcaactgacatctatgctacatattattatatagtttgtactgagctattgaagtcccattaacttaaagtatatgttttcaaattgccattgctactattgcttgtcggtgttattttattttattgtttttgactttggaagagatgaactgtgtatttaacttaagctattgctcttaaaaccagggagtcagaatatatttgtaagttaaatcattggtgctaataataaatgtggattttgtattaaaatatatagaagcaatttctgtttacatgtccttgctacttttaaaaacttgcatttattcctcagattttaaaaataaataaataattcatttaaaaaaaaaaat

SEQ ID NO: 444534 - DNA, 1278 bp, Homo sapiens
tagatggcaacctccctatctgcccgcaggtcatagaggcgacacgtagcgtcatctgaccctgaagcaaaggcgcagcagccatctccactccaaagttagacaaaatgccaggaatgttcttctctgctaacccaaaggaattgaaaggaaccactcattcacttctagacgacaaaatgcaaaaaaggaggccaaagacttttggaatggatatgaaagcatacctgagatctatgatcccacattctgaattcagtgaggagaatattgagttctggctggcttgtgaagactataagaaaacagagtctgatcttttgccctgtaaagcagaagagatatataaagcatttgtgcattcagatgctgctaaacaaatcaatattgacttccgcactcgagaatctacagccaagaagattaaagcaccaacccccacgtgttttgatgaagcacaaaaagtcatatatactcttatggaaaaggactcttatcccaggttcctcaaatcagatatttacttaaatcttctaaatgacctgcaggctaatagcctaaagtgactggtccctggctgaagggaattaacagatagtatcaagcgcagaaggaatgtgccagtatggctccctgggtgaacagcttggccttttttgggtgtcttgacaggccaagaagaacaaatgactcagaatggattaacatgaaagttatccaggcgcagagttgaagaagcataagcaagacaaaaacagagagaccgcagaaggaggaagatactgtggtactgtcataaaaaacagtggagctctgtattagaaagcccctcagaactgggaaggccaggtaactctagttacacagaaactgtgactaaagtctatgaaactgattacaacagactgtaagaatcaaagtcaactgacatctatgctacatattattatatagtttgtactgagctattgaagtcccattaacttaaagtatatgttttcaaattgccattgctactattgcttgtcggtgttattttattttattgtttttgactttggaagagatgaactgtgtatttaacttaagctattgctcttaaaaccagggagtcagaatatatttgtaagttaaatcattggtgctaataataaatgtggattttgtattaaaatatatagaagcaatttctgtttacatgtccttgctacttttaaaaacttgcatttattcctcagattttaaaaataaataaataattcatttaaaaaaaaaaat

SEQ ID NO: 444535 - DNA, 1726 bp, Homo sapiens
ctctaaagagtgagattattcttttctccccacagacaccctaaggagctttacttgggaatcacattgttcactctagctcagctgactttgtttataattcagctaaacaaataaatggtatagatatggaccataaatggtgccatataaaagtctcagtgaatgctagcaaacataattagtacatcaggcctacagatcatatataggcctaacattttctggctaatataaattagatggggaaattatatttactaattattgtgatgttaatgccttttgtcagtgtttgctttcctaaaatactctctactctggctaagatttggcatatataaaagatggttttatattcagtggagcagaatttcaattcaaaccgcggatagaagcaaaacagtttggtagccaccatcaagtagcaatgtgactatgaatgagtttgtctggccccagattcctcttctatgaatgaagaaatttcaaatgacttctcatctctacaatctataacacagctatttcagcagtagctgtctcttacctttgtatgaataggaagcaattgtatttttcttacaaatttcttcttcaaattattcatttgttggttcatttaatttaattatctccccacccacccctcgtttctttttagctggtcaaaatgtctttggaagtttcctaaagtctgaattcagtgaggagaatattgagttctggctggcttgtgaagactataagaaaacagagtctgatcttttgccctgtaaagcagaagagatatataaagcatttgtgcattcagatgctgctaaacaaatcaatattgacttccgcactcgagaatctacagccaagaagattaaagcaccaacccccacgtgttttgatgaagcacaaaaagtcatatatactcttatggaaaaggactcttatcccaggttcctcaaatcagatatttacttaaatcttctaaatgacctgcaggctaatagcctaaagtgactggtccctggctgaagggaattaacagatagtatcaagcgcagaaggaatgtgccagtatggctccctgggtgaacagcttggccttttttgggtgtcttgacaggccaagaagaacaaatgactcagaatggattaacatgaaagttatccaggcgcagagttgaagaagcataagcaagacaaaaacagagagaccgcagaaggaggaagatactgtggtactgtcataaaaaacagtggagctctgtattagaaagcccctcagaactgggaaggccaggtaactctagttacacagaaactgtgactaaagtctatgaaactgattacaacagactgtaagaatcaaagtcaactgacatctatgctacatattattatatagtttgtactgagctattgaagtcccattaacttaaagtatatgttttcaaattgccattgctactattgcttgtcggtgttattttattttattgtttttgactttggaagagatgaactgtgtatttaacttaagctattgctcttaaaaccagggagtcagaatatatttgtaagttaaatcattggtgctaataataaatgtggattttgtattaaaatatatagaagcaatttctgtttacatgtccttgctacttttaaaaacttgcatttattcctcagattttaaaaataaataaataattcatttaaaaaaaaaaat

SEQ ID NO: 444536 - DNA, 1356 bp, Homo sapiens
tagatggcaacctccctatctgcccgcaggtcatagaggcgacacgtagcgtcatctgaccctgaagcaaaggcgcagcagccatctccactccaaagttagacaaaatgccaggaatgttcttctctgctaacccaaaggaattgaaaggaaccactcattcacttctagacgacaaaatgcaaaaaaggaggccaaagacttttggaatggatatgaaagcatacctgagatctatgatcccacatctggaatctggaatgaaatcttccaagtccaaggatgtactttctgctgctgaagtaatgcaatggtctcaatctctggaaaaacttcttgccaaccaaactggtcaaaatgtctttggaagtttcctaaagtctgaattcagtgaggagaatattgagttctggctggcttgtgaagactataaggtgcattcagatgctgctaaacaaatcaatattgacttccgcactcgagaatctacagccaagaagattaaagcaccaacccccacgtgttttgatgaagcacaaaaagtcatatatactcttatggaaaaggactcttatcccaggttcctcaaatcagatatttacttaaatcttctaaatgacctgcaggctaatagcctaaagtgactggtccctggctgaagggaattaacagatagtatcaagcgcagaaggaatgtgccagtatggctccctgggtgaacagcttggccttttttgggtgtcttgacaggccaagaagaacaaatgactcagaatggattaacatgaaagttatccaggcgcagagttgaagaagcataagcaagacaaaaacagagagaccgcagaaggaggaagatactgtggtactgtcataaaaaacagtggagctctgtattagaaagcccctcagaactgggaaggccaggtaactctagttacacagaaactgtgactaaagtctatgaaactgattacaacagactgtaagaatcaaagtcaactgacatctatgctacatattattatatagtttgtactgagctattgaagtcccattaacttaaagtatatgttttcaaattgccattgctactattgcttgtcggtgttattttattttattgtttttgactttggaagagatgaactgtgtatttaacttaagctattgctcttaaaaccagggagtcagaatatatttgtaagttaaatcattggtgctaataataaatgtggattttgtattaaaatatatagaagcaatttctgtttacatgtccttgctacttttaaaaacttgcatttattcctcagattttaaaaataaataaataattcatttaaaaaaaaaaat

SEQ ID NO: 444537 - DNA, 1358 bp, Homo sapiens
gggggcctgtctgcattctactatataaagcagcagagacgttgactagcgcatatttgctaagagcaccatgcgcgcagcagccatctccactccaaagttagacaaaatgccaggaatgttcttctctgctaacccaaaggaattgaaaggaaccactcattcacttctagacgacaaaatgcaaaaaaggaggccaaagacttttggaatggatatgaaagcatacctgagatctatgatcccacatctggaatctggaatgaaatcttccaagtccaaggatgtactttctgctgctgaagtaatgcaatggtctcaatctctggaaaaacttcttgccaaccaaactggtcaaaatgtctttggaagtttcctaaagtctgaattcagtgaggagaatattgagttctggctggcttgtgaagactataaggtgcattcagatgctgctaaacaaatcaatattgacttccgcactcgagaatctacagccaagaagattaaagcaccaacccccacgtgttttgatgaagcacaaaaagtcatatatactcttatggaaaaggactcttatcccaggttcctcaaatcagatatttacttaaatcttctaaatgacctgcaggctaatagcctaaagtgactggtccctggctgaagggaattaacagatagtatcaagcgcagaaggaatgtgccagtatggctccctgggtgaacagcttggccttttttgggtgtcttgacaggccaagaagaacaaatgactcagaatggattaacatgaaagttatccaggcgcagagttgaagaagcataagcaagacaaaaacagagagaccgcagaaggaggaagatactgtggtactgtcataaaaaacagtggagctctgtattagaaagcccctcagaactgggaaggccaggtaactctagttacacagaaactgtgactaaagtctatgaaactgattacaacagactgtaagaatcaaagtcaactgacatctatgctacatattattatatagtttgtactgagctattgaagtcccattaacttaaagtatatgttttcaaattgccattgctactattgcttgtcggtgttattttattttattgtttttgactttggaagagatgaactgtgtatttaacttaagctattgctcttaaaaccagggagtcagaatatatttgtaagttaaatcattggtgctaataataaatgtggattttgtattaaaatatatagaagcaatttctgtttacatgtccttgctacttttaaaaacttgcatttattcctcagattttaaaaataaataaataattcatttaaaaaaaaaaat

SEQ ID NO: 444538 - DNA, 1454 bp, Homo sapiens
aagagactgattttacaaaaccagctgccatgatgagggtgagggaagggttaagggtattgttactgaccagaactgcatgtcagggagtccttaatgagtgctcttgttttggataagaaaatgcagattagcataatgtatacaattgcagcagcaaaagtatttccaattaacagtattaccagataaatattcttggtccaagcagaaaatatcaacaaaaagagccttcttctcctgtaaatcttaaatgcctacatcactctttatgatacatggatcatcttatgtggatacttaaatttttcatgtctgcttcttttgcctctcctaactatactatgaggaaatttggaacaaagacatttttgtaatatttcttatctccttcacacctagtatagagctgattttacaaaggcatttaagagatatttgaattgatttaaatgaggccttaaaattactttctgaggtgtttcaaaaaacagtaacatcataaaatttgcagtaaagaaaagtatatattagctaacaaggttttcttttttagatcaatattgacttccgcactcgagaatctacagccaagaagattaaagcaccaacccccacgtgttttgatgaagcacaaaaagtcatatatactcttatggaaaaggactcttatcccaggttcctcaaatcagatatttacttaaatcttctaaatgacctgcaggctaatagcctaaagtgactggtccctggctgaagggaattaacagatagtatcaagcgcagaaggaatgtgccagtatggctccctgggtgaacagcttggccttttttgggtgtcttgacaggccaagaagaacaaatgactcagaatggattaacatgaaagttatccaggcgcagagttgaagaagcataagcaagacaaaaacagagagaccgcagaaggaggaagatactgtggtactgtcataaaaaacagtggagctctgtattagaaagcccctcagaactgggaaggccaggtaactctagttacacagaaactgtgactaaagtctatgaaactgattacaacagactgtaagaatcaaagtcaactgacatctatgctacatattattatatagtttgtactgagctattgaagtcccattaacttaaagtatatgttttcaaattgccattgctactattgcttgtcggtgttattttattttattgtttttgactttggaagagatgaactgtgtatttaacttaagctattgctcttaaaaccagggagtcagaatatatttgtaagttaaatcattggtgctaataataaatgtggattttgtattaaaatatatagaagcaatttctgtttacatgtccttgctacttttaaaaacttgcatttattcctcagattttaaaaataaataaataattcatttaaaaaaaaaaat

SEQ ID NO: 444539 - DNA, 1672 bp, Homo sapiens
ctctaaagagtgagattattcttttctccccacagacaccctaaggagctttacttgggaatcacattgttcactctagctcagctgactttgtttataattcagctaaacaaataaatggtatagatatggaccataaatggtgccatataaaagtctcagtgaatgctagcaaacataattagtacatcaggcctacagatcatatataggcctaacattttctggctaatataaattagatggggaaattatatttactaattattgtgatgttaatgccttttgtcagtgtttgctttcctaaaatactctctactctggctaagatttggcatatataaaagatggttttatattcagtggagcagaatttcaattcaaaccgcggatagaagctggccccagattcctcttctatgaatgaagaaatttcaaatgacttctcatctctacaatctataacacagctatttcagcagtagctgtctcttacctttgtatgaataggaagcaattgtatttttcttacaaatttcttcttcaaattattcatttgttggttcatttaatttaattatctccccacccacccctcgtttctttttagctggtcaaaatgtctttggaagtttcctaaagtctgaattcagtgaggagaatattgagttctggctggcttgtgaagactataagaaaacagagtctgatcttttgccctgtaaagcagaagagatatataaagcatttgtgcattcagatgctgctaaacaaatcaatattgacttccgcactcgagaatctacagccaagaagattaaagcaccaacccccacgtgttttgatgaagcacaaaaagtcatatatactcttatggaaaaggactcttatcccaggttcctcaaatcagatatttacttaaatcttctaaatgacctgcaggctaatagcctaaagtgactggtccctggctgaagggaattaacagatagtatcaagcgcagaaggaatgtgccagtatggctccctgggtgaacagcttggccttttttgggtgtcttgacaggccaagaagaacaaatgactcagaatggattaacatgaaagttatccaggcgcagagttgaagaagcataagcaagacaaaaacagagagaccgcagaaggaggaagatactgtggtactgtcataaaaaacagtggagctctgtattagaaagcccctcagaactgggaaggccaggtaactctagttacacagaaactgtgactaaagtctatgaaactgattacaacagactgtaagaatcaaagtcaactgacatctatgctacatattattatatagtttgtactgagctattgaagtcccattaacttaaagtatatgttttcaaattgccattgctactattgcttgtcggtgttattttattttattgtttttgactttggaagagatgaactgtgtatttaacttaagctattgctcttaaaaccagggagtcagaatatatttgtaagttaaatcattggtgctaataataaatgtggattttgtattaaaatatatagaagcaatttctgtttacatgtccttgctacttttaaaaacttgcatttattcctcagattttaaaaataaataaataattcatttaaaaaaaaaaat

SEQ ID NO: 444540 - DNA, 714 bp, Homo sapiens
atattttaatacaaaatccacatttattattagcaccaatgatttaacttacaaatatattatggctccctgggtgaacagcttggccttttttgggtgtcttgacaggccaagaagaacaaatgactcagaatggattaacatgaaagttatccaggcgcagagttgaagaagcataagcaagacaaaaacagagagaccgcagaaggaggaagatactgtggtactgtcataaaaaacagtggagctctgtattagaaagcccctcagaactgggaaggccaggtaactctagttacacagaaactgtgactaaagtctatgaaactgattacaacagactgtaagaatcaaagtcaactgacatctatgctacatattattatatagtttgtactgagctattgaagtcccattaacttaaagtatatgttttcaaattgccattgctactattgcttgtcggtgttattttattttattgtttttgactttggaagagatgaactgtgtatttaacttaagctattgctcttaaaaccagggagtcagaatatatttgtaagttaaatcattggtgctaataataaatgtggattttgtattaaaatatatagaagcaatttctgtttacatgtccttgctacttttaaaaacttgcatttattcctcagattttaaaaataaataaataattcatttaaaaaaaaaaat

SEQ ID NO: 444541 - DNA, 1358 bp, Homo sapiens
gggggcctgtctgcattctactatataaagcagcagagacgttgactagcgcatatttgctaagagcaccatgcgcgcagcagccatctccactccaaagttagacaaaatgccaggaatgttcttctctgctaacccaaaggaattgaaaggaaccactcattcacttctagacgacaaaatgcaaaaaaggaggccaaagacttttggaatggatatgaaagcatacctgagatctatgatcccacatctggaatctggaatgaaatcttccaagtccaaggatgtactttctgctgctgaagtaatgcaatggtctcaatctctggaaaaacttcttgccaaccaaactggtcaaaatgtctttggaagtttcctaaagtctgaattcagtgaggagaatattgagttctggctggcttgtgaagactataagaaaacagagtctgatcttttgccctgtaaagcagaagagatatataaagcatttgtgcattcagatgctgctaaacaaatcaatattgacttccgcactcgagaatctacagccaagaagattaaagcaccaacccccacgtgttttgatgaagcacaaaaagtcatatatactcttatggaaaaggactcttatcccaggttcctcaaatcagatatttacttaaatcttctaaatgacctgcaggctaatagcctaaagtgactggtccctggctgaagggaattaacagatagtatcaagcgcagaaggaatgtgccagtatggctccctgggtgaacagcttggccttttttgggtgtcttgacaggccaagaagaacaaatgactcagaatggattaacatgaaagttatccaggcgcagagttgaagaagcataagcaagacaaaaacagagagaccgcagaaggaggaagatactgtggtactgtcataaaaaacagtggagctctgtattagaaagcccctcagaactgggaaggccaggtaactctagttacacagaaactgtgactaaagtctatgaaactgattacaacagactgtaagaatcaaagtcaactgacatctatgctacatattacaaattgccattgctactattgcttgtcggtgttattttattttattgtttttgactttggaagagatgaactgtgtatttaacttaagctattgctcttaaaaccagggagtcagaatatatttgtaagttaaatcattggtgctaataataaatgtggattttgtattaaaatatatagaagcaatttctgtttacatgtccttgctacttttaaaaacttgcatttattcctcagattttaaaaataaataaataattcatttaaaaaaaaaaat

SEQ ID NO: 444542 - DNA, 487 bp, Homo sapiens
tagatggcaacctccctatctgcccgcaggtcatagaggcgacacgtagcgtcatctgaccctgaagcaaaggcgcagcagccatctccactccaaagttagacaaaatgccaggaatgttcttctctgctaacccaaaggaattgaaaggaaccactcattcacttctagacgacaaaatgcaaaaaaggaggccaaagactttgccttttggatgggtattaaagcatacccctaggtctatgatcccacacactctgggatctttgagattaaatttttccacagtgcccaggggtgtactctctttgcttcttctgagtgatgtgcaatggctcactctctcggggaaactcctttgccccacccactcgtaaaaaatttgtcttgggggagtccccaagggtctatcaccagtggggggtattgtggggttctcggccttctgatgaggactttagaacagcggcgtctcttctttccccct

SEQ ID NO: 444543 - DNA, 278 bp, Homo sapiens
agcagccatctccactccaaagttagacaaaatgccaggaatgttcttctctgctaacccaaaggaattgaaaggaaccactcattcacttctagacgacaaaatgcaaaaaaggaggccaaagacttttgtaagtttgttcagagtctcactttgtgaattttaacaagttatctttaatggcagaaggattgagaatgaatggaagagagtgtgagcatttagtttagccagatcagaggagttaattgcctgttgtgagtaataagtaatattca

SEQ ID NO: 444544 - DNA, 1410 bp, Homo sapiens
tagatggcaacctccctatctgcccgcaggtcatagaggcgacacgtagcgtcatctgaccctgaagcaaaggcgcagcagccatctccactccaaagttagacaaaatgccaggaatgttcttctctgctaacccaaaggaattgaaaggaaccactcattcacttctagacgacaaaatgcaaaaaaggaggccaaagacttttggaatggatatgaaagcatacctgagatctatgatcccacatctggaatctggaatgaaatcttccaagtccaaggatgtactttctgctgctgaagtaatgcaatggtctcaatctctggaaaaacttcttgccaaccaaactggtcaaaatgtctttggaagtttcctaaagtctgaattcagtgaggagaatattgagttctggctggcttgtgaagactataagaaaacagagtctgatcttttgccctgtaaagcagaagagatatataaagcatttgtgcattcagatgctgctaaacaaatcaatattgacttccgcactcgagaatctacagccaagaagattaaagcaccaacccccacgtgttttgatgaagcacaaaaagtcatatatactcttatggaaaaggactcttatcccaggttcctcaaatcagatatttacttaaatcttctaaatgacctgcaggctaatagcctaaagtgactggtccctggctgaagggaattaacagatagtatcaagcgcagaaggaatgtgccagtatggctccctgggtgaacagcttggccttttttgggtgtcttgacaggccaagaagaacaaatgactcagaatggattaacatgaaagttatccaggcgcagagttgaagaagcataagcaagacaaaaacagagagaccgcagaaggaggaagatactgtggtactgtcataaaaaacagtggagctctgtattagaaagcccctcagaactgggaaggccaggtaactctagttacacagaaactgtgactaaagtctatgaaactgattacaacagactgtaagaatcaaagtcaactgacatctatgctacatattattatatagtttgtactgagctattgaagtcccattaacttaaagtatatgttttcaaattgccattgctactattgcttgtcggtgttattttattttattgtttttgactttggaagagatgaactgtgtatttaacttaagctattgctcttaaaaccagggagtcagaatatatttgtaagttaaatcattggtgctaataataaatgtggattttgtattaaaatatatagaagcaatttctgtttacatgtccttgctacttttaaaaacttgcatttattcctcagattttaaaaataaataaataattcatttaaaaaaaaaaat

SEQ ID NO: 444545 - DNA, 1396 bp, Homo sapiens
  misc_feature (1)..(1): n is a, c, g, or t
  misc_feature (7)..(8): n is a, c, g, or t
  misc_feature (21)..(21): n is a, c, g, or t
  misc_feature (24)..(24): n is a, c, g, or t
ngggggnnaaaaaaacggcgnaangggggccgggccctctttcgacccacgcgtccgggcgcagcagccatctccactccaaagttagacaaaatgccaggaatgttcttctctgctaacccaaaggaattgaaaggaaccactcattcacttctagacgacaaaatgcaaaaaaggaggccaaagacttttggaatggatatgaaagcatacctgagatctatgatcccacatctggaatctggaatgaaatcttccaagtccaaggatgtactttctgctgctgaagtaatgcaatggtctcaatctctggaaaaacttcttgccaaccaaactggtcaaaatgtctttggaagtttcctaaagtctgaattcagtgaggagaatattgagttctggctggcttgtgaagactataagaaaacagagtctgatcttttgccctgtaaagcagaagagatatataaagcatttgtgcattcagatgctgctaaacaaatcaatattgacttccgcactcgagaatctacagccaagaagattaaagcaccaacccccacgtgttttgatgaagcacaaaaagtcatatatactcttatggaaaaggactcttatcccaggttcctcaaatcagatatttacttaaatcttctaaatgacctgcaggctaatagcctaaagtgactggtccctggctgaagggaattaacagatagtatcaagcgcagaaggaatgtgccagtatggctccctgggtgaacagcttggccttttttgggtgtcttgacaggccaagaagaacaaatgactcagaatggattaacatgaaagttatccaggcgcagagttgaagaagcataagcaagacaaaaacagagagaccgcagaaggaggaagatactgtggtactgtcataaaaaacagtggagctctgtattagaaagcccctcagaactgggaaggccaggtaactctagttacacagaaactgtgactaaagtctatgaaactgattacaacagactgtaagaatcaaagtcaactgacatctatgctacatattattatatagtttgtactgagctattgaagtcccattaacttaaagtatatgttttcaaattgccattgctactattgcttgtcggtgttattttattttattgtttttgactttggaagagatgaactgtgtatttaacttaagctattgctcttaaaaccagggagtcagaatatatttgtaagttaaatcattggtgctaataataaatgtggattttgtattaaaatatatagaagcaatttctgtttacatgtccttgctacttttaaaaacttgcatttattcctcagattttaaaaataaataaataattcatttaaaaaaaaaaat

SEQ ID NO: 444546 - DNA, 1358 bp, Homo sapiens
gggggcctgtctgcattctactatataaagcagcagagacgttgactagcgcatatttgctaagagcaccatgcgcgcagcagccatctccactccaaagttagacaaaatgccaggaatgttcttctctgctaacccaaaggaattgaaaggaaccactcattcacttctagacgacaaaatgcaaaaaaggaggccaaagacttttggaatggatatgaaagcatacctgagatctatgatcccacatctggaatctggaatgaaatcttccaagtccaaggatgtactttctgctgctgaagtaatgcaatggtctcaatctctggaaaaacttcttgccaaccaaactggtcaaaatgtctttggaagtttcctaaagtctgaattcagtgaggagaatattgagttctggctggcttgtgaagactataagaaaacagagtctgatcttttgccctgtaaagcagaagagatatataaagcatttgtgcattcagatgctgctaaacaaatcaatattgacttccgcactcgagaatctacagccaagaagattaaagcaccaacccccacgtgttttgatgaagcacaaaaagtcatatatactcttatggatgacctgcaggctaatagcctaaagtgactggtccctggctgaagggaattaacagatagtatcaagcgcagaaggaatgtgccagtatggctccctgggtgaacagcttggccttttttgggtgtcttgacaggccaagaagaacaaatgactcagaatggattaacatgaaagttatccaggcgcagagttgaagaagcataagcaagacaaaaacagagagaccgcagaaggaggaagatactgtggtactgtcataaaaaacagtggagctctgtattagaaagcccctcagaactgggaaggccaggtaactctagttacacagaaactgtgactaaagtctatgaaactgattacaacagactgtaagaatcaaagtcaactgacatctatgctacatattattatatagtttgtactgagctattgaagtcccattaacttaaagtatatgttttcaaattgccattgctactattgcttgtcggtgttattttattttattgtttttgactttggaagagatgaactgtgtatttaacttaagctattgctcttaaaaccagggagtcagaatatatttgtaagttaaatcattggtgctaataataaatgtggattttgtattaaaatatatagaagcaatttctgtttacatgtccttgctacttttaaaaacttgcatttattcctcagattttaaaaataaataaataattcatttaaaaaaaaaaat

SEQ ID NO: 444547 - DNA, 1331 bp, Homo sapiens
gggggcctgtctgcattctactatataaagcagcagagacgttgactagcgcatatttgctaagagcaccatgcgcgcagcagccatctccactccaaagttagacaaaatgccaggaatgttcttctctgctaacccaaaggaattgaaaggaaccactcattcacttctagacgacaaaatgcaaaaaaggaggccaaagactttactttctgctgctgaagtaatgcaatggtctcaatctctggaaaaacttcttgccaaccaaactggtcaaaatgtctttggaagtttcctaaagtctgaattcagtgaggagaatattgagttctggctggcttgtgaagactataagaaaacagagtctgatcttttgccctgtaaagcagaagagatatataaagcatttgtgcattcagatgctgctaaacaaatcaatattgacttccgcactcgagaatctacagccaagaagattaaagcaccaacccccacgtgttttgatgaagcacaaaaagtcatatatactcttatggaaaaggactcttatcccaggttcctcaaatcagatatttacttaaatcttctaaatgacctgcaggctaatagcctaaagtgactggtccctggctgaagggaattaacagatagtatcaagcgcagaaggaatgtgccagtatggctccctgggtgaacagcttggccttttttgggtgtcttgacaggccaagaagaacaaatgactcagaatggattaacatgaaagttatccaggcgcagagttgaagaagcataagcaagacaaaaacagagagaccgcagaaggaggaagatactgtggtactgtcataaaaaacagtggagctctgtattagaaagcccctcagaactgggaaggccaggtaactctagttacacagaaactgtgactaaagtctatgaaactgattacaacagactgtaagaatcaaagtcaactgacatctatgctacatattattatatagtttgtactgagctattgaagtcccattaacttaaagtatatgttttcaaattgccattgctactattgcttgtcggtgttattttattttattgtttttgactttggaagagatgaactgtgtatttaacttaagctattgctcttaaaaccagggagtcagaatatatttgtaagttaaatcattggtgctaataataaatgtggattttgtattaaaatatatagaagcaatttctgtttacatgtccttgctacttttaaaaacttgcatttattcctcagattttaaaaataaataaataattcatttaaaaaaaaaaat

SEQ ID NO: 444548 - DNA, 1359 bp, Homo sapiens
gggggcctgtctgcattctactatataaagcagcagagacgttgactagcgcatatttgctaagagcaccatgcgcgcagcagccatctccactccaaagttagacaaaatgccaggaatgttcttctctgctaacccaaaggaattgaaaggaaccactcattcacttctagacgacaaaatgcaaaaaaggaggccaaagacttttggaatggatatgaaagcatacctgagatctatgatcccacatctggaatctggaatgaaatcttccaagtccaaggatgtactttctgctgctgaagtaatgcaatggtctcaatctctggaaaaacttcttgccaaccaaactggtcaaaatgtctttggaagtttcctaaagtctgaattcagtgaggagaatattgagttctggctggcttgtgaagactataagaaaacagagtctgatcttttgccctgtaaagcagaagagatatataaagcatttgtgcattcagatgctgctaaacaaatcaatattgacttccgcactcgagaatctacagccaagaagattaaagcaccaacccccacgtgttttgatgaagcacaaaaagtcatatatactcttatggaaaaggactcttatcccaggttcctcaaatcagatatttacttaaatcttctaaatgacctgcaggctaatagcctaaagtgactggtccctggctgaagggaattaacagatagtatcaagcgcagaaggaatgtgccagtatggctccctgggtgaacagcttggccttttttgggtgtcttgacaggccaagaagaacaaatgactcagaatggattaacatgaaagttatccaggcgcagagttgaagaagcataagcaagacaaaaacagagagaccgcagaaggaggaagatactgtggtactgtcagtaactctagttacacagaaactgtgactaaagtctatgaaactgattacaacagactgtaagaatcaaagtcaactgacatctatgctacatattattatatagtttgtactgagctattgaagtcccattaacttaaagtatatgttttcaaattgccattgctactattgcttgtcggtgttattttattttattgtttttgactttggaagagatgaactgtgtatttaacttaagctattgctcttaaaaccagggagtcagaatatatttgtaagttaaatcattggtgctaataataaatgtggattttgtattaaaatatatagaagcaatttctgtttacatgtccttgctacttttaaaaacttgcatttattcctcagattttaaaaataaataaataattcatttaaaaaaaaaaat

SEQ ID NO: 444549 - DNA, 2182 bp, Homo sapiens
  misc_feature (1)..(2): n is a, c, g, or t
  misc_feature (4)..(5): n is a, c, g, or t
  misc_feature (9)..(9): n is a, c, g, or t
  misc_feature (12)..(12): n is a, c, g, or t
  misc_feature (14)..(16): n is a, c, g, or t
nncnngagntgngnnnggaggtgggagatcttcaaagggattcatgaggcctgttcctgtgagaggggtccattcactccacccccgcccctttggggggcctgtttctttgccttggctcagaactgggaggtgcagatggggcctcggactctacagacagcccagcctcctgccagaagaaatctgcggggtgtttttccggcgccattacccactcaccaccctccgcttctgtggtatggaccctgagcaacggaagtggcagaagtactgcaaaccctcctggatctttgggtttgtggccaagagccagacagagcctcaggagaacgtatgccacctctttgcggagtatgacatggtccagccagcctcgcaggtcatcggcctggtgactgctctgctgcaggacgcagaaaggatgtaggggagagactgcctgtgcacctaaccaacacctccaggggctcgctaaggagcccccctccaccccctgaatgggtgtggcttgtggccatattgacagaccaatctatgggactagggggattggcatcaagttgacacccttgaacctgctatggccttcagcagtcaccatcatccagaccccccgggcctcagtttcctcaatcatagaagaagaccaatagacaagatcagctgttcttagatgctggtgggcatttgaacatgctcctccatgattctgaagcatgcacacctctgaagacccctgcatgaaaataacctccaaggaccctctgaccccatcgacctgggccctgcccacacaacagtctgagcaagagacctgcagcccctgtttcgtggcagacagcaggtgcctggcggtgacccacggggctcctggcttgcagctggtgatggtcaagaactgactacaaaacaggaatggatagactctatttccttccatatctgttcctctgttccttttcccactttctgggtggctttttgggtccacccagccaggatgctgcaggccaagctgggtgtggtatttagggcagctcagcagggggaacttgtccccatggtcagaggagacccagctgtcctgcacccccttgcagatgagtatcaccccatcttttctttccacttggtttttatttttatttttttttgagacagagtctcactgtcacccaggctgaactgcagtggtgtgatctaggctcactgcaacctccacctcccaggttcaagcaattatcctgcctcaggctcccaagtagctgggattacaggcatgtgcaactcacccagctaattttgtatttttagtagagacagggtttcaccatgttggccaggctggtcttgaactcctgaccgcaggtaatccacctgcttcggcctcccaaagtgctgggattacaggcgcaagccacccagcccagcttctttccattccttgataggcgagtattccaaagctggtatcgtagctgccctaatgttgcatattaggcggcgggggcagagataagggccatctctctgtgattctgcctcagctcctgtcttgctgagccctcccccaacccacgctccaacacacacacacacacacacacacacacacacacacacacacacacacacacacgcccctctactgctatgtggcttcaaccagcctcacagccacacgggggaagcagagagtcaagaatgcaaagaggccgcttccctaagaggcttggaggagctgggctctatcccacacccacccccaccccacccccacccagcctccagaagctggaaccatttctcccgcaggcctgagttcctaaggaaaccaccctaccggggtggaagggagggtcagggaagaaacccactcttgctctacgaggagcaagtgcctgccccctcccagcagccagccctgccaaagttgcattatctttggccaaggctgggcctgacggttatgatttcagccctgggcctgcaggagaggctgagaccagcccacccagccagtggtcgagcactgccccgccgccaaagtctgcagaatgtgagatgaggttctcaaggtcacaggccccagtcccagcctgggggctggcagaggcccccatatactctgctacagctcctatcatgaaaaataaaatgtttgtctttgcaaaacagt

SEQ ID NO: 444550 - DNA, 510 bp, Homo sapiens
gttggcctcaaactgtgatcacccacacacccactttctgttgggtggcggctctaagaggagctccactggattcctgaacaggagactcaccccctcccctggccctgggcagagggagaacctgggccctgggtcagtggccccagcgcagtgtctgcctcccacaggctgccacaccctgtacctgagctcagtgagcgtggagaccctgactggagccctggccgtgcagaaagccatctccaccacctttgagagggacatcctccccacgcccaccgtggtccacttcaaagtcacagagcagggcatcactctgactgatgtccagaggaaggtgtttttccggcgccattacccactcaccaccctccgcttctgtggtatggaccctgagcaacggaagtggcagaagtactgcaaaccctcctggtaaggccttcctgtctcagggccccaaacccaacatggggagggaactgcagaaggaaagaggcaccattctga

SEQ ID NO: 444551 - DNA, 515 bp, Homo sapiens
ttactccgttcccactcttggacaccagatcctgggagctcctggttagcaagtgagatctctgggatgtcagtgaggctggttgaagaccagaggtaaactgcagaggtcaccacccccaccatgtcccaggtgatgtccagcccactgctggcaggaggccatgctgtcagcttggcgccttgtgatgagcccaggaggaccctgcacccagcacccagccccagcctgccaccccagtgttcttactacaccacggaaggctggggagcccaggccctgatggcccccgtgccctgcatggggccccctggccgactccagcaagccccacaggtggaggccaaagccacctgcttcctgccgtcccctggtgagaaggccttggggaccccagaggaccttgactcctacattgacttctcactggagagcctgggggctggcagaggcccccatatactctgctacagctcctatcatgaaaaataaaatgtttgtctttgcaaaacagt

SEQ ID NO: 444552 - DNA, 3417 bp, Homo sapiens
agcgtaggttcagcccatctgcagggctcctgggagtcatgggggcctgaagggatcctgatccgacagctcagtcagaacggcctggctgggaaggcagacggaatgtgggccagcctatgcccaaagcctgcaggggtcagctcattggctactttaagtgaccaaagaccctaccatccaaggacatttctgtatccttaccatcccttgaggattaggtgggcatgcactttgctgtgggctgtagggggtggggtatgcagtgttctatttggcctttaaagccatgggaacccagatcaccagatccggagcctgactctagcccctgagccacctgttgccctaacaccctgtctgactctctcccgctgcagcagccagtccctcctgcactccagcaactccagccatcagtcatcttccagatccttggaaagtccagccaactcttcctccagcctccacagccttggctcagtgtccctgtgtacaagacccagtgacttccaggctcccagaaaccccaccctaaccatgggccaacccagaacaccccactctccaccactggccaaagaacatgccagcagctgccccccatccatcaccaactccatggtggacatacccattgtgctgatcaacggctgcccagaaccagggtcttctccaccccagcggaccccaggacaccagaactccgttcaacctggagctgcttctcccagcaacccctgtccagccaccaggagcaacagccagaccctgtcagatgccccctttaccacatgcccagagggtcccgccagggacatgcagcccaccatgaagttcgtgatggacacatctaaatactggtttaagccaaacatcacccgagagcaagcaatcgagctgctgaggaaggaggagccaggggcttttgtcataagggacagctcttcataccgaggctccttcggcctggccctgaaggtgcaggaggttcccgcgtctgctcagagtcgaccaggtgaggacagcaatgacctcatccgacacttcctcatcgagtcgtctgccaaaggagtgcatctcaaaggagcagatgaggagccctactttgggagcctctctgccttcgtgtgccagcattccatcatggccctggccctgccctgcaaactcaccatcccacagagagaactgggaggtgcagatggggcctcggactctacagacagcccagcctcctgccagaagaaatctgcgggctgccacaccctgtacctgagctcagtgagcgtggagaccctgactggagccctggccgtgcagaaagccatctccaccacctttgagagggacatcctccccacgcccaccgtggtccacttcaaagtcacagagcagggcatcactctgactgatgtccagaggaaggtgtttttccggcgccattacccactcaccaccctccgcttctgtggtatggaccctgagcaacggaagtggcagaagtactgcaaaccctcctggatctttgggtttgtggccaagagccagacagagcctcaggagaacgtatgccacctctttgcggagtatgacatggtccagccagcctcgcaggtcatcggcctggtgactgctctgctgcaggacgcagaaaggatgtaggggagagactgcctgtgcacctaaccaacacctccaggggctcgctaaggagcccccctccaccccctgaatgggtgtggcttgtggccatattgacagaccaatctatgggactagggggattggcatcaagttgacacccttgaacctgctatggccttcagcagtcaccatcatccagaccccccgggcctcagtttcctcaatcatagaagaagaccaatagacaagatcagctgttcttagatgctggtgggcatttgaacatgctcctccatgattctgaagcatgcacacctctgaagacccctgcatgaaaataacctccaaggaccctctgaccccatcgacctgggccctgcccacacaacagtctgagcaagagacctgcagcccctgtttcgtggcagacagcaggtgcctggcggtgacccacggggctcctggcttgcagctggtgatggtcaagaactgactacaaaacaggaatggatagactctatttccttccatatctgttcctctgttccttttcccactttctgggtggctttttgggtccacccagccaggatgctgcaggccaagctgggtgtggtatttagggcagctcagcagggggaacttgtccccatggtcagaggagacccagctgtcctgcacccccttgcagatgagtatcaccccatcttttctttccacttggtttttatttttatttttttttgagacagagtctcactgtcacccaggctgaactgcagtggtgtgatctaggctcactgcaacctccacctcccaggttcaagcaattatcctgcctcaggctcccaagtagctgggattacaggcatgtgcaactcacccagctaattttgtatttttagtagagacagggtttcaccatgttggccaggctggtcttgaactcctgaccgcaggtaatccacctgcttcggcctcccaaagtgctgggattacaggcgcaagccacccagcccagcttctttccattccttgataggcgagtattccaaagctggtatcgtagctgccctaatgttgcatattaggcggcgggggcagagataagggccatctctctgtgattctgcctcagctcctgtcttgctgagccctcccccaacccacgctccaacacacacacacacacacacacacacacacacacacacacacacacacacacacgcccctctactgctatgtggcttcaaccagcctcacagccacacgggggaagcagagagtcaagaatgcaaagaggccgcttccctaagaggcttggaggagctgggctctatcccacacccacccccaccccacccccacccagcctccagaagctggaaccatttctcccgcaggcctgagttcctaaggaaaccaccctaccggggtggaagggagggtcagggaagaaacccactcttgctctacgaggagcaagtgcctgccccctcccagcagccagccctgccaaagttgcattatctttggccaaggctgggcctgacggttatgatttcagccctgggcctgcaggagaggctgagaccagcccacccagccagtggtcgagcactgccccgccgccaaagtctgcagaatgtgagatgaggttctcaaggtcacaggccccagtcccagcctgggggctggcagaggcccccatatactctgctacagctcctatcatgaaaaataaaatgtttgtctttgcaaaacagt

SEQ ID NO: 444553 - DNA, 3331 bp, Homo sapiens
gcgcacatttacttagcctagtgatattcccatcctgctttggtcccataatatcaccaactatacccccagatcttatcaaattctgcaaaatattcctaaaacaaaattcattttaattccatagactactagaacattaaagaccctcagaagctgtttagtccacttggtcccctctgagcttcagttatcccatatcagagtcaagatccaggctcccgcctcccaggggcatgtttttctgcccagatctgctattttcctctccttcacgttttctgccattttcttttccaagctgaatattcccgtaaggaattcttaggattatgaagacgaaggagaatgtaatatcaaacatgatgcatttgagaattccttgtttatctcttatttcagtcctcaccaggggactcaacagtagatttaagaaaccatttctccttaaactgaggttgtatctattcattccttattcattaccaaggatacaagggcacttctgagttctagatgcaccaaaccctggcatccttctgtttgattttccctcatcgtaggcagtttggagatacaatggggttagggtctgggatggtggttgaatgaaaccttggggcaatagagtagggaagggtctccagccttctctggtgaacatccctcagctcccgtctgtccagcctacagggtcccccttctctgtctgtctccaggtcccgccagggacatgcagcccaccatgaagttcgtgatggacacatctaaatactggtttaagccaaacatcacccgagagcaagcaatcgagctgctgaggaaggaggagccaggggcttttgtcataagggacagctcttcataccgaggctccttcggcctggccctgaaggtgcaggaggttcccgcgtctgctcagagtcgaccaggtgaggacagcaatgacctcatccgacacttcctcatcgagtcgtctgccaaaggagtgcatctcaaaggagcagatgaggagccctactttgggagcctctctgccttcgtgtgccagcattccatcatggccctggccctgccctgcaaactcaccatcccacagagagaactgggaggtgcagatggggcctcggactctacagacagcccagcctcctgccagaagaaatctgcgggctgccacaccctgtacctgagctcagtgagcgtggagaccctgactggagccctggccgtgcagaaagccatctccaccacctttgagagggacatcctccccacgcccaccgtggtccacttcaaagtcacagagcagggcatcactctgactgatgtccagaggaaggtgtttttccggcgccattacccactcaccaccctccgcttctgtggtatggaccctgagcaacggaagtggcagaagtactgcaaaccctcctggatctttgggtttgtggccaagagccagacagagcctcaggagaacgtatgccacctctttgcggagtatgacatggtccagccagcctcgcaggtcatcggcctggtgactgctctgctgcaggacgcagaaaggatgtaggggagagactgcctgtgcacctaaccaacacctccaggggctcgctaaggagcccccctccaccccctgaatgggtgtggcttgtggccatattgacagaccaatctatgggactagggggattggcatcaagttgacacccttgaacctgctatggccttcagcagtcaccatcatccagaccccccgggcctcagtttcctcaatcatagaagaagaccaatagacaagatcagctgttcttagatgctggtgggcatttgaacatgctcctccatgattctgaagcatgcacacctctgaagacccctgcatgaaaataacctccaaggaccctctgaccccatcgacctgggccctgcccacacaacagtctgagcaagagacctgcagcccctgtttcgtggcagacagcaggtgcctggcggtgacccacggggctcctggcttgcagctggtgatggtcaagaactgactacaaaacaggaatggatagactctatttccttccatatctgttcctctgttccttttcccactttctgggtggctttttgggtccacccagccaggatgctgcaggccaagctgggtgtggtatttagggcagctcagcagggggaacttgtccccatggtcagaggagacccagctgtcctgcacccccttgcagatgagtatcaccccatcttttctttccacttggtttttatttttatttttttttgagacagagtctcactgtcacccaggctgaactgcagtggtgtgatctaggctcactgcaacctccacctcccaggttcaagcaattatcctgcctcaggctcccaagtagctgggattacaggcatgtgcaactcacccagctaattttgtatttttagtagagacagggtttcaccatgttggccaggctggtcttgaactcctgaccgcaggtaatccacctgcttcggcctcccaaagtgctgggattacaggcgcaagccacccagcccagcttctttccattccttgataggcgagtattccaaagctggtatcgtagctgccctaatgttgcatattaggcggcgggggcagagataagggccatctctctgtgattctgcctcagctcctgtcttgctgagccctcccccaacccacgctccaacacacacacacacacacacacacacacacacacacacacacacacacacacacgcccctctactgctatgtggcttcaaccagcctcacagccacacgggggaagcagagagtcaagaatgcaaagaggccgcttccctaagaggcttggaggagctgggctctatcccacacccacccccaccccacccccacccagcctccagaagctggaaccatttctcccgcaggcctgagttcctaaggaaaccaccctaccggggtggaagggagggtcagggaagaaacccactcttgctctacgaggagcaagtgcctgccccctcccagcagccagccctgccaaagttgcattatctttggccaaggctgggcctgacggttatgatttcagccctgggcctgcaggagaggctgagaccagcccacccagccagtggtcgagcactgccccgccgccaaagtctgcagaatgtgagatgaggttctcaaggtcacaggccccagtcccagcctgggggctggcagaggcccccatatactctgctacagctcctatcatgaaaaataaaatgtttgtctttgcaaaacagt

SEQ ID NO: 444554 - DNA, 1773 bp, Homo sapiens
ttactccgttcccactcttggacaccagatcctgggagctcctggttagcaagtgagatctctgggatgtcagtgaggctggttgaagaccagaggtaaactgcagaggtcaccacccccaccatgtcccaggtgatgtccagcccactgctggcaggaggccatgctgtcagcttggcgccttgtgatgagcccaggaggaccctgcacccagcacccagccccagcctgccaccccagtgttcttactacaccacggaaggctggggagcccaggccctgatggcccccgtgccctgcatggggccccctggccgactccagcaagccccacaggtggaggccaaagccacctgcttcctgccgtcccctggtgagaaggccttggggaccccagaggaccttgactcctacattgacttctcactggagagcctcaatcagatgatcctggaactggaccccaccttccagctgcttcccccagggactgggggctcccaggctgagctggcccagagcaccatgtcaatgagaaagaaggaggaatctgaagccttggacataaagtacatcgaggtgacctccgccagatcaaggtgccacgatggcccccagcactgctccagcccctctgtcaccccgcccttcggctcccttcgcagtggtggcctcctcctttccagagacgtcccccgagagacacgaagcagcagtgagagcctcatcttctctgggaaccagggcagggggcaccagcgccctctgcccccctcagagggtctctcccctcgacccccaaattcccccagcatctcaatcccttgcatggggagcaaggcctcgagcccccatggtttgggctccccgctggtggcttctccaagactggagaagcggctgggaggcctggccccacagcggggcagcaggatctctgtgctgtcagccagcccagtgtctgatgtcagctatatgtttggaagcagccagtccctcctgcactccagcaactccagccatcagtcatcttccagatccttggaaagtccagccaactcttcctccagcctccacagccttggctcagtgtccctgtgtacaagacccagtgacttccaggctcccagaaaccccaccctaaccatgggccaacccagaacaccccactctccaccactggccaaagaacatgccagcagctgccccccatccatcaccaactccatggtggacatacccattgtgctgatcaacggctgcccagaaccagggtcttctccaccccagcggaccccaggacaccagaactccgttcaacctggagctgcttctcccagcaacccctgtccagccaccaggagcaacagccagaccctgtcagatgccccctttaccacatgcccagagggtcccgccagggacatgcagcccaccatgaagttcgtgatggacacatctaaatactggtttaagccaaacatcacccgagagcaagcaatcgagctgctgaggaaggaggagccaggggcttttgtcataagggacagctcttcataccgaggctccttcggcctggccctgaaggtgcaggaggttcccgcgtctgctcagagtcgaccaggtatgcgtctgtctctgtgctcactcaaggcctcactgaggcagcggggtgtggtaggttccagtcctggctctggcactagctttcagggtgacatggcgccagtcttataacagctcctaggagaagcgtccacccgtcggtggagc

SEQ ID NO: 444555 - DNA, 1178 bp, Homo sapiens
ttactccgttcccactcttggacaccagatcctgggagctcctggttagcaagtgagatctctgggatgtcagtgaggctggttgaagaccagaggtaaactgcagaggtcaccacccccaccatgtcccaggtgatgtccagcccactgctggcaggaggccatgctgtcagcttggcgccttgtgatgagcccaggaggaccctgcacccagcacccagccccagcctgccaccccagtgttcttactacaccacggaaggctggggagcccaggccctgatggcccccgtgccctgcatggggccccctggccgactccagcaagccccacaggtggaggccaaagccacctgcttcctgccgtcccctggtgagaaggccttggggaccccagaggaccttgactcctacattgacttctcactggagagcctcaatcagatgatcctggaactggaccccaccttccagctgcttcccccagggactgggggctcccaggctgagctggcccagagcaccatgtcaatgagaaagaaggaggaatctgaagccttggacataaagtacatcgaggtgacctccgccagatcaaggtgccacgatggcccccagcactgctccagcccctctgtcaccccgcccttcggctcccttcgcagtggtggcctcctcctttccagagacgtcccccgagagacacgaagcagcagtgagagcctcatcttctctgggaaccagggcagggggcaccagcgccctctgcccccctcagagggtctctcccctcgacccccaaattcccccagcatctcaatcccttgcatggggagcaaggcctcgagcccccatggtttgggctccccgctggtggcttctccaagactggagaagcggctgggaggcctggccccacagcggggcagcaggatctctgtgctgtcagccagcccagtgtctgatgtcagctatatgtttggaagcagccagtccctcctgcactccagcaactccagccatcagtcatcttccagatccttggaaatctgcagaatgtgagatgaggttctcaaggtcacaggccccagtcccagcctgggggctggcagaggcccccatatactctgctacagctcctatcatgaaaaataaaatgtttgtctttgcaaaacagt

SEQ ID NO: 444556 - DNA, 426 bp, Homo sapiens
gagctcggtacccgacgctctctctgtgggggacttcctggggacaaaaggtgactctgtaacatctgctctgtgaagaccctacggggctggggacagggtgctccacccggtggggcggtgtccatctctgactcaaggattgttccagcaatcgagctgctgaggaaggaggagccaggggcttttgtcataagggacagctcttcataccgaggctccttcggcctggccctgaaggtgcaggaggttcccgcgtctgctcagagtcgaccaggtatgcgtctgtctctgtgctcactcaaggcctcactgaggcagcggggtgtggtaggttccagtcctggctctggcactagctttcagggtgacatggcgccagtcttataacagctcctaggagaagcgtccacccgtcggtggagc

SEQ ID NO: 444557 - DNA, 351 bp, Homo sapiens
gtccagggccccgctgcccaccaaggcgtcctgccgactctgggcctgggatcccagagggagcctgtgaacctcaaggggtcagggtgacagaatgagggtagggtggggcatggtggggtggggacgcagctggccagtcctgctgctcctccagggtcctgtggcatggagcgaagcctcattactcggtatcatgttcttttcctacaggtggcagaagtactgcaaaccctcctggtaaggccttcctgtctcagggccccaaacccaacatggggagggaactgcagaaggaaagaggcaccattctgactttaatagtccaaagtgttgatgagggcacaggcc

SEQ ID NO: 444558 - DNA, 631 bp, Homo sapiens
ttactccgttcccactcttggacaccagatcctgggagctcctggttagcaagtgagatctctgggatgtcagtgaggctggttgaagaccagaggtaaactgcagaggtcaccacccccaccatgtcccaggtgatgtccagcccactgctggcaggaggccatgctgtcagcttggcgccttgtgatgagcccaggaggaccctgcacccagcacccagccccagcctgccaccccagtgttcttactacaccacggaaggctggggagcccaggccctgatggcccccgtgccctgcatggggccccctggccgactccagcaagccccacaggtggaggccaaagccacctgcttcctgccgtcccctggtgagaaggccttggggaccccagaggaccttgactcctacattgacttctcactggagagcctcaatcagatgatcctggaactggaccccaccttccagctgcttcccccagggactgggggctcccaggctgagctggcccagagcaccatgtcaatgagaaagaaggaggaatctgaagccttggacattgcgcccatttttcgcaagctattcccactcctagctccatcatgtattcatcaaagccttcgct

SEQ ID NO: 444559 - DNA, 4023 bp, Homo sapiens
ttactccgttcccactcttggacaccagatcctgggagctcctggttagcaagtgagatctctgggatgtcagtgaggctggttgaagaccagaggtaaactgcagaggtcaccacccccaccatgtcccaggtgatgtccagcccactgctggcaggaggccatgctgtcagcttggcgccttgtgatgagcccaggaggaccctgcacccagcacccagccccagcctgccaccccagtgttcttactacaccacggaaggctggggagcccaggccctgatggcccccgtgccctgcatggggccccctggccgactccagcaagccccacaggtggaggccaaagccacctgcttcctgccgtcccctggtgagaaggccttggggaccccagaggaccttgactcctacattgacttctcactggagagcctcaatcagatgatcctggaactggaccccaccttccagctgcttcccccagggactgggggctcccaggctgagctggcccagagcaccatgtcaatgagaaagaaggaggaatctgaagccttggacataaagtacatcgaggtgacctccgccagatcaaggtgccacgatggcccccagcactgctccagcccctctgtcaccccgcccttcggctcccttcgcagtggtggcctcctcctttccagagacgtcccccgagagacacgaagcagcagtgagagcctcatcttctctgggaaccagggcagggggcaccagcgccctctgcccccctcagagggtctctcccctcgacccccaaattcccccagcatctcaatcccttgcatggggagcaaggcctcgagcccccatggtttgggctccccgctggtggcttctccaagactggagaagcggctgggaggcctggccccacagcggggcagcaggatctctgtgctgtcagccagcccagtgtctgatgtcagctatatgtttggaagcagccagtccctcctgcactccagcaactccagccatcagtcatcttccagatccttggaaagtccagccaactcttcctccagcctccacagccttggctcagtgtccctgtgtacaagacccagtgacttccaggctcccagaaaccccaccctaaccatgggccaacccagaacaccccactctccaccactggccaaagaacatgccagcagctgccccccatccatcaccaactccatggtggacatacccattgtgctgatcaacggctgcccagaaccagggtcttctccaccccagcggaccccaggacaccagaactccgttcaacctggagctgcttctcccagcaacccctgtccagccaccaggagcaacagccagaccctgtcagatgccccctttaccacatgcccagagggtcccgccagggacatgcagcccaccatgaagttcgtgatggacacatctaaatactggtttaagccaaacatcacccgagagcaagcaatcgagctgctgaggaaggaggagccaggggcttttgtcataagggacagctcttcataccgaggctccttcggcctggccctgaaggtgcaggaggttcccgcgtctgctcagagtcgaccaggtgaggacagcaatgacctcatccgacacttcctcatcgagtcgtctgccaaaggagtgcatctcaaaggagcagatgaggagccctactttgggagcctctctgccttcgtgtgccagcattccatcatggccctggccctgccctgcaaactcaccatcccacagagagaactgggaggtgcagatggggcctcggactctacagacagcccagcctcctgccagaagaaatctgcgggctgccacaccctgtacctgagctcagtgagcgtggagaccctgactggagccctggccgtgcagaaagccatctccaccacctttgagagggacatcctccccacgcccaccgtggtccacttcaaagtcacagagcagggcatcactctgactgatgtccagaggaaggtgtttttccggcgccattacccactcaccaccctccgcttctgtggtatggaccctgagcaacggaagtggcagaagtactgcaaaccctcctggatctttgggtttgtggccaagagccagacagagcctcaggagaacgtatgccacctctttgcggagtatgacatggtccagccagcctcgcaggtcatcggcctggtgactgctctgctgcaggacgcagaaaggatgtaggggagagactgcctgtgcacctaaccaacacctccaggggctcgctaaggagcccccctccaccccctgaatgggtgtggcttgtggccatattgacagaccaatctatgggactagggggattggcatcaagttgacacccttgaacctgctatggccttcagcagtcaccatcatccagaccccccgggcctcagtttcctcaatcatagaagaagaccaatagacaagatcagctgttcttagatgctggtgggcatttgaacatgctcctccatgattctgaagcatgcacacctctgaagacccctgcatgaaaataacctccaaggaccctctgaccccatcgacctgggccctgcccacacaacagtctgagcaagagacctgcagcccctgtttcgtggcagacagcaggtgcctggcggtgacccacggggctcctggcttgcagctggtgatggtcaagaactgactacaaaacaggaatggatagactctatttccttccatatctgttcctctgttccttttcccactttctgggtggctttttgggtccacccagccaggatgctgcaggccaagctgggtgtggtatttagggcagctcagcagggggaacttgtccccatggtcagaggagacccagctgtcctgcacccccttgcagatgagtatcaccccatcttttctttccacttggtttttatttttatttttttttgagacagagtctcactgtcacccaggctgaactgcagtggtgtgatctaggctcactgcaacctccacctcccaggttcaagcaattatcctgcctcaggctcccaagtagctgggattacaggcatgtgcaactcacccagctaattttgtatttttagtagagacagggtttcaccatgttggccaggctggtcttgaactcctgaccgcaggtaatccacctgcttcggcctcccaaagtgctgggattacaggcgcaagccacccagcccagcttctttccattccttgataggcgagtattccaaagctggtatcgtagctgccctaatgttgcatattaggcggcgggggcagagataagggccatctctctgtgattctgcctcagctcctgtcttgctgagccctcccccaacccacgctccaacacacacacacacacacacacacacacacacacacacacacacacacacacacgcccctctactgctatgtggcttcaaccagcctcacagccacacgggggaagcagagagtcaagaatgcaaagaggccgcttccctaagaggcttggaggagctgggctctatcccacacccacccccaccccacccccacccagcctccagaagctggaaccatttctcccgcaggcctgagttcctaaggaaaccaccctaccggggtggaagggagggtcagggaagaaacccactcttgctctacgaggagcaagtgcctgccccctcccagcagccagccctgccaaagttgcattatctttggccaaggctgggcctgacggttatgatttcagccctgggcctgcaggagaggctgagaccagcccacccagccagtggtcgagcactgccccgccgccaaagtctgcagaatgtgagatgaggttctcaaggtcacaggccccagtcccagcctgggggctggcagaggcccccatatactctgctacagctcctatcatgaaaaataaaatgtttgtctttgcaaaacagt

SEQ ID NO: 444560 - DNA, 3257 bp, Homo sapiens
cgtcgttccttacgtcaaaatggacatagagtcaagatagacatgacaatttgtcagagtttcagatagaaaatgaaaaacaagctaagacaagtattggagaagtatgaagatagaaaaatataagccaaaaattggataaatagcactgaaaaaatgaggaaattattggtaaccaatttattttaaaagcccatcaatttaatttctggtggtgcagaagttagaaggtaaaggagatgagctcatctcccttaccgtcatcttccagatccttggaaagtccagccaactcttcctccagcctccacagccttggctcagtgtccctgtgtacaagacccagtgacttccaggctcccagaaaccccaccctaaccatgggccaacccagaacaccccactctccaccactggccaaagaacatgccagcagctgccccccatccatcaccaactccatggtggacatacccattgtgctgatcaacggctgcccagaaccagggtcttctccaccccagcggaccccaggacaccagaactccgttcaacctggagctgcttctcccagcaacccctgtccagccaccaggagcaacagccagaccctgtcagatgccccctttaccacatgcccagagggtcccgccagggacatgcagcccaccatgaagttcgtgatggacacatctaaatactggtttaagccaaacatcacccgagagcaagcaatcgagctgctgaggaaggaggagccaggggcttttgtcataagggacagctcttcataccgaggctccttcggcctggccctgaaggtgcaggaggttcccgcgtctgctcagagtcgaccaggtgaggacagcaatgacctcatccgacacttcctcatcgagtcgtctgccaaaggagtgcatctcaaaggagcagatgaggagccctactttgggagcctctctgccttcgtgtgccagcattccatcatggccctggccctgccctgcaaactcaccatcccacagagagaactgggaggtgcagatggggcctcggactctacagacagcccagcctcctgccagaagaaatctgcgggctgccacaccctgtacctgagctcagtgagcgtggagaccctgactggagccctggccgtgcagaaagccatctccaccacctttgagagggacatcctccccacgcccaccgtggtccacttcaaagtcacagagcagggcatcactctgactgatgtccagaggaaggtgtttttccggcgccattacccactcaccaccctccgcttctgtggtatggaccctgagcaacggaagtggcagaagtactgcaaaccctcctggatctttgggtttgtggccaagagccagacagagcctcaggagaacgtatgccacctctttgcggagtatgacatggtccagccagcctcgcaggtcatcggcctggtgactgctctgctgcaggacgcagaaaggatgtaggggagagactgcctgtgcacctaaccaacacctccaggggctcgctaaggagcccccctccaccccctgaatgggtgtggcttgtggccatattgacagaccaatctatgggactagggggattggcatcaagttgacacccttgaacctgctatggccttcagcagtcaccatcatccagaccccccgggcctcagtttcctcaatcatagaagaagaccaatagacaagatcagctgttcttagatgctggtgggcatttgaacatgctcctccatgattctgaagcatgcacacctctgaagacccctgcatgaaaataacctccaaggaccctctgaccccatcgacctgggccctgcccacacaacagtctgagcaagagacctgcagcccctgtttcgtggcagacagcaggtgcctggcggtgacccacggggctcctggcttgcagctggtgatggtcaagaactgactacaaaacaggaatggatagactctatttccttccatatctgttcctctgttccttttcccactttctgggtggctttttgggtccacccagccaggatgctgcaggccaagctgggtgtggtatttagggcagctcagcagggggaacttgtccccatggtcagaggagacccagctgtcctgcacccccttgcagatgagtatcaccccatcttttctttccacttggtttttatttttatttttttttgagacagagtctcactgtcacccaggctgaactgcagtggtgtgatctaggctcactgcaacctccacctcccaggttcaagcaattatcctgcctcaggctcccaagtagctgggattacaggcatgtgcaactcacccagctaattttgtatttttagtagagacagggtttcaccatgttggccaggctggtcttgaactcctgaccgcaggtaatccacctgcttcggcctcccaaagtgctgggattacaggcgcaagccacccagcccagcttctttccattccttgataggcgagtattccaaagctggtatcgtagctgccctaatgttgcatattaggcggcgggggcagagataagggccatctctctgtgattctgcctcagctcctgtcttgctgagccctcccccaacccacgctccaacacacacacacacacacacacacacacacacacacacacacacacacacacacgcccctctactgctatgtggcttcaaccagcctcacagccacacgggggaagcagagagtcaagaatgcaaagaggccgcttccctaagaggcttggaggagctgggctctatcccacacccacccccaccccacccccacccagcctccagaagctggaaccatttctcccgcaggcctgagttcctaaggaaaccaccctaccggggtggaagggagggtcagggaagaaacccactcttgctctacgaggagcaagtgcctgccccctcccagcagccagccctgccaaagttgcattatctttggccaaggctgggcctgacggttatgatttcagccctgggcctgcaggagaggctgagaccagcccacccagccagtggtcgagcactgccccgccgccaaagtctgcagaatgtgagatgaggttctcaaggtcacaggccccagtcccagcctgggggctggcagaggcccccatatactctgctacagctcctatcatgaaaaataaaatgtttgtctttgcaaaacagt

SEQ ID NO: 444561 - DNA, 2676 bp, Homo sapiens
gagctcggtacccgacgctctctctgtgggggacttcctggggacaaaaggtgactctgtaacatctgctctgtgaagaccctacggggctggggacagggtgctccacccggtggggcggtgtccatctctgactcaaggattgttccagcaatcgagctgctgaggaaggaggagccaggggcttttgtcataagggacagctcttcataccgaggctccttcggcctggccctgaaggtgcaggaggttcccgcgtctgctcagagtcgaccaggtgaggacagcaatgacctcatccgacacttcctcatcgagtcgtctgccaaaggagtgcatctcaaaggagcagatgaggagccctactttgggagcctctctgccttcgtgtgccagcattccatcatggccctggccctgccctgcaaactcaccatcccacagagagaactgggaggtgcagatggggcctcggactctacagacagcccagcctcctgccagaagaaatctgcgggctgccacaccctgtacctgagctcagtgagcgtggagaccctgactggagccctggccgtgcagaaagccatctccaccacctttgagagggacatcctccccacgcccaccgtggtccacttcaaagtcacagagcagggcatcactctgactgatgtccagaggaaggtgtttttccggcgccattacccactcaccaccctccgcttctgtggtatggaccctgagcaacggaagtggcagaagtactgcaaaccctcctggatctttgggtttgtggccaagagccagacagagcctcaggagaacgtatgccacctctttgcggagtatgacatggtccagccagcctcgcaggtcatcggcctggtgactgctctgctgcaggacgcagaaaggatgtaggggagagactgcctgtgcacctaaccaacacctccaggggctcgctaaggagcccccctccaccccctgaatgggtgtggcttgtggccatattgacagaccaatctatgggactagggggattggcatcaagttgacacccttgaacctgctatggccttcagcagtcaccatcatccagaccccccgggcctcagtttcctcaatcatagaagaagaccaatagacaagatcagctgttcttagatgctggtgggcatttgaacatgctcctccatgattctgaagcatgcacacctctgaagacccctgcatgaaaataacctccaaggaccctctgaccccatcgacctgggccctgcccacacaacagtctgagcaagagacctgcagcccctgtttcgtggcagacagcaggtgcctggcggtgacccacggggctcctggcttgcagctggtgatggtcaagaactgactacaaaacaggaatggatagactctatttccttccatatctgttcctctgttccttttcccactttctgggtggctttttgggtccacccagccaggatgctgcaggccaagctgggtgtggtatttagggcagctcagcagggggaacttgtccccatggtcagaggagacccagctgtcctgcacccccttgcagatgagtatcaccccatcttttctttccacttggtttttatttttatttttttttgagacagagtctcactgtcacccaggctgaactgcagtggtgtgatctaggctcactgcaacctccacctcccaggttcaagcaattatcctgcctcaggctcccaagtagctgggattacaggcatgtgcaactcacccagctaattttgtatttttagtagagacagggtttcaccatgttggccaggctggtcttgaactcctgaccgcaggtaatccacctgcttcggcctcccaaagtgctgggattacaggcgcaagccacccagcccagcttctttccattccttgataggcgagtattccaaagctggtatcgtagctgccctaatgttgcatattaggcggcgggggcagagataagggccatctctctgtgattctgcctcagctcctgtcttgctgagccctcccccaacccacgctccaacacacacacacacacacacacacacacacacacacacacacacacacacacacgcccctctactgctatgtggcttcaaccagcctcacagccacacgggggaagcagagagtcaagaatgcaaagaggccgcttccctaagaggcttggaggagctgggctctatcccacacccacccccaccccacccccacccagcctccagaagctggaaccatttctcccgcaggcctgagttcctaaggaaaccaccctaccggggtggaagggagggtcagggaagaaacccactcttgctctacgaggagcaagtgcctgccccctcccagcagccagccctgccaaagttgcattatctttggccaaggctgggcctgacggttatgatttcagccctgggcctgcaggagaggctgagaccagcccacccagccagtggtcgagcactgccccgccgccaaagtctgcagaatgtgagatgaggttctcaaggtcacaggccccagtcccagcctgggggctggcagaggcccccatatactctgctacagctcctatcatgaaaaataaaatgtttgtctttgcaaaacagt

SEQ ID NO: 444562 - DNA, 1301 bp, Homo sapiens
ttactccgttcccactcttggacaccagatcctgggagctcctggttagcaagtgagatctctgggatgtcagtgaggctggttgaagaccagaggtaaactgcagaggtcaccacccccaccatgtcccaggtgatgtccagcccactgctggcaggaggccatgctgtcagcttggcgccttgtgatgagcccaggaggaccctgcacccagcacccagccccagcctgccaccccagtgttcttactacaccacggaaggctggggagcccaggccctgatggcccccgtgccctgcatggggccccctggccgactccagcaagccccacaggtggaggccaaagccacctgcttcctgccgtcccctggtgagaaggccttggggaccccagaggaccttgactcctacattgacttctcactggagagcctcaatcagatgatcctggaactggaccccaccttccagctgcttcccccagggactgggggctcccaggctgagctggcccagagcaccatgtcaatgagaaagaaggaggaatctgaagccttggacataaagtacatcgaggtgacctccgccagatcaaggtgccacgatggcccccagcactgctccagcccctctgtcaccccgcccttcggctcccttcgcagtggtggcctcctcctttccagagacgtcccccgagagacacgaagcagcagtgagagcctcatcttctctgggaaccagggcagggggcaccagcgccctctgcccccctcagagggtctctcccctcgacccccaaattcccccagcatctcaatcccttgcatggggagcaaggcctcgagcccccatggtttgggctccccgctggtggcttctccaagactggagaagcggctgggaggcctggccccacagcggggcagcaggatctctgtgctgtcagccagcccagtgtctgatgtcagctatatgtttggaaggtaggttctgtagcttctaacattgcacacacacacacaggcacacgcacgcatgcaccccctaaaatcactgaaagggaccctgctctgtctgagcaaaatctgggcatgcaccaaaaccagaagcaaatgtttgcttttacagcctttcagatctcaagctgtcctcaagcatttagaatacaattcaatataaaaagtcttgacttatagctaccttttggtaaaagagccgttgccttaatgaggctcatctatatcctttccagccctcatacaacccatctcaaggaaggtttttttaaaccccaaaac

SEQ ID NO: 444563 - DNA, 995 bp, Homo sapiens
tttttatttttttgttgtttgtttgttttggacagcgtctcgctctgtcgccaggctgttgtgcagtggcacaatctcagcttactgcaacctctgcctcccgggttcaagcgattctcctgcctccgcctcccaagtaactgggactacaggcacgcgccaccacgtccagctgatttttgtatttttggtagagacggtgtttcaccatgttggccaggatggtcttgatctcttaacctcgtgatccgccagcctcggcctctcaaagtgctgggattacaggtgtgagccactgagcccggccaattacccactattcttaaaggtcagcagtacttccccaaaggacaggaatgcaccccaaacagaatcttctaatttgcttatttaaaaaaagttttaaatagctcaaactgcaaagacttctaaaacaaagaccacttgtagcatatattaattaatccatgtagcccagagttttgtctagcaaaacccaagttcacacatttgaccacatgcacacgaacctcagccaacgcagccaacgctccccagaggctacttctgcagctaagcatctgtcctttcagctcctggcagttcctgccttttctcttgccaggcaaccagagctctaaagggatcttaatgcactaatgagaagccatgacaaccaagacctgcggtagctgcaaagcacaaacaccagtatccacttttactgagcacgcatgcaataagcaatgtgctaaggaatccaagtaaattaaaatcattcctctaacctaataactccataggcacctataacacaccataacttgaaactttctatcattctttatatttaagaacttattaaaaggcaggctttaccatgcaccactggtagtatagcttgcctcagctgttatagtaactatagaagtagggttattctcttgtttgtttcaatctagagtcataagagaccatcaaaaaaaaaaaaaccc

SEQ ID NO: 444564 - DNA, 684 bp, Homo sapiens
tcacagtcccgcctccttccgctgcgtgccggaccatggcgcaggggcagcgcaagtttcaggcgcacaaacccgcaaagagtaagacggcagcggcagcctctgaaaagaatcggggcccaagaaaaggcggtcgtgttatcgctcccaagaaggcgcgcgtcgtgcagcagcaaaagctcaagaagaacctagaagtcggaatccggaagaagatcgaacatgacgtggtgatgaaagccagcagcagcctgcccaagaagctggcactgctgaaggccccagccaagaagaaaggggcagctgccgccacctcctccaagacaccttcctgaggacgctggccccagtgcaggccaacatcccaccccctacctccatatgggaccttgcaagtcatcccacaggctgcactgtcaggaagaggaccctgtcccccagcactgggcttcacctagaacttcagtgggggccaagggtgctgagaacccagcaatgaccaggaagatacagtcactaacttcatctgtccccgtgccccttcccaggtcctgcctccacaggtttaacccagaacaataaacctggctttgtcatcccaaaaaaaaaatcctcgtgtctgacggggaatgttctctggaatccctgcaataaggggaggacccccttaaatgaataaaaaca

SEQ ID NO: 444565 - DNA, 487 bp, Homo sapiens
gacgagctaggagcgaggggatagagccaggggccgcgttaggagcgaaggatggagcccggggcgcagagagggaacctagaagtcggaatccggaagaagatcgaacatgacgtggtgatgaaagccagcagcagcctgcccaagaagctggcactgctgaaggccccagccaagaagaaaggggcagctgccgccacctcctccaagacaccttcctgaggacgctggccccagtgcaggccaacatcccaccccctacctccatatgggaccttgcaagtcatcccacaggctgcactgtcaggaagaggaccctgtcccccagcactgggcttcacctagaacttcagtgggggccaagggtgctgagaacccagcaatgaccaggaagatacagtcactaacttcatctgtccccgtgccccttcccaggtcctgcctccacaggtttaacccagaacaataaacctggctttgtcatccc

SEQ ID NO: 444566 - DNA, 189 bp, Homo sapiens
gacgagctaggagcgaggggatagagccaggggccgcgttaggagcgaaggatggagcccggggcgcagagagggaacccagcaatgaccaggaagatacagtcactaacttcatctgtccccgtgccccttcccaggtcctgcctccacaggtttaacccagaacaataaacctggctttgtcatccc

SEQ ID NO: 444567 - DNA, 942 bp, Homo sapiens
  misc_feature (616)..(616): n is a, c, g, or t
  misc_feature (634)..(634): n is a, c, g, or t
tcacagtcccgcctccttccgctgcgtgccggaccatggcgcaggggcagcgcaagtttcaggcgcacaaacccgcaaagagtaagacggcagcggcagcctctgaaaagaatcggggcccaagaaaaggcggtcgtgttatcgctcccaagaaggcgcgcgtcgtgcagcagcaaaagctcaagaagaacctagaagtcggaatccggaagaagatcgaacatgacgtggtgatgaaagccagcagcagcctgcccaagaagctggcactgctgaaggccccagccaagaagaaaggggcagctgccgccacctcctccaagacaccttcctgaggacgctggccccagtgcaggccaacatcccaccccctacctccatatgggaccttgcaagtcatcccacaggctgcactgtcaggaagaggaccctgtcccccagcactgggcttcacctagaacttcagtgggggccaagggtgctgagaacccagcaatgaccaggaagatacagtcactaacttcatctgtccccgtgccccttcccaggtcctgcctccacaggtttaacccagaacaataaacctggctttgtcatcccaaaaaaaaaaaaaaanaaaaaaaacaaaaaaaanaaaaaaaaaaaaaaaaaaaaaaacaaccacgataaacatcaacaaaacaacacaaccagcgggggggggggcggcaaaagaaaacataccaccgacgggagggggccacacaaaactgtagagacacaaagaccagagttagatgaaacaacaaggccgcacaccacaaaagggaggacaatacaataaaccagcagccgcggggcgcggttacaacaagcgcgggggagacgaaaaccaacgctcagggcacatgataagaggaaaaaccaacatgggggggggaaaacaggacgacgacacgaagg

SEQ ID NO: 444568 - DNA, 506 bp, Homo sapiens
  misc_feature (33)..(33): n is a, c, g, or t
gcccgaggattatgaagcactgggcccaagaanaggcggtcgtgttatcgctcccaagaaggcgcgcgtcgtgcagcagcaaaagctcaagaagaacctagaagtcggaatccggaagaagatcgaacatgacgtggtgatgaaagccagcagcagcctgcccaagaagctggcactgctgaaggccccagccaagaagaaaggggcagctgccgccacctcctccaagacaccttcctgaggacgctggccccagtgcaggccaacatcccaccccctacctccatatgggaccttgcaagtcatcccacaggctgcactgtcaggaagaggaccctgtcccccagcactgggcttcacctagaacttcagtgggggccaagggtgctgagaacccagcaatgaccaggaagatacagtcactaacttcatctgtccccgtgccccttcccaggtcctgcctccacaggtttaacccagaacaataaacctggctttgtcatccc

SEQ ID NO: 444569 - DNA, 912 bp, Homo sapiens
tcacagtcccgcctccttccgctgcgtgccggaccatggcgcaggggcagcgcaagtttcaggcgcacaaacccgcaaagagtaagacggcagcggcagcctctgaaaagaatcggggcccaagaaaaggcggtcgtgttatcgctcccaagaaggcgcgcgtcgtgcagcagcaaaagctcaagaagaacctagaagtcggaatccggaagaagatcgaacatgacgtggtgatgaaagccagcagcagcctgcccaagaagctggcactgctgaaggccccagccaagaagaaaggggcagctgccgccacctcctccaagacaccttcctgaggacgctggccccagtgcaggccaacatcccaccccctacctccatatgggaccttgcaagtcatcccacaggctgcactgtcaggaagaggaccctgtcccccagcactgggcttcacctagaacttcagtgggggccaagggtgctgagaacccagcaatgaccaggaagatacagtcactaacttcatctgtccccgtgccccttcccaggtcctgcctccacaggtttaacccagaacaataaacctggctttgtcatccctccctcttgcagtcctgtgttcgggtgagcaggccaggtgagcccacaagtctccatgagtgacgtggcctggcgtgctccaccccaccccaccgcctttagcaaccatgtgcccaggggacagctgggcttctacacctctggccctgagcctgagagccgggaaagagtcttttctccatttaaccccgggtgactcactccctggccagtcctcacccctggggacacaaccagagtcaagctggacatcagtaggtcagatgccacctcacaggaccaaggtgccgattaaaccggaatacattcaga

SEQ ID NO: 444570 - DNA, 487 bp, Homo sapiens
ccaggaagagggtgactggtcaggccctctctcagccccaggtcacaatctgactgccccgtgcttctccctcagaacctagaagtcggaatccggaagaagatcgaacatgacgtggtgatgaaagccagcagcagcctgcccaagaagctggcactgctgaaggccccagccaagaagaaaggggcagctgccgccacctcctccaagacaccttcctgaggacgctggccccagtgcaggccaacatcccaccccctacctccatatgggaccttgcaagtcatcccacaggctgcactgtcaggaagaggaccctgtcccccagcactgggcttcacctagaacttcagtgggggccaagggtgctgagaacccagcaatgaccaggaagatacagtcactaacttcatctgtccccgtgccccttcccaggtcctgcctccacaggtttaacccagaacaataaacctggctttgtcatccc

SEQ ID NO: 444571 - DNA, 479 bp, Homo sapiens
ctgtaggccaacggtgcacgtgcagaaactcagccaagaatgtttaaagcggctggcaatcaagaagaacctagaagtcggaatccggaagaagatcgaacatgacgtggtgatgaaagccagcagcagcctgcccaagaagctggcactgctgaaggccccagccaagaagaaaggggcagctgccgccacctcctccaagacaccttcctgaggacgctggccccagtgcaggccaacatcccaccccctacctccatatgggaccttgcaagtcatcccacaggctgcactgtcaggaagaggaccctgtcccccagcactgggcttcacctagaacttcagtgggggccaagggtgctgagaacccagcaatgaccaggaagatacagtcactaacttcatctgtccccgtgccccttcccaggtcctgcctccacaggtttaacccagaacaataaacctggctttgtcatccc

SEQ ID NO: 444572 - DNA, 562 bp, Homo sapiens
tcacagtcccgcctccttccgctgcgtgccggaccatggcgcaggggcagcgcaagtttcaggcgcacaaacccgcaaagagtaagacggcagcggcagcctctgaaaagaatcggggcccaagaaaaggcggtcgtgttatcgctcccaagaaggcgcgcgtcgtgcagcagcaaaagctcaagaagaacctagaagtcggaatccggaagaagatcgaacatgacgtggtgatgaaagccagcagcagcctgcccaagaagctggcactgctgaaggccccagccaagaagaaaggggcagctgccgccacctcctccaagacaccttcctgaggacgctggcctacagcacatgccgtgttgtaggccagcgggacggcatccgagtgggtcatgcagtgctggccatcaatggcatggacgtgaatggcaggtacacggccgacgggaaagaggtgctggagtatctgggtaaccctgctaattacccggtgtccattcgatttggacggccccgcttcacttctaatgagaagcttacgctggactacagcacatgc

SEQ ID NO: 444573 - DNA, 600 bp, Homo sapiens
tcacagtcccgcctccttccgctgcgtgccggaccatggcgcaggggcagcgcaagtttcaggcgcacaaacccgcaaagagtaagacggcagcggcagcctctgaaaagaatcggggcccaagaaaaggcggtcgtgttatcgctcccaagaaggcgcgcgtcgtgcagcagcaaaagctcaagaagaacctagaagtcggaatccggaagaagatcgaacatgacgtggtgatgaaagccagcagcagcctgcccaagaagctggcactgctgaaggccccagccaagaagaaaggggcagctgccgccacctcctccaagacaccttcctgaggacgctggccccagtgcaggccaacatcccaccccctacctccatatgggaccttgcaagtcatcccacaggctgcactgtcaggaagaggaccctgtcccccagcactgggcttcacctagaacttcagtgggggccaagggtgctgagaacccagcaatgaccaggaagatacagtcactaacttcatctgtccccgtgccccttcccaggtcctgcctccacaggtttaacccagaacaataaacctggctttgtcatccc

SEQ ID NO: 444574 - DNA, 759 bp, Homo sapiens
  misc_feature (616)..(616): n is a, c, g, or t
  misc_feature (634)..(634): n is a, c, g, or t
tcacagtcccgcctccttccgctgcgtgccggaccatggcgcaggggcagcgcaagtttcaggcgcacaaacccgcaaagagtaagacggcagcggcagcctctgaaaagaatcggggcccaagaaaaggcggtcgtgttatcgctcccaagaaggcgcgcgtcgtgcagcagcaaaagctcaagaagaacctagaagtcggaatccggaagaagatcgaacatgacgtggtgatgaaagccagcagcagcctgcccaagaagctggcactgctgaaggccccagccaagaagaaaggggcagctgccgccacctcctccaagacaccttcctgaggacgctggccccagtgcaggccaacatcccaccccctacctccatatgggaccttgcaagtcatcccacaggctgcactgtcaggaagaggaccctgtcccccagcactgggcttcacctagaacttcagtgggggccaagggtgctgagaacccagcaatgaccaggaagatacagtcactaacttcatctgtccccgtgccccttcccaggtcctgcctccacaggtttaacccagaacaataaacctggctttgtcatcccaaaaaaaaaaaaaaanaaaaaaaacaaaaaaaanaaaaaaaaaaaaaaggggggggcgccaaataaatttccccgggggggccatttttcgttcccccttttttgtcacaagggggccctaaagggggggtataaaagaaggcgggcggtttaaaaagg

SEQ ID NO: 444575 - DNA, 677 bp, Homo sapiens
tcacagtcccgcctccttccgctgcgtgccggaccatggcgcaggggcagcgcaagtttcaggcgcacaaacccgcaaagagtaagacggcagcggcagcctctgaaaagaatcggggcccaagaaaaggcggtaaggagcggcccggggacttgggggcgaggtggacccccggcttcccggcctcacgtgagcacatctttccccaggtcgtgttatcgctcccaagaaggcgcgcgtcgtgcagcagcaaaagctcaagaagaacctagaagtcggaatccggaagaagatcgaacatgacgtggtgatgaaagccagcagcagcctgcccaagaagctggcactgctgaaggccccagccaagaagaaaggggcagctgccgccacctcctccaagacaccttcctgaggacgctggccccagtgcaggccaacatcccaccccctacctccatatgggaccttgcaagtcatcccacaggctgcactgtcaggaagaggaccctgtcccccagcactgggcttcacctagaacttcagtgggggccaagggtgctgagaacccagcaatgaccaggaagatacagtcactaacttcatctgtccccgtgccccttcccaggtcctgcctccacaggtttaacccagaacaataaacctggctttgtcatccc

SEQ ID NO: 444576 - DNA, 740 bp, Homo sapiens
tcacagtcccgcctccttccgctgcgtgccggaccatggcgcaggggcagcgcaagtttcaggcgcacaaacccgcaaagagtaagacggcagcggcagcctctgaaaagaatcggggcccaagaaaaggcggtcgtgttatcgctcccaagaaggcgcgcgtcgtgcagcagcaaaagctcaagaagaacctagaagtcggaatccggaagaagatcgaacatgacgtggtgatgaaagccagcagcagcctgcccaagaagctggcactgctgaaggccccagccaagaagaaaggggcagctgccgccacctcctccaagacaccttcctgaggacgctggccccagtgcaggccaacatcccaccccctacctccatatgggaccttgcaagtcatcccacaggctgcactgtcaggaagaggaccctgtcccccagcactgggcttcacctagaacttcagtgggggccaagggtgctgagaacccagcaatgaccaggaagatacagtcactaacttcatctgtccccgtgccccttcccaggtcctgcctccacaggtttaacccagaacaataaacctggctttgtcatcccatgacaaaaaacaaataaaaaaaaaatatgtgggcgacacgacaaaaaaagattaagaaccactggtgggccggggcctaggtacggcacgcgcaggggccaaagaaacggcaggcatggggggttcacaaaaaaaccgg

SEQ ID NO: 444577 - DNA, 743 bp, Homo sapiens
tcacagtcccgcctccttccgctgcgtgccggaccatggcgcaggggcagcgcaagtttcaggcgcacaaacccgcaaagagtaagacggcagcggcagcctctgaaaagaatcggggcccaagaaaaggcggtcgtgttatcgctcccaagaaggcgcgcgtcgtgcagcagcaaaagctcaagaagagacaggtttcactatgctgctcgggctggtcttgaactcctggcctcaaggcatcctcccgcctctgcctcccaaaatgctgggattacaggcgtgagccaccctatggttgtttttaagtgcaacatttatatgtagatggaacctagaagtcggaatccggaagaagatcgaacatgacgtggtgatgaaagccagcagcagcctgcccaagaagctggcactgctgaaggccccagccaagaagaaaggggcagctgccgccacctcctccaagacaccttcctgaggacgctggccccagtgcaggccaacatcccaccccctacctccatatgggaccttgcaagtcatcccacaggctgcactgtcaggaagaggaccctgtcccccagcactgggcttcacctagaacttcagtgggggccaagggtgctgagaacccagcaatgaccaggaagatacagtcactaacttcatctgtccccgtgccccttcccaggtcctgcctccacaggtttaacccagaacaataaacctggctttgtcatccc

SEQ ID NO: 444578 - DNA, 561 bp, Homo sapiens
tcacagtcccgcctccttccgctgcgtgccggaccatggcgcaggggcagcgcaagtttcaggcgcacaaacccgcaaagagtaagacggcagcggcagcctctgaaaagaatcggggcccaagaaaaggcggtcgtgttatcgctcccaagaaggcgcgcgtcgtgcagcagcaaaagctcaagaaggtggtgatgaaagccagcagcagcctgcccaagaagctggcactgctgaaggccccagccaagaagaaaggggcagctgccgccacctcctccaagacaccttcctgaggacgctggccccagtgcaggccaacatcccaccccctacctccatatgggaccttgcaagtcatcccacaggctgcactgtcaggaagaggaccctgtcccccagcactgggcttcacctagaacttcagtgggggccaagggtgctgagaacccagcaatgaccaggaagatacagtcactaacttcatctgtccccgtgccccttcccaggtcctgcctccacaggtttaacccagaacaataaacctggctttgtcatccc

SEQ ID NO: 444579 - DNA, 419 bp, Homo sapiens
cacacccggccccactttctgttcttgaaagcaggtcacaaggtcccagattcaaggggtggggaaatagatctcacctcttgatgggaagagctacaaaatattgtggccattcttgaaatccgctaccttcccccctccccgcctctgagcccacctactctgtgccaggcaccagggggaccaggactagaggttaagtgaaacacagtccttgatctcagagtatgcactgtctagttggaagagagctacagtacaatagttacaatacagtgtgagaagtgctatcacagaaggacagagaaagtgagattttaatacagaaaccagtcacctgactcttccagcaatatcaagaaagcctttgcagaaaaggtgatgtgcaggctacttcttgaaggatgactaggagtttt

SEQ ID NO: 444580 - DNA, 2577 bp, Homo sapiens
  misc_feature (1)..(1): n is a, c, g, or t
  misc_feature (5)..(5): n is a, c, g, or t
  misc_feature (7)..(8): n is a, c, g, or t
ngcananngcattgcgcagacgaccagcgggcgcctcggattccgcccccgggatggccccgcctcctcccgccccgcggcaaggcacgcacagggcagtgcgcgggtgggtgggtcctagcagcgcggcctgacgggaccaaggcggcgggagtctgcggtcgttccctcggctgtggaccgggcggcacgcacgcggtgcagggtaacatggcggatgcggaagtaattattttgccaaagaaacataagaagaaaaaggagcggaagtcattgccagaagaagatgtagccgaaatacaacacgctgaagaatttcttatcaaacctgaatccaaagttgctaagttggacacgtctcagtggccccttttgctaaagaattttgataagctgaatgtaaggacaacacactatacacctcttgcatgtggttcaaatcctctgaagagagagattggggactatatcaggacaggtttcattaatcttgacaagccctctaacccctcttcccatgaggtggtagcctggattcgacggatacttcgggtggagaagacagggcacagtggtactctggatcccaaggtgactggttgtttaatcgtgtgcatagaacgagccactcgcttggtgaagtcacaacagagtgcaggcaaagagtatgtggggattgtccggctgcacaatgctattgaaggggggacccagctttctagggccctagaaactctgacaggtgccttattccagcgacccccacttattgctgcagtaaagaggcagctccgagtgaggaccatctacgagagcaaaatgattgaatacgatcctgaaagaagattaggaatcttttgggtgagttgtgaggctggcacctacattcggacattatgtgtgcaccttggtttgttattgggagttggtggtcagatgcaggagcttcggagggttcgttctggagtcatgagtgaaaaggaccacatggtgacaatgcatgatgtgcttgatgctcagtggctgtatgataaccacaaggatgagagttacctgcggcgagttgtttaccctttggaaaagctgttgacatctcataaacggctggttatgaaagacagtgcagtaaatgccatctgctatggggccaagattatgcttccaggtgttcttcgatatgaggacggcattgaggtcaatcaggagattgtggttatcaccaccaaaggagaagcaatctgcatggctattgcattaatgaccacagcggtcatctctacctgcgaccatggtatagtagccaagatcaagagagtgatcatggagagagacacttaccctcggaagtggggtttaggtccaaaggcaagtcagaagaagctgatgatcaagcagggccttctggacaagcatgggaagcccacagacagcacacctgccacctggaagcaggagtatgttgactacagtgagtctgccaaaaaagaggtggttgctgaagtggtaaaagccccgcaggtagttgccgaagcagcaaaaactgcgaagcggaagcgagagagtgagagtgaaagtgacgagactcctccagcagctcctcagttgatcaagaaggaaaagaagaagagtaagaaggacaagaaggccaaagctggtctggagagcggggccgagcctggagatggggacagtgataccaccaagaagaagaagaagaagaagaaagcaaaagaggtagaattggtttctgagtagtgaaggccacttgaagctggaggagaaactaaagccttattgagaaaacatgttatagatccttttgttgctgagagagtggaacataggtcctagacagggtgaagagttctggcacattttagctgctactttgagacctcggtgatgttacctggtgtggtcatcccatcttgtcctgttttaaggatatgggtggtgaaagatgaaagaggcagagtttatcccaatgacttctctgtttgagttgggaagcctcaccttcagacccagtaactgtccgcagctgtctgctagtggttgtcttaacatcgtagtcctagtttgcattttttaaatcccctctgtttaaaaggtttgtaaaacaaaaacaaaaaactaagtctgctcagtgaaatgctgtagaaccctaaataagtggtagaagagtgtcactgaattttgtctctgaattcagtataactgagttttgtccatgctggtgtctgggttataggcctgatgggcctggtagttttccatcttgttctggcctagaggtcagtcctttgcacttcctcaaagcttgtgtacagtgctcacctaaatccatctgactacttgttcctgtgccctcttgttttaggcctcgtttacttttaaaaaatgaaattgttcattgctgggagaagaatgttgtaatttttacttattaaagtcaacttgttaagttttttatgtattcctgttgggttttcttgttgatctcatgctagcagagcaaaaattgtaaaatattttgattaaaaatctagggacctttatgtcctatttgaaatgtga

SEQ ID NO: 444581 - DNA, 353 bp, Homo sapiens
gatacgaggtcgagggctgaaccagatgatggcagagaaccctaaataagtggtagaagagtgtcactgaattttgtctctgaattcagtataactgagttttgtccatgctggtgtctgggttataggcctgatgggcctggtagttttccatcttgttctggcctagaggtcagtcctttgcacttcctcaaagcttgtgtacagtgctcacctaaatccatctgactacttgttcctgtgccctcttgttttaggcctcgtttacttttaaaaaatgaaattgttcattgctgggagaagaatgttgtaatttttacttattaaagtcaacttgttaagttttttatgta

SEQ ID NO: 444582 - DNA, 225 bp, Homo sapiens
tactactactaaattcccggccgcgtcgattatgtgtgcaccttggtttgttattgggagttggtggtcagatgcaggagcttcggagggttcgttctggagtcatgagtgaaaaggaccacatggtgacaatgcatgatgtgcttgatgctcagtggctgtatgataacaactcgccgcaggtaactctcatccttgtggttatcagtcgacgcgcccgcgaat

SEQ ID NO: 444583 - DNA, 2476 bp, Homo sapiens
  misc_feature (1)..(1): n is a, c, g, or t
  misc_feature (5)..(5): n is a, c, g, or t
  misc_feature (7)..(8): n is a, c, g, or t
ngcananngcattgcgcagacgaccagcgggcgcctcggattccgcccccgggatggccccgcctcctcccgccccgcggcaaggcacgcacagggcagtgcgcgggtgggtgggtcctagcagcgcggcctgacgggaccaaggcggcgggagtctgcggtcgttccctcggctgtggaccgggcggcacgcacgcggtgcagggtaacatggcggatgcggaagtaattattttgccaaagaaacataagaagaaaaaggagcggaagtcattgccagaagaagatgtagccgaaatacaacacgctgaagaatttcttatcaaacctgaatccaaagttgctaagttggacacgtctcagtggccccttttgctaaagaattttgataagctgaatgtaaggacaacacactatacacctcttgcatgtggttcaaatcctctgaagagagagattggggactatatcaggacaggtttcattaatcttgacaagccctctaacccctcttcccatgaggtggtagcctggattcgacggatacttcgggtggagaagacagggcacagtggtactctggatcccaaggtgactggttgtttaatcgtgtgcatagaacgagccactcgcttggtgaagtcacaacagagtgcaggcaaagagtatgtggggattgtccggctgcacaatgctattgaaggggggacccagctttctagggccctagaaactctgacaggtgccttattccagcgacccccacttattgctgcagtaaagaggcagctccgagtgaggaccatctacgagagcaaaatgattgaatacgatcctgaaagaagattaggaatcttttgggtgagttgtgaggctggcacctacattcggacattatgtgtgcaccttggtttgttattgggagttggtggtcagatgcaggagcttcggagggttcgttctggagtcatgagtgaaaaggaccacatggtgacaatgcatgatgtgcttgatgctcagtggctgtatgataaccacaaggatgagagttacctgcggcgagttgtttaccctttggaaaagctgttgacatctcataaacggctggttatgaaagacagtgcagtaaatgccatctgctatggggccaagattatgcttccaggtgttcttcgatatgaggacggcattgaggtcaatcaggagattgtggttatcaccaccaaaggagaagcaatctgcatggctattgcattaatgaccacagcggtcatctctacctgcgaccatggtatagtagccaagatcaagagagtgatcatggagagagacacttaccctcggaagtggggtttaggtccaaaggcaagtcagaagaagctgatgatcaagcagggccttctggacaagcatgggaagcccacagacagcacacctgccacctggaagcaggagtatgttgactacagtgagtctgccaaaaaagaggtggttgctgaagtggtaaaagccccgcaggtagttgccgaagcagcaaaaactgcgaagcggaagcgagagagtgagagtgaaagtgacgagactcctccagcagctcctcagttgatcaagaaggaaaagaagaagagtaagaaggacaagaaggccaaagctggtctggagagcggggccgagcctggagatggggacagtgataccaccaagaagaagaagaagaagaagaaagcaaaagaggtagaattggtttctgagtagtgaaggccacttgaagctggaggagaaactaaagccttattgagaaaacatgttatagatccttttgttgctgagagagtggaacataggtcctagacagggtgaagagttctggcacattttagctgctactttgagacctcggtgatgttacctggtgtggtcatcccatcttgtcctgttttaaggatatgggtggtgaaagatgaaagaggcagagtttatcccaatgacttctctgtttgagttgggaagcctcaccttcagacccagtaactgtccgcagctgtctgctagtggttgtcttaacatcgtagtcctagtttgcattttttaaatcccctctgtttaaaaggtttgtaaaacaaaaacaaaaaactaagtctgctcagtgaaatgctgtagaaccctaaataagtggtagaagagtgtcactgaattttgtctctgaattcagtataactgagttttgtccatgctggtgtctgggttataggcctgatgggcctggtagttttccatcttgttctggcctagaggtcagtcctttgcacttcctcaaagcttgtgtacagtgctcacctaaatccatctgactacttgttcctgtgccctcttgttttaggcctcgtttacttttaaaaaatgaaattgttcattgctgggagaagaatgttgtaatttttacttattaaagtcaacttgttaagttttttatgta

SEQ ID NO: 444584 - DNA, 3230 bp, Homo sapiens
  misc_feature (1)..(1): n is a, c, g, or t
  misc_feature (5)..(5): n is a, c, g, or t
  misc_feature (7)..(8): n is a, c, g, or t
ngcananngcattgcgcagacgaccagcgggcgcctcggattccgcccccgggatggccccgcctcctcccgccccgcggcaaggcacgcacagggcagtgcgcgggtgggtgggtcctagcagcgcggcctgacgggaccaaggcggcgggagtctgcggtcgttccctcggctgtggaccgggcggcacgcacgcggtgcagggtaacatggcggatgcggaagtaattattttgccaaagaaacataagaagaaaaaggagcggaagtcattgccagaagaagatgtagccgaaatacaacacgctgaagaatttcttatcaaacctgaatccaaagttgctaagttggacacgtctcagtggccccttttgctaaagaattttgataagctgaatgtaaggacaacacactatacacctcttgcatgtggttcaaatcctctgaagagagagattggggactatatcaggacaggtttcattaatcttgacaagccctctaacccctcttcccatgaggtggtagcctggattcgacggatacttcgggtggagaagacagggcacagtggtactctggatcccaaggtgactggttgtttaatcgtgtgcatagaacgagccactcgcttggtgaagtcacaacagagtgcaggcaaagagtatgtggggattgtccggctgcacaatgctattgaaggggggacccagctttctagggccctagaaactctgacaggtgccttattccagcgacccccacttattgctgcagtaaagaggcagctccgagtgaggaccatctacgagagcaaaatgattgaatacgatcctgaaagaagattaggaatcttttgggtgagttgtgaggctggcacctacattcggacattatgtgtgcaccttggtttgttattgggagttggtggtcagatgcaggagcttcggagggttcgttctggagtcatgagtgaaaaggaccacatggtgacaatgcatgatgtgcttgatgctcagtggctgtatgataaccacaaggatgagagttacctgcggcgagttgtttaccctttggaaaagctgttgacatctcataaacggctggttatgaaagacagtgcagtaaatgccatctgctatggggccaagattatgcttccaggtgttcttcgatatgaggacggcattgaggtcaatcaggagattgtggttatcaccaccaaaggagaagcaatctgcatggctattgcattaatgaccacagcggtcatctctacctgcgaccatggtatagtagccaagatcaagagagtgatcatggagagagacacttaccctcggaagtggggtttaggtccaaaggcaagtcagaagaagctgatgatcaagcagggccttctggacaagcatgggaagcccacagacagcacacctgccacctggaagcaggagtatgttgactacagtgagtctgccaaaaaagaggtggttgctgaagtggtaaaagccccgcaggtagttgccgaagcagcaaaaactgcgaagcggaagcgagagagtgagagtgaaagtgacgagactcctccagcagctcctcagttgatcaagaaggaaaagaagaagagtaagaaggacaagaaggccaaagctggtctggagagcggggccgagcctggagatggggacagtgataccaccaagaagaagaagaagaagaagaaagcaaaagaggtagaattggtttctgagtagtgaaggccacttgaagctggaggagaaactaaagccttattgagaaaacatgttatagatccttttgttgctgagagagtggaacataggtcctagacagggtgaagagttctggcacattttagctgctactttgagacctcggtgatgttacctggtgtggtcatcccatcttgtcctgttttaaggatatgggtggtgaaagatgaaagaggcagagtttatcccaatgacttctctgtttgagttgggaagcctcaccttcagacccagtaactgtccgcagctgtctgctagtggttgtcttaacatcgtagtcctagtttgcattttttaaatcccctctgtttaaaaggtttgtaaaacaaaaacaaaaaactaagtctgctcagtgaaatgctgtagaaccctaaataagtggtagaagagtgtcactgaattttgtctctgaattcagtataactgagttttgtccatgctggtgtctgggttataggcctgatgggcctggtagttttccatcttgttctggcctagaggtcagtcctttgcacttcctcaaagcttgtgtacagtgctcacctaaatccatctgactacttgttcctgtgccctcttgttttaggcctcgtttacttttaaaaaatgaaattgttcattgctgggagaagaatgttgtaatttttacttattaaagtcaacttgttaagttttttatgtattcctgttgggttttcttgttgatctcatgctagcagagcaaaaattgtaaaatattttgattaaaaatctagggacctttatgtcctatttgaaatgtgaaaaaaaaaaaaaaaaacaacaaaaaaaaaaaagggggcggccgcgcccaaaattttccccgggggggccccaaactttagcgcgtgttccccgcgctttttttgtccaaagggggcccctatatggggggggccgttttaaaggccaaggccggggcccggttttaaccaccctcttggtgcccgcggcaagcccgttgccttctcttggggctctttggtcacagggacccttcacttcctgctgcggctctggccctcttttctgggcgcaaaccactccccttcccaggaagtttcaacggcctcctagcgctaaacttttataacacttcttccacgcgtgtccttcgtgcttgttcaaccccacacgtggtcctattgtgccttgcggtgctctgggaaacaactttggctccacgcgggacttttgcattttgtggaacactttcttttttccccgcggacacctcttgcttcaacaaaccggtatccaatgccagccgacaacatacacaccaacgatgatgaccacatcaatcacctgccaacactcaacacatcagatacaacacaccacaatcactgatcatacgtgacaattctacacacacatgaacaaccactagacgactcagcactgcccacactgaa

SEQ ID NO: 444585 - DNA, 2206 bp, Homo sapiens
  misc_feature (1)..(1): n is a, c, g, or t
  misc_feature (5)..(5): n is a, c, g, or t
  misc_feature (7)..(8): n is a, c, g, or t
ngcananngcattgcgcagacgaccagcgggcgcctcggattccgcccccgggatggccccgcctcctcccgccccgcggcaaggcacgcacagggcagtgcgcgggtgggtgggtcctagcagcgcggcctgacgggaccaaggcggcgggagtctgcggtcgttccctcggctgtggaccgggcggcacgcacgcggtgcagggtaacatggcggatgcggaagtaattattttgccaaagaaacataagaagaaaaaggagcggaagtcattgccagaagaagatgtagccgaaatacaacacgctgaagaatttcttatcaaacctgaatccaaagttgctaagttggacacgtctcagtggccccttttgctaaagaattttgataagctgaatgtaaggacaacacactatacacctcttgcatgtggttcaaatcctctgaagagagagattggggactatatcaggacaggtttcattaatcttgacaagccctctaacccctcttcccatgaggtggtagcctggattcgacggatacttcgggtggagaagacagggcacagtggtactctggatcccaaggtgactggttgtttaatcgtgtgcatagaacgagccactcgcttggtgaagtcacaacagagtgcaggcaaagagtatgtggggattgtccggctgcacaatgctattgaaggggggacccagctttctagggccctagaaactctgacaggtgccttattccagcgacccccacttattgctgcagtaaagaggcagctccgagtgaggaccatctacgagagcaaaatgattgaatacgatcctgaaagaagattaggaatcttttgggtgagttgtgaggctggcacctacattcggacattatgtgtgcaccttggtttgttattgggagttggtggtcagatgcaggagcttcggagggttcgttctggagtcatgagtgaaaaggaccacatggtgacaatgcatgatgtgcttgatgctcagtggctgtatgataaccacaaggatgagagttacctgcggcgagttgtttaccctttggaaaagctgttgacatctcataaacggctggttatgaaagacagtgcagtaaatgccatctgctatggggccaagattatgcttccaggtgttcttcgatatgaggacggcattgaggtcaatcaggagattgtggttatcaccaccaaaggagaagcaatctgcatggctattgcattaatgaccacagcggtcatctctacctgcgaccatggtatagtagccaagatcaagagagtgatcatggagagagacacttaccctcggaagtggggtttaggtccaaaggcaagtcagaagaagctgatgatcaagcagggccttctggacaagcatgggaagcccacagacagcacacctgccacctggaagcaggagtatgttgactacagtgagtctgccaaaaaagaggtggttgctgaagtggtaaaagccccgcaggtagttgccgaagcagcaaaaactgcgaagcggaagcgagagagtgagagtgaaagtgacgagactcctccagcagctcctcagttgatcaagaaggaaaagaagaagagtaagaaggacaagaaggccaaagctggtctggagagcggggccgagcctggagatggggacagtgataccaccaagaagaagaagaagaagaagaaagcaaaagaggtagaattggtttctgagtagtgaaggccacttgaagctggaggagaaactaaagccttattgagaaaacatgttatagatccttttgttgctgagagagtggaacataggtcctagacagggtgaagagttctggcacattttagctgctactttgagacctcggtgatgttacctggtgtggtcatcccatcttgtcctgttttaaggatatgggtggtgaaagatgaaagaggcagagtttatcccaatgacttctctgtttgagttgggaagcctcaccttcagacccagtaactgtccgcagctgtctgctagtggttgtcttaacatcgtagtcctagtttgcattttttaaatccccctcttgttttaggcctcgtttacttttaaaaaatgaaattgttcattgctgggagaagaatgttgtaatttttacttattaaagtcaacttgttaagttttttatgta

SEQ ID NO: 444586 - DNA, 2031 bp, Homo sapiens
agcaagaggaggccgggttgtaatcggcagagtctggatcccaaggtgactggttgtttaatcgtgtgcatagaacgagccactcgcttggtgaagtcacaacagagtgcaggcaaagagtatgtggggattgtccggctgcacaatgctattgaaggggggacccagctttctagggccctagaaactctgacaggtgccttattccagcgacccccacttattgctgcagtaaagaggcagctccgagtgaggaccatctacgagagcaaaatgattgaatacgatcctgaaagaagattaggaatcttttgggtgagttgtgaggctggcacctacattcggacattatgtgtgcaccttggtttgttattgggagttggtggtcagatgcaggagcttcggagggttcgttctggagtcatgagtgaaaaggaccacatggtgacaatgcatgatgtgcttgatgctcagtggctgtatgataaccacaaggatgagagttacctgcggcgagttgtttaccctttggaaaagctgttgacatctcataaacggctggttatgaaagacagtgcagtaaatgccatctgctatggggccaagattatgcttccaggtgttcttcgatatgaggacggcattgaggtcaatcaggagattgtggttatcaccaccaaaggagaagcaatctgcatggctattgcattaatgaccacagcggtcatctctacctgcgaccatggtatagtagccaagatcaagagagtgatcatggagagagacacttaccctcggaagtggggtttaggtccaaaggcaagtcagaagaagctgatgatcaagcagggccttctggacaagcatgggaagcccacagacagcacacctgccacctggaagcaggagtatgttgactacagtgagtctgccaaaaaagaggtggttgctgaagtggtaaaagccccgcaggtagttgccgaagcagcaaaaactgcgaagcggaagcgagagagtgagagtgaaagtgacgagactcctccagcagctcctcagttgatcaagaaggaaaagaagaagagtaagaaggacaagaaggccaaagctggtctggagagcggggccgagcctggagatggggacagtgataccaccaagaagaagaagaagaagaagaaagcaaaagaggtagaattggtttctgagtagtgaaggccacttgaagctggaggagaaactaaagccttattgagaaaacatgttatagatccttttgttgctgagagagtggaacataggtcctagacagggtgaagagttctggcacattttagctgctactttgagacctcggtgatgttacctggtgtggtcatcccatcttgtcctgttttaaggatatgggtggtgaaagatgaaagaggcagagtttatcccaatgacttctctgtttgagttgggaagcctcaccttcagacccagtaactgtccgcagctgtctgctagtggttgtcttaacatcgtagtcctagtttgcattttttaaatcccctctgtttaaaaggtttgtaaaacaaaaacaaaaaactaagtctgctcagtgaaatgctgtagaaccctaaataagtggtagaagagtgtcactgaattttgtctctgaattcagtataactgagttttgtccatgctggtgtctgggttataggcctgatgggcctggtagttttccatcttgttctggcctagaggtcagtcctttgcacttcctcaaagcttgtgtacagtgctcacctaaatccatctgactacttgttcctgtgccctcttgttttaggcctcgtttacttttaaaaaatgaaattgttcattgctgggagaagaatgttgtaatttttacttattaaagtcaacttgttaagttttttatgtattcctgttgggttttcttgttgatctcatgctagcagagcaaaaattgtaaaatattttgattaaaaatctagggacctttatgtcctatttgaaatgtga

SEQ ID NO: 444587 - DNA, 1822 bp, Homo sapiens
aaactttgggacattaaaatgggctaagggagatgattgggtagaaagtattattctattcatttgcctcccagcctacaaaaatgcctgcttggggtctaatacttcaacggttaaagatgcctggaagagggcgcggtggctcacgcctgtaatcccagcactttgggaggccgaggcgggtggatcatgaggtcaggagatcgagaccatcctggctaacaaggaccacatggtgacaatgcatgatgtgcttgatgctcagtggctgtatgataaccacaaggatgagagttacctgcggcgagttgtttaccctttggaaaagctgttgacatctcataaacggctggttatgaaagacagtgcagtaaatgccatctgctatggggccaagattatgcttccaggtgttcttcgatatgaggacggcattgaggtcaatcaggagattgtggttatcaccaccaaaggagaagcaatctgcatggctattgcattaatgaccacagcggtcatctctacctgcgaccatggtatagtagccaagatcaagagagtgatcatggagagagacacttaccctcggaagtggggtttaggtccaaaggcaagtcagaagaagctgatgatcaagcagggccttctggacaagcatgggaagcccacagacagcacacctgccacctggaagcaggagtatgttgactacagtgagtctgccaaaaaagaggtggttgctgaagtggtaaaagccccgcaggtagttgccgaagcagcaaaaactgcgaagcggaagcgagagagtgagagtgaaagtgacgagactcctccagcagctcctcagttgatcaagaaggaaaagaagaagagtaagaaggacaagaaggccaaagctggtctggagagcggggccgagcctggagatggggacagtgataccaccaagaagaagaagaagaagaagaaagcaaaagaggtagaattggtttctgagtagtgaaggccacttgaagctggaggagaaactaaagccttattgagaaaacatgttatagatccttttgttgctgagagagtggaacataggtcctagacagggtgaagagttctggcacattttagctgctactttgagacctcggtgatgttacctggtgtggtcatcccatcttgtcctgttttaaggatatgggtggtgaaagatgaaagaggcagagtttatcccaatgacttctctgtttgagttgggaagcctcaccttcagacccagtaactgtccgcagctgtctgctagtggttgtcttaacatcgtagtcctagtttgcattttttaaatcccctctgtttaaaaggtttgtaaaacaaaaacaaaaaactaagtctgctcagtgaaatgctgtagaaccctaaataagtggtagaagagtgtcactgaattttgtctctgaattcagtataactgagttttgtccatgctggtgtctgggttataggcctgatgggcctggtagttttccatcttgttctggcctagaggtcagtcctttgcacttcctcaaagcttgtgtacagtgctcacctaaatccatctgactacttgttcctgtgccctcttgttttaggcctcgtttacttttaaaaaatgaaattgttcattgctgggagaagaatgttgtaatttttacttattaaagtcaacttgttaagttttttatgtattcctgttgggttttcttgttgatctcatgctagcagagcaaaaattgtaaaatattttgattaaaaatctagggacctttatgtcctatttgaaatgtga

SEQ ID NO: 444588 - DNA, 1633 bp, Homo sapiens
aggggaagctccccttgggaggttgatgtataagcgcgaccacatggtgacaatgcatgatgtgcttgatgctcagtggctgtatgataaccacaaggatgagagttacctgcggcgagttgtttaccctttggaaaagctgttgacatctcataaacggctggttatgaaagacagtgcagtaaatgccatctgctatggggccaagattatgcttccaggtgttcttcgatatgaggacggcattgaggtcaatcaggagattgtggttatcaccaccaaaggagaagcaatctgcatggctattgcattaatgaccacagcggtcatctctacctgcgaccatggtatagtagccaagatcaagagagtgatcatggagagagacacttaccctcggaagtggggtttaggtccaaaggcaagtcagaagaagctgatgatcaagcagggccttctggacaagcatgggaagcccacagacagcacacctgccacctggaagcaggagtatgttgactacagtgagtctgccaaaaaagaggtggttgctgaagtggtaaaagccccgcaggtagttgccgaagcagcaaaaactgcgaagcggaagcgagagagtgagagtgaaagtgacgagactcctccagcagctcctcagttgatcaagaaggaaaagaagaagagtaagaaggacaagaaggccaaagctggtctggagagcggggccgagcctggagatggggacagtgataccaccaagaagaagaagaagaagaagaaagcaaaagaggtagaattggtttctgagtagtgaaggccacttgaagctggaggagaaactaaagccttattgagaaaacatgttatagatccttttgttgctgagagagtggaacataggtcctagacagggtgaagagttctggcacattttagctgctactttgagacctcggtgatgttacctggtgtggtcatcccatcttgtcctgttttaaggatatgggtggtgaaagatgaaagaggcagagtttatcccaatgacttctctgtttgagttgggaagcctcaccttcagacccagtaactgtccgcagctgtctgctagtggttgtcttaacatcgtagtcctagtttgcattttttaaatcccctctgtttaaaaggtttgtaaaacaaaaacaaaaaactaagtctgctcagtgaaatgctgtagaaccctaaataagtggtagaagagtgtcactgaattttgtctctgaattcagtataactgagttttgtccatgctggtgtctgggttataggcctgatgggcctggtagttttccatcttgttctggcctagaggtcagtcctttgcacttcctcaaagcttgtgtacagtgctcacctaaatccatctgactacttgttcctgtgccctcttgttttaggcctcgtttacttttaaaaaatgaaattgttcattgctgggagaagaatgttgtaatttttacttattaaagtcaacttgttaagttttttatgtattcctgttgggttttcttgttgatctcatgctagcagagcaaaaattgtaaaatattttgattaaaaatctagggacctttatgtcctatttgaaatgtga

SEQ ID NO: 444589 - DNA, 1328 bp, Homo sapiens
  misc_feature (1)..(1): n is a, c, g, or t
  misc_feature (5)..(5): n is a, c, g, or t
  misc_feature (7)..(8): n is a, c, g, or t
ngcananngcattgcgcagacgaccagcgggcgcctcggattccgcccccgggatggccccgcctcctcccgccccgcggcaaggcacgcacagggcagtgcgcgggtgggtgggtcctagcagcgcggcctgacgggaccaaggcggcgggagtctgcggtcgttccctcggctgtggaccgggcggcacgcacgcggtgcagggtaacatggcggatgcggaagtaattattttgccaaagaaacataagaagaaaaaggagcggaagtcattgccagaagaagatgtagccgaaatacaacacgctgaagaatttcttatcaaacctgaatccaaagttgctaagttggacacgtctcagtggccccttttgctaaagaattttgataagctgaatgtaaggacaacacactatacacctcttgcatgtggttcaaatcctctgaagagagagattggggactatatcaggacaggtttcattaatcttgacaagccctctaacccctcttcccatgaggtggtagcctggattcgacggatacttcgggtggagaagacagggcacagtggtactctggatcccaaggtgactggttgtttaatcgtgtgcatagaacgagccactcgcttggtgaagtcacaacagagtgcaggcaaagagtatgtggggattgtccggctgcacaatgctattgaaggggggacccagctttctagggccctagaaactctgacaggtgccttattccagcgacccccacttattgctgcagtaaagaggcagctccgagtgaggaccatctacgagagcaaaatgattgaatacgatcctgaaagaagattaggaatcttttgggtgagttgtgaggctggcacctacattcggacattatgtgtgcaccttggtttgttattgggagttggtggtcagatgcaggagcttcggagggttcgttctggagtcatgagtgaaaaggaccacatggtgacaatgcatgatgtgcttgatgctcagtggctgtatgataaccacaaggatgagagttacctgcggcgagttgtttaccctttggaaaagctgttgacatctcataaacggctggttatgaaagacagtgcagtaaattggcatctgctatggggcagatatgctccaggggtctcgaatgggaggctgcggcctccgggctggggtctccccccagggacgtctgggtgggtctgctatgccaccggccttcccggccggtttcccatcccgggtccggggaccccgcgggggtccgcgcagtcttggctgcgggccccccggtgtttctcggg

SEQ ID NO: 444590 - DNA, 1184 bp, Homo sapiens
agataacactacataacatcagtactgccctggaaagccattcagtgaatttgacctattgctacctctttttcagtgagtctgccaaaaaagaggtggttgctgaagtggtaaaagccccgcaggtagttgccgaagcagcaaaaactgcgaagcggaagcgagagagtgagagtgaaagtgacgagactcctccagcagctcctcagttgatcaagaaggaaaagaagaagagtaagaaggacaagaaggccaaagctggtctggagagcggggccgagcctggagatggggacagtgataccaccaagaagaagaagaagaagaagaaagcaaaagaggtagaattggtttctgagtagtgaaggccacttgaagctggaggagaaactaaagccttattgagaaaacatgttatagatccttttgttgctgagagagtggaacataggtcctagacagggtgaagagttctggcacattttagctgctactttgagacctcggtgatgttacctggtgtggtcatcccatcttgtcctgttttaaggatatgggtggtgaaagatgaaagaggcagagtttatcccaatgacttctctgtttgagttgggaagcctcaccttcagacccagtaactgtccgcagctgtctgctagtggttgtcttaacatcgtagtcctagtttgcattttttaaatcccctctgtttaaaaggtttgtaaaacaaaaacaaaaaactaagtctgctcagtgaaatgctgtagaaccctaaataagtggtagaagagtgtcactgaattttgtctctgaattcagtataactgagttttgtccatgctggtgtctgggttataggcctgatgggcctggtagttttccatcttgttctggcctagaggtcagtcctttgcacttcctcaaagcttgtgtacagtgctcacctaaatccatctgactacttgttcctgtgccctcttgttttaggcctcgtttacttttaaaaaatgaaattgttcattgctgggagaagaatgttgtaatttttacttattaaagtcaacttgttaagttttttatgtattcctgttgggttttcttgttgatctcatgctagcagagcaaaaattgtaaaatattttgattaaaaatctagggacctttatgtcctatttgaaatgtga

SEQ ID NO: 444591 - DNA, 1009 bp, Homo sapiens
ctacttgtatagctgttcctagaggtatcacctgttgatcaagaaggaaaagaagaagagtaagaaggacaagaaggccaaagctggtctggagagcggggccgagcctggagatggggacagtgataccaccaagaagaagaagaagaagaagaaagcaaaagaggtagaattggtttctgagtagtgaaggccacttgaagctggaggagaaactaaagccttattgagaaaacatgttatagatccttttgttgctgagagagtggaacataggtcctagacagggtgaagagttctggcacattttagctgctactttgagacctcggtgatgttacctggtgtggtcatcccatcttgtcctgttttaaggatatgggtggtgaaagatgaaagaggcagagtttatcccaatgacttctctgtttgagttgggaagcctcaccttcagacccagtaactgtccgcagctgtctgctagtggttgtcttaacatcgtagtcctagtttgcattttttaaatcccctctgtttaaaaggtttgtaaaacaaaaacaaaaaactaagtctgctcagtgaaatgctgtagaaccctaaataagtggtagaagagtgtcactgaattttgtctctgaattcagtataactgagttttgtccatgctggtgtctgggttataggcctgatgggcctggtagttttccatcttgttctggcctagaggtcagtcctttgcacttcctcaaagcttgtgtacagtgctcacctaaatccatctgactacttgttcctgtgccctcttgttttaggcctcgtttacttttaaaaaatgaaattgttcattgctgggagaagaatgttgtaatttttacttattaaagtcaacttgttaagttttttatgtattcctgttgggttttcttgttgatctcatgctagcagagcaaaaattgtaaaatattttgattaaaaatctagggacctttatgtcctatttgaaatgtga

SEQ ID NO: 444592 - DNA, 535 bp, Homo sapiens
aaaaaggcttgcttgactgtggacctttaccagatttccttctgggagagtcatagctttgttagtggatggtatctgtgagctttcattctctttctttctaggacagtgataccaccaagaagaagaagaagaagaagaaagcaaaagaggtagaattggtttctgagtagtgaaggccacttgaagctggaggagaaactaaagccttattgagaaaacatgttatagatccttttgttgctgagagagtggaacataggtcctagacagggtgaagagttctggcacattttagctgctactttgagacctcggtgatgttacctggtgtggtcatcccatcttgtcctgttttaaggatatgggtggtgaaagatgaaagaggcagagtttatcccaatgacttctctgtttgagttgggaagcctcaccttcagacccagtaactgtccgcagctgtctgctagtggttgtcttaacatcgtagtcctagtttgcattttttaaatcccctctgtttaaaaggtttgta

SEQ ID NO: 444593 - DNA, 889 bp, Homo sapiens
cggacgcgtgggtcgacccacgcgtcgcccacgcgacaggtttcattaatcttgacaagccctctaacccctcttcccatgaggtggtagcctggattcgacggatacttcgggtggagaagacagggcacagtggtactctggatcccaaggtgactggttgtttaatcgtgtgcatagaacgagccactcgcttggtgaagtcacaacagagtgcaggcaaagagtatgtggggattgtccggctgcacaatgctattgaaggggggacccagctttctagggccctagaaactctgacaggtgccttattccagcgacccccacttattgctgcagtaaagaggcagctccgagtgaggaccatctacgagagcaaaatgattgaatacgatcctgaaagaagattaggaatcttttgggtgagttgtgaggctggcacctacattcggacattatgtgtgcaccttggtttgttattgggagttggtggtcagatgcaggagcttcggagggttcgttctggagtcatgagtgaaaaggaccacatggtgacaatgcatgatgtgcttgatgctcagtggctgtatgataaccacaaggatgagagttacctgcggcgagttgtttaccctttggaaaagctgttgacatctcataaacggctggttatgaaagacagtgcagtaaattggcatctgctatggggcagatatgctccaggggtctcgaatgggaggctgcggcctccgggctggggtctccccccagggacgtctgggtgggtctgctatgccaccggccttcccggccggtttcccatcccgggtccggggaccccgcgggggtccgcgcagtcttggctgcgggccccccggtgtttctcggg

SEQ ID NO: 444594 - DNA, 2494 bp, Homo sapiens
  misc_feature (29)..(29): n is a, c, g, or t
aaggctagtacgaggcggggttaatcggncgaggctagcagcgcggcctgacgggaccaaggcggcgggagtctgcggtcgttccctcggctgtggaccgggcggcacgcacgcggtgcagggtaacatggcggatgcggaagtaattattttgccaaagaaacataagaagaaaaaggagcggaagtcattgccagaagaagatgtagccgaaatacaacacgctgaagaatttcttatcaaacctgaatccaaagttgctaagttggacacgtctcagtggccccttttgctaaagaattttgataagctgaatgtaaggacaacacactatacacctcttgcatgtggttcaaatcctctgaagagagagattggggactatatcaggacaggtttcattaatcttgacaagccctctaacccctcttcccatgaggtggtagcctggattcgacggatacttcgggtggagaagacagggcacagtggtactctggatcccaaggtgactggttgtttaatcgtgtgcatagaacgagccactcgcttggtgaagtcacaacagagtgcaggcaaagagtatgtggggattgtccggctgcacaatgctattgaaggggggacccagctttctagggccctagaaactctgacaggtgccttattccagcgacccccacttattgctgcagtaaagaggcagctccgagtgaggaccatctacgagagcaaaatgattgaatacgatcctgaaagaagattaggaatcttttgggtgagttgtgaggctggcacctacattcggacattatgtgtgcaccttggtttgttattgggagttggtggtcagatgcaggagcttcggagggttcgttctggagtcatgagtgaaaaggaccacatggtgacaatgcatgatgtgcttgatgctcagtggctgtatgataaccacaaggatgagagttacctgcggcgagttgtttaccctttggaaaagctgttgacatctcataaacggctggttatgaaagacagtgcagtaaatgccatctgctatggggccaagattatgcttccaggtgttcttcgatatgaggacggcattgaggtcaatcaggagattgtggttatcaccaccaaaggagaagcaatctgcatggctattgcattaatgaccacagcggtcatctctacctgcgaccatggtatagtagccaagatcaagagagtgatcatggagagagacacttaccctcggaagtggggtttaggtccaaaggcaagtcagaagaagctgatgatcaagcagggccttctggacaagcatgggaagcccacagacagcacacctgccacctggaagcaggagtatgttgactacagtgagtctgccaaaaaagaggtggttgctgaagtggtaaaagccccgcaggtagttgccgaagcagcaaaaactgcgaagcggaagcgagagagtgagagtgaaagtgacgagactcctccagcagctcctcagttgatcaagaaggaaaagaagaagagtaagaaggacaagaaggccaaagctggtctggagagcggggccgagcctggagatggggacagtgataccaccaagaagaagaagaagaagaagaaagcaaaagaggtagaattggtttctgagtagtgaaggccacttgaagctggaggagaaactaaagccttattgagaaaacatgttatagatccttttgttgctgagagagtggaacataggtcctagacagggtgaagagttctggcacattttagctgctactttgagacctcggtgatgttacctggtgtggtcatcccatcttgtcctgttttaaggatatgggtggtgaaagatgaaagaggcagagtttatcccaatgacttctctgtttgagttgggaagcctcaccttcagacccagtaactgtccgcagctgtctgctagtggttgtcttaacatcgtagtcctagtttgcattttttaaatcccctctgtttaaaaggtttgtaaaacaaaaacaaaaaactaagtctgctcagtgaaatgctgtagaaccctaaataagtggtagaagagtgtcactgaattttgtctctgaattcagtataactgagttttgtccatgctggtgtctgggttataggcctgatgggcctggtagttttccatcttgttctggcctagaggtcagtcctttgcacttcctcaaagcttgtgtacagtgctcacctaaatccatctgactacttgttcctgtgccctcttgttttaggcctcgtttacttttaaaaaatgaaattgttcattgctgggagaagaatgttgtaatttttacttattaaagtcaacttgttaagttttttatgtattcctgttgggttttcttgttgatctcatgctagcagagcaaaaattgtaaaatattttgattaaaaatctagggacctttatgtcctatttgaaatgtga

SEQ ID NO: 444595 - DNA, 2455 bp, Homo sapiens
  misc_feature (1)..(1): n is a, c, g, or t
  misc_feature (5)..(5): n is a, c, g, or t
  misc_feature (7)..(8): n is a, c, g, or t
ngcananngcattgcgcagacgaccagcgggcgcctcggattccgcccccgggatggccccgcctcctcccgccccgcggcaaggcacgcacagggcagtgcgcgggtgggtgggtcctagcagcgcggcctgacgggaccaaggcggcgggagtctgcggtcgttccctcggctgtggaccgggcggcacgcacgcggtgcagggtaacatggcggatgcggaagtaattattttgccaaagaaacataagaagaaaaaggagcggaagtcattgccagaagaagatgtagccgaaatacaacacgctgaagaatttcttatcaaacctgaatccaaagttgctaagttggacacgtctcagtggccccttttgctaaagaattttgataagctgaatgtaaggacaacacactatacacctcttgcatgtggttcaaatcctctgaagagagagattggggactatatcaggacaggtttcattaatcttgacaagccctctaacccctcttcccatgaggtggtagcctggattcgacggatacttcgggtggagaagacagggcacagtggtactctggatcccaaggtgactggttgtttaatcgtgtgcatagaacgagccactcgcttggtgaagtcacaacagagtgcaggcaaagagtatgtggggattgtccggctgcacaatgctattgaaggggggacccagctttctagggccctagaaactctgacaggtgccttattccagcgacccccacttattgctgcagtaaagaggcagctccgagtgaggaccatctacgagagcaaaatgattgaatacgatcctgaaagaagattaggaatcttttgggtgagttgtgaggctggcacctacattcggacattatgtgtgcaccttggtttgttattgggagttggtggtcagatgcaggagcttcggagggttcgttctggagtcatgagtgaaaaggaccacatggtgacaatgcatgatgtgcttgatgctcagtggctgtatgataaccacaaggatgagagttacctgcggcgagttgtttaccctttggaaaagctgttgacatctcataaacggctggttatgaaagacagtgcagtaaatgccatctgctatggggccaagattatgcttccaggtgttcttcgatatgaggacggcattgaggtcaatcaggagattgtggttatcaccaccaaaggagaagcaatctgcatggctattgcattaatgaccacagcggtcatctctacctgcgaccatggtatagtagccaagatcaagagagtgatcatggagagagacacttaccctcggaagtggggtttaggtccaaaggcaagtcagaagaagctgatgatcaagcagggccttctggacaagcatgggaagcccacagacagcacacctgccacctggaagcaggagtatgttgactacagtgagtctgccaaaaaagaggtggttgctgaagtggtaaaagccccgcaggtagttgccgaagcagcaaaaactgcgaagcggaagcgagagagtgagagtgaaagtgacgagactcctccagcagctcctcagttgatcaagaaggaaaagaagaagagtaagaaggacaagaaggccaaagctggtctggagagcggggccgagcctggagatggggacagtgataccaccaagaagaagaagaagaagaagaaagcaaaagaggtagaattggtttctgagtagtgaaggccacttgaagctggaggagaaactaaagccttattgagaaaacatgttatagatccttttgttgctgagagagtggaacataggtcctagacagggtgaagagttctggcacattttagctgctactttgagacctcggtgatgttacctggtgtggtcatcccatcttgtcctgttttaaggatatgggtggtgaaagatgaaagaggcagagtttatcccaatgacttctctgtttgagttgggaagcctcaccttcagacccagtaactgtccgcagctgtctgctagtggttgtcttaacatcgtagtcctagtttgcattttttaaatcccctctgtttaaaaggtttgtaaaacaaaaacaaaaaactaagtctgctcagtgaaatgctgtagaaccctaaataagtggtagaagagtgtcactgaattttgtctctgaattcagtataactgagttttgtccatgctggtgtctgggttataggcctgatgggcctggtagttttccatcttgttctggcctagaggtcagtcctttgcacttcctcaaagcttgtgtacagtgctcacctaaatccatctgactacttgttcctgtgccctcttgttttaggcctcgtttacttttaaaaaatgaaattgttcattgcgaggagagaagcagcaggggtcctctagagtaacctgc

SEQ ID NO: 444596 - DNA, 2597 bp, Homo sapiens
  misc_feature (29)..(29): n is a, c, g, or t
  misc_feature (241)..(241): n is a, c, g, or t
aaggctagtacgaggcggggttaatcggncgaggctagcagcgcggcctgacgggaccaaggcggcgggagtctgcggtcgttccctcggctgtggaccgggcggcacgcacgcggtgcagggtaacatggcggatgcggaagttatttatgccagaagaaatcatacaggaatgaaacaatggatgccggaaggctcacttcgcgcagagacgaagactgtaggcgcgaacactatcaancatcgtctgtaatgacagtttgcttatcaaaacctgagagtccaaaggttgactaggattggagcacgtctcagtggcgcccttgtggctaaacgcaagttttgactaagcctgaactgctgatgcgacagagcacacgtgatacatccttcgttggccagtggtggtgtccaatagtacacttctggacatggagcagaacgattgggcgagcacgtgattagtcgaggtgaacgatgggcttctccatgtgaactctttggtccaaaaggcgctctgcttaacgccctcttcccatgaggtggtagcctggattcgacggatacttcgggtggagaagacagggcacagtggtactctggatcccaaggtgactggttgtttaatcgtgtgcatagaacgagccactcgcttggtgaagtcacaacagagtgcaggcaaagagtatgtggggattgtccggctgcacaatgctattgaaggggggacccagctttctagggccctagaaactctgacaggtgccttattccagcgacccccacttattgctgcagtaaagaggcagctccgagtgaggaccatctacgagagcaaaatgattgaatacgatcctgaaagaagattaggaatcttttgggtgagttgtgaggctggcacctacattcggacattatgtgtgcaccttggtttgttattgggagttggtggtcagatgcaggagcttcggagggttcgttctggagtcatgagtgaaaaggaccacatggtgacaatgcatgatgtgcttgatgctcagtggctgtatgataaccacaaggatgagagttacctgcggcgagttgtttaccctttggaaaagctgttgacatctcataaacggctggttatgaaagacagtgcagtaaatgccatctgctatggggccaagattatgcttccaggtgttcttcgatatgaggacggcattgaggtcaatcaggagattgtggttatcaccaccaaaggagaagcaatctgcatggctattgcattaatgaccacagcggtcatctctacctgcgaccatggtatagtagccaagatcaagagagtgatcatggagagagacacttaccctcggaagtggggtttaggtccaaaggcaagtcagaagaagctgatgatcaagcagggccttctggacaagcatgggaagcccacagacagcacacctgccacctggaagcaggagtatgttgactacagtgagtctgccaaaaaagaggtggttgctgaagtggtaaaagccccgcaggtagttgccgaagcagcaaaaactgcgaagcggaagcgagagagtgagagtgaaagtgacgagactcctccagcagctcctcagttgatcaagaaggaaaagaagaagagtaagaaggacaagaaggccaaagctggtctggagagcggggccgagcctggagatggggacagtgataccaccaagaagaagaagaagaagaagaaagcaaaagaggtagaattggtttctgagtagtgaaggccacttgaagctggaggagaaactaaagccttattgagaaaacatgttatagatccttttgttgctgagagagtggaacataggtcctagacagggtgaagagttctggcacattttagctgctactttgagacctcggtgatgttacctggtgtggtcatcccatcttgtcctgttttaaggatatgggtggtgaaagatgaaagaggcagagtttatcccaatgacttctctgtttgagttgggaagcctcaccttcagacccagtaactgtccgcagctgtctgctagtggttgtcttaacatcgtagtcctagtttgcattttttaaatcccctctgtttaaaaggtttgtaaaacaaaaacaaaaaactaagtctgctcagtgaaatgctgtagaaccctaaataagtggtagaagagtgtcactgaattttgtctctgaattcagtataactgagttttgtccatgctggtgtctgggttataggcctgatgggcctggtagttttccatcttgttctggcctagaggtcagtcctttgcacttcctcaaagcttgtgtacagtgctcacctaaatccatctgactacttgttcctgtgccctcttgttttaggcctcgtttacttttaaaaaatgaaattgttcattgctgggagaagaatgttgtaatttttacttattaaagtcaacttgttaagttttttatgtattcctgttgggttttcttgttgatctcatgctagcagagcaaaaattgtaaaatattttgattaaaaatctagggacctttatgtcctatttgaaatgtga

SEQ ID NO: 444597 - DNA, 1981 bp, Homo sapiens
catttcacgagtacccccactttatgaatctgtatgccatatgccggccccgactcgtggaaatgtccacgtggacatttccacgagccaccgtgcctggccagaattacagatctttacagcaaatgcttatattttaagaagtgtgtctgtcacctctagtcttggtggctcagatgaaggataactgcatttctcaaccagtgatgtatttacagtaggtgctgcttttcttttgtgtgtgtgtatcttaggaatcttttgggtgagttgtgaggctggcacctacattcggacattatgtgtgcaccttggtttgttattgggagttggtggtcagatgcaggagcttcggagggttcgttctggagtcatgagtgaaaaggaccacatggtgacaatgcatgatgtgcttgatgctcagtggctgtatgataaccacaaggatgagagttacctgcggcgagttgtttaccctttggaaaagctgttgacatctcataaacggctggttatgaaagacagtgcagtaaatgccatctgctatggggccaagattatgcttccaggtgttcttcgatatgaggacggcattgaggtcaatcaggagattgtggttatcaccaccaaaggagaagcaatctgcatggctattgcattaatgaccacagcggtcatctctacctgcgaccatggtatagtagccaagatcaagagagtgatcatggagagagacacttaccctcggaagtggggtttaggtccaaaggcaagtcagaagaagctgatgatcaagcagggccttctggacaagcatgggaagcccacagacagcacacctgccacctggaagcaggagtatgttgactacagtgagtctgccaaaaaagaggtggttgctgaagtggtaaaagccccgcaggtagttgccgaagcagcaaaaactgcgaagcggaagcgagagagtgagagtgaaagtgacgagactcctccagcagctcctcagttgatcaagaaggaaaagaagaagagtaagaaggacaagaaggccaaagctggtctggagagcggggccgagcctggagatggggacagtgataccaccaagaagaagaagaagaagaagaaagcaaaagaggtagaattggtttctgagtagtgaaggccacttgaagctggaggagaaactaaagccttattgagaaaacatgttatagatccttttgttgctgagagagtggaacataggtcctagacagggtgaagagttctggcacattttagctgctactttgagacctcggtgatgttacctggtgtggtcatcccatcttgtcctgttttaaggatatgggtggtgaaagatgaaagaggcagagtttatcccaatgacttctctgtttgagttgggaagcctcaccttcagacccagtaactgtccgcagctgtctgctagtggttgtcttaacatcgtagtcctagtttgcattttttaaatcccctctgtttaaaaggtttgtaaaacaaaaacaaaaaactaagtctgctcagtgaaatgctgtagaaccctaaataagtggtagaagagtgtcactgaattttgtctctgaattcagtataactgagttttgtccatgctggtgtctgggttataggcctgatgggcctggtagttttccatcttgttctggcctagaggtcagtcctttgcacttcctcaaagcttgtgtacagtgctcacctaaatccatctgactacttgttcctgtgccctcttgttttaggcctcgtttacttttaaaaaatgaaattgttcattgctgggagaagaatgttgtaatttttacttattaaagtcaacttgttaagttttttatgtattcctgttgggttttcttgttgatctcatgctagcagagcaaaaattgtaaaatattttgattaaaaatctagggacctttatgtcctatttgaaatgtga

SEQ ID NO: 444598 - DNA, 1934 bp, Homo sapiens
ccccacattacctggcactgtggcgaccccccgtagtcccccttctctgggggctttggcccgaggattgcgtgacccccggaaccgggctttccctgggccccggatgggcccccgcccgtccccagtcccccctgggggcacacaaccgggatccctttcccaaaaaaaaaaaaaaaaaaaaaaaaaaagatgcctggaagagccaggactgaagaggctgaagacataatgagcttggactagtaaacaagtgacattcagttttaggaagtttggggtctgatgggctgagatacaaataaactgaattattttcatacatggctgcttttcaggaccacatggtgacaatgcatgatgtgcttgatgctcagtggctgtatgataaccacaaggatgagagttacctgcggcgagttgtttaccctttggaaaagctgttgacatctcataaacggctggttatgaaagacagtgcagtaaatgccatctgctatggggccaagattatgcttccaggtgttcttcgatatgaggacggcattgaggtcaatcaggagattgtggttatcaccaccaaaggagaagcaatctgcatggctattgcattaatgaccacagcggtcatctctacctgcgaccatggtatagtagccaagatcaagagagtgatcatggagagagacacttaccctcggaagtggggtttaggtccaaaggcaagtcagaagaagctgatgatcaagcagggccttctggacaagcatgggaagcccacagacagcacacctgccacctggaagcaggagtatgttgactacagtgagtctgccaaaaaagaggtggttgctgaagtggtaaaagccccgcaggtagttgccgaagcagcaaaaactgcgaagcggaagcgagagagtgagagtgaaagtgacgagactcctccagcagctcctcagttgatcaagaaggaaaagaagaagagtaagaaggacaagaaggccaaagctggtctggagagcggggccgagcctggagatggggacagtgataccaccaagaagaagaagaagaagaagaaagcaaaagaggtagaattggtttctgagtagtgaaggccacttgaagctggaggagaaactaaagccttattgagaaaacatgttatagatccttttgttgctgagagagtggaacataggtcctagacagggtgaagagttctggcacattttagctgctactttgagacctcggtgatgttacctggtgtggtcatcccatcttgtcctgttttaaggatatgggtggtgaaagatgaaagaggcagagtttatcccaatgacttctctgtttgagttgggaagcctcaccttcagacccagtaactgtccgcagctgtctgctagtggttgtcttaacatcgtagtcctagtttgcattttttaaatcccctctgtttaaaaggtttgtaaaacaaaaacaaaaaactaagtctgctcagtgaaatgctgtagaaccctaaataagtggtagaagagtgtcactgaattttgtctctgaattcagtataactgagttttgtccatgctggtgtctgggttataggcctgatgggcctggtagttttccatcttgttctggcctagaggtcagtcctttgcacttcctcaaagcttgtgtacagtgctcacctaaatccatctgactacttgttcctgtgccctcttgttttaggcctcgtttacttttaaaaaatgaaattgttcattgctgggagaagaatgttgtaatttttacttattaaagtcaacttgttaagttttttatgtattcctgttgggttttcttgttgatctcatgctagcagagcaaaaattgtaaaatattttgattaaaaatctagggacctttatgtcctatttgaaatgtga

SEQ ID NO: 444599 - DNA, 993 bp, Homo sapiens
  misc_feature (1)..(1): n is a, c, g, or t
  misc_feature (5)..(5): n is a, c, g, or t
  misc_feature (7)..(8): n is a, c, g, or t
ngcananngcattgcgcagacgaccagcgggcgcctcggattccgcccccgggatggccccgcctcctcccgccccgcggcaaggcacgcacagggcagtgcgcgggtgggtgggtcctagcagcgcggcctgacgggaccaaggcggcgggagtctgcggtcgttccctcggctgtggaccgggcggcacgcacgcggtgcagggtaacatggcggatgcggaagtaattattttgccaaagaaacataagaagaaaaaggagcggaagtcattgccagaagaagatgtagccgaaatacaacacgctgaagaatttcttatcaaacctgaatccaaagttgctaagttggacacgtctcagtggccccttttgctaaagaattttgataagctgaatgtaaggacaacacactatacacctcttgcatgtggttcaaatcctctgaagagagagattggggactatatcaggacaggtttcattaatcttgacaagccctctaacccctcttcccatgaggtggtagcctggattcgacggatacttcgggtggagaagacagggcacagtggtactctggatcccaaggtgactggttgtttaatcgtgtgcatagaacgagccactcgcttggtgaagtcacaacagagtgcaggcaaagagtatgtggggattgtccggctgcacaatgctattgaaggggggacccagctttctagggccctagaaactctgacaggtgccttattccagcgacccccacttattgctgcagtaaagaggcagctccgagtgaggaccatctacgagagcaaaatgattgaatacgatcctgaaagaagattaggaatcttttgggtgagttgtgaggctggcacctacattcggacattatgtgtgcaccttggttggatgggagtgggggcgatgcgactggggcgcggctgggctggggaaggccctggggcgcttgtgttagccagggggttc

SEQ ID NO: 444600 - DNA, 1061 bp, Homo sapiens
tgagatagatagcgtcttgctcttgctcttgctctgcactccagactgggcgacagagcaagactgtgtctcagaaagaaaaaaaaaaaaaacatagattcagttctgttcagtaggtatgcggtactgtcctaggtatctgaatttctgtaaagcttcctgagcaactctgatccagccaggcttatagagcactggtgaagcacatttctcaggcggcctctggagcaggaatcaaaaggattccttgtcagatgtcaggtcctggacttttaggttaaagaaattggtcattttgcctctagtcatactgtgatggggagggtcacaggtgtccagtgcccagaaatgtgagtggaagcagcagcgccttgcgtgtgtgtggtgtagtcatggaccctgcatcccagcttttcttaggccgtgaacgtacctaatttgatggtcgaaacgccagtcggtctgaccgtgtctaggccctgctcctaaggtgtggggagaagggagtcagcagaaatcccactgagctctctgtccccagctgcctcttaggggagccaactggcaggctgaggatctaaggggctggggccttttcctgagcaagcttgagtgcttttgtccagaatagagggtatctgaaatactttgataacaaaaaggcaaaaaaacaaaagtcataaatgcagatttttaaacatcaaatcagactagaagttttaataggaaagctcttgcactgctggacctgactgccacccctcagaggtgaccacttttattactacttttttaatagaaacagggtctcactatgttggccaggctagtcttgaactcctggcctcaagcagttctcctgcctcagcctcccaaagtgctaggatcataggcatttacatcaccaaaagataccactaaaatagctgcccccatttaaaaaaaaaaatcagcctgtcattagcaatgggcttcccattgtggtggatgagatttagctctcaactattttaggagactgtagagatagatatgttacgccagttttttttttttttttg

SEQ ID NO: 444601 - DNA, 2530 bp, Homo sapiens
acgtgtccgccggagtttctccaccagcaacatggccgccgcctgagaggagagccgggccgccgccgtctctgcagcccgcgggtaactgggccgttgccgccgtccgcgctcggcccccgcggagagatcgatgtgtacttggccaagagtctggcggaaaagctgtatctatttcagtaccctgtgcgtccagcctcgatgacctacgatgacattccgcacctctcagccaagatcaagcccaagcagcagaaggtagagcttgagatggccatcgacaccctgaaccccaactattgccgcagcaaaggggagcagattgcgctgaacgtggacggggcctgcgccgacgagaccagcacgtattcctcgaagctgatggacaagcagaccttctgctcttcccagaccaccagtaacacatcccgttatgccgctgcactctacaggcaaggtgagctccacctgacacctttacatggcatcctgcagctgcggcccagcttctcctacctggataaggctgacgccaagcaccgggagagggaggcggccaacgaggcaggggactcttcacaggatgaggcggaagacgatgttaagcagatcacggtgcggttctcccggccggagtcagagcaggcccgccagcgccgtgtgcagtcctatgagttcctgcagaagaagcacgcagaggagccctgggtccacctgcattactatggcctgagggacagtcgctctgagcatgagcgtcagtacctgctgtgccccggctcaagcggggtggagaacacggagctcgtcaagtcacccagtgagtacctgatgatgctgatgccacccagccaggaggaggagaaagacaagcctgtggcccccagcaacgtcctgtcgatggcccagctgcgcacgctgcccctggccgatcagatcaagatcctgatgaagaatgtgaaggtcatgccttttgccaacttgatgagcctcctgggcccctccatcgattccgtggctgttctgcggggcatccagaaggtggcgatgttggtccaagggaactgggtggtgaagagtgacatcctataccccaaggactcgtccagccctcacagcggcgtgcctgctgaggtgctctgcaggggccgagacttcgttatgtggaagttcacgcagagccgctgggtggttaggaaagaggtggcaaccgtgaccaaactctgcgccgaggatgtgaaggacttcctggagcacatggccgtggtgaggatcaacaaaggctgggagttcattctgccttatgatggggagttcatcaagaagcacccggatgtggtccagcggcagcacatgctgtggacgggtatccaggccaaactggaaaaagtctataatcttgtaaaggaaaccatgccaaagaagccggatgcacaatcagggcctgccgggctggtctgtggggaccagcggatccaagtagccaaaaccaaggcccagcagaaccacgcgttgctggagcgggagctgcagcggcggaaggagcagctgcgggtgcctgcggtcccgcccggtgtgcggatcaaggaggagcccgtgagcgaggagggcgaggaggacgaggagcaggaggcggaggaggagcccatggacacttcccccagcggcctccacagcaagctggccaacgggctgcctctcgggcgggctgcgggcacagacagcttcaacgggcacccgccccagggctgcgccagcacccctgtggctcgggaactgaaggccttcgtggaggccacctttcagagacagtttgtgctcacgctgagcgaactcaagcgcctcttcaatctgcacttggccagcctgccccccggccacacactcttcagcggcatctcggaccgcatgctacaggacacggtgctggccgccggttgcaagcagatactggtgccttttcccccccagactgctgcttccccggatgagcagaaggtgtttgccctctgggagtctggagacatgagtgatcagcatcgacaggttttgcttgaaattttttccaaaaattaccgggtacgccgaaacatgatccagtctcggttgactcaagagtgtggagaagatctcagtaaacaggaggtggataaagtactaaaggactgctgtgtaagctatggtggcatgtggtaccttaaagggacagtacagtcttgacaatagtagcaaactactaacccagcaaatctaagcccaaggaagaagggcggaaccagaagtagggcctcgacttgcttcagacgacacagagcaagaggaactgaccatctcatgacctgtggcattgcacggtgcagtggacagaagggattatcctcagccagtcacagggtcagcttaagttagttagatcactcccagaagagaccagctgggaccttctttgcagtacaatttgaaattcctgatgtattttgcttattatttggtttcattctcataataaagagagtgtatactgacatgg

SEQ ID NO: 444602 - DNA, 546 bp, Homo sapiens
  misc_feature (4)..(4): n is a, c, g, or t
aaanactacccctgaggaaagggtggctggtagtagccatggtggtatggttaggcactttttgatttcccatttgtattctattcactaatcataaatcgagtgttgacattgtggacagaatgtaattagctccttttcctgcaaaaatctgtgcttaccctgtttctctctcataggactgctgtgtaagctatggtggcatgtggtaccttaaagggacagtacagtcttgacaatagtagcaaactactaacccagcaaatctaagcccaaggaagaagggcggaaccagaagtagggcctcgacttgcttcagacgacacagagcaagaggaactgaccatctcatgacctgtggcattgcacggtgcagtggacagaagggattatcctcagccagtcacagggtcagcttaagttagttagatcactcccagaagagaccagctgggaccttctttgcagtacaatttgaaattcctgatgtattttgcttattatttggtttcattctcataataaagagagtgtatactgacatgg

SEQ ID NO: 444603 - DNA, 3699 bp, Homo sapiens
acgtgtccgccggagtttctccaccagcaacatggccgccgcctgagaggagagccgggccgccgccgtctctgcagcccgcgggtaactgggccgttgccgccgtccgcgctcggcccccgcggagagatcgagctgaaggactgcgcggctggctctcctctagtatggccaatgaagaggatgacccagttgtacaggagatcgatgtgtacttggccaagagtctggcggaaaagctgtatctatttcagtaccctgtgcgtccagcctcgatgacctacgatgacattccgcacctctcagccaagatcaagcccaagcagcagaaggtagagcttgagatggccatcgacaccctgaaccccaactattgccgcagcaaaggggagcagattgcgctgaacgtggacggggcctgcgccgacgagaccagcacgtattcctcgaagctgatggacaagcagaccttctgctcttcccagaccaccagtaacacatcccgttatgccgctgcactctacaggcaaggtgagctccacctgacacctttacatggcatcctgcagctgcggcccagcttctcctacctggataaggctgacgccaagcaccgggagagggaggcggccaacgaggcaggggactcttcacaggatgaggcggaagacgatgttaagcagatcacggtgcggttctcccggccggagtcagagcaggcccgccagcgccgtgtgcagtcctatgagttcctgcagaagaagcacgcagaggagccctgggtccacctgcattactatggcctgagggacagtcgctctgagcatgagcgtcagtacctgctgtgccccggctcaagcggggtggagaacacggagctcgtcaagtcacccagtgagtacctgatgatgctgatgccacccagccaggaggaggagaaagacaagcctgtggcccccagcaacgtcctgtcgatggcccagctgcgcacgctgcccctggccgatcagatcaagatcctgatgaagaatgtgaaggtcatgccttttgccaacttgatgagcctcctgggcccctccatcgattccgtggctgttctgcggggcatccagaaggtggcgatgttggtccaagggaactgggtggtgaagagtgacatcctataccccaaggactcgtccagccctcacagcggcgtgcctgctgaggtgctctgcaggggccgagacttcgttatgtggaagttcacgcagagccgctgggtggttaggaaagaggtggcaaccgtgaccaaactctgcgccgaggatgtgaaggacttcctggagcacatggccgtggtgaggatcaacaaaggctgggagttcattctgccttatgatggggagttcatcaagaagcacccggatgtggtccagcggcagcacatgctgtggacgggtatccaggccaaactggaaaaagtctataatcttgtaaaggaaaccatgccaaagaagccggatgcacaatcagggcctgccgggctggtctgtggggaccagcggatccaagtagccaaaaccaaggcccagcagaaccacgcgttgctggagcgggagctgcagcggcggaaggagcagctgcgggtgcctgcggtcccgcccggtgtgcggatcaaggaggagcccgtgagcgaggagggcgaggaggacgaggagcaggaggcggaggaggagcccatggacacttcccccagcggcctccacagcaagctggccaacgggctgcctctcgggcgggctgcgggcacagacagcttcaacgggcacccgccccagggctgcgccagcacccctgtggctcgggaactgaaggccttcgtggaggccacctttcagagacagtttgtgctcacgctgagcgaactcaagcgcctcttcaatctgcacttggccagcctgccccccggccacacactcttcagcggcatctcggaccgcatgctacaggacacggtgctggccgccggttgcaagcagatactggtgccttttcccccccagactgctgcttccccggatgagcagaaggtgtttgccctctgggagtctggagacatgagtgatcagcatcgacaggttttgcttgaaattttttccaaaaattaccgggtacgccgaaacatgatccagtctcggttgactcaagagtgtggagaagatctcagtaaacaggaggtggataaagtactaaaggactgctgtgtaagctatggtggcatgtggtaccttaaagggacagtacagtcttgacaatagtagcaaactactaacccagcaaatctaagcccaaggaagaagggcggaaccagaagtagggcctcgacttgcttcagacgacacagagcaagaggaactgaccatctcatgacctgtggcattgcacggtgcagtggacagaagggattatcctcagccagtcacagggtcagcttaagttagttagatcactcccagaagagaccagctgggaccttctttgcagtacaatttgaaattcctgatgtattttgcttattatttggtttcattctcataataaagagagtgtatactgacatgggcaggatgataaaaatcatggtttaatattttcttttgtaaacttaatgccaacaaggtctaagttatgtttacaacatgaagaaaacctcaaagttcttaatttttaaaatgcctagaagacaatatttagtcttggattatctatctgctaagacctccaccaatttcattaaaccaaattgaattattctattcttgggattctgtggccacttcacctttgacaacaacctactttatgtagcagtctcaactgtttacatgaaccatagcaaaaaaatcagaatcaaatccatctccttttaatgtttgcagaaagatgcaaacaaaaccaggtaagtatggaacaatgtgtaagtgaggttatcacactttgatgtaaaaatttctattttgtgtatttttaaaataaatgcaaacactaaactagcatcatggtgctatcttcaaatggttacaggaaggcgatcttgttgggctcagcgttacgtgtatctagagggaacggagctaatggaggaagacagagcagcactgtccactagaaagaggcgagtcacgtacataattttgaaagtttctagcaaccacattagtttaaaaaggtcatgttagcatattatttagctcaaaatatctaaaacatcaacataaggtaaaagtcttcaaaatctggcattttacactttcctcaacactcagtttggactagccacatcataagtgctccgatgccacatggggctatttgcgacagtattggatagcacagccctagaaactgatggaaaaaataagagtaagctaggttggatgacatgtgaattttggtatctagataaggctttcgccatcttttttgtacaacacagtcactaattgtctgaaggtttaaatgacggtctatgctatttccccactccccccaaaataaaacatctaatattttagctatagaatcactaaggcattgatcaaggatgtactttgccaaataagtatttggtaacatcacttaacaagttgatcgtgtattgattctgttaacatatgtgaacctgaaaagtaaagttaccaaaagcgatttggaata

SEQ ID NO: 444604 - DNA, 3573 bp, Homo sapiens
acgtgtccgccggagtttctccaccagcaacatggccgccgcctgagaggagagccgggccgccgccgtctctgcagcccgcgggtaactgggccgttgccgccgtccgcgctcggcccccgcggagagatcgagctgaaggactgcgcggctggctctcctctagtatggccaatgaagaggatgacccagttgtacaggagatcgatgtgtacttggccaagagtctggcggaaaagctgtatctatttcagtaccctgtgcgtccagcctcgatgacctacgatgacattccgcacctctcagccaagatcaagcccaagcagcagaaggtagagcttgagatggccatcgacaccctgaaccccaactattgccgcagcaaaggggagcagattgcgctgaacgtggacggggcctgcgccgacgagaccagcacgtattcctcgaagctgatggacaagcagaccttctgctcttcccagaccaccagtaacacatcccgttatgccgctgcactctacaggcaaggtgagctccacctgacacctttacatggcatcctgcagctgcggcccagcttctcctacctggataaggctgacgccaagcaccgggagagggaggcggccaacgaggcaggggactcttcacaggatgaggcggaagacgatgttaagcagatcacggtgcggttctcccggccggagtcagagcaggcccgccagcgccgtgtgcagtcctatgagttcctgcagaagaagcacgcagaggagccctgggtccacctgcattactatggcctgagggacagtcgctctgagcatgagcgtcagtacctgctgtgccccggctcaagcggggtggagaacacggagctcgtcaagtcacccagtgagtacctgatgatgctgatgccacccagccaggaggaggagaaagacaagcctgtggcccccagcaacgtcctgtcgatggcccagctgcgcacgctgcccctggccgatcagatcaagatcctgatgaagaatgtgaaggtcatgccttttgccaacttgatgagcctcctgggcccctccatcgattccgtggctgttctgcggggcatccagaaggtggcgatgttggtccaagggaactgggtggtgaagagtgacatcctataccccaaggactcgtccagccctcacagcggcgtgcctgctgaggtgctctgcaggggccgagacttcgttatgtggaagttcacgcagagccgctgggtggttaggaaagaggtggcaaccgtgaccaaactctgcgccgaggatgtgaaggacttcctggagcacatggccgtggtgaggatcaacaaaggctgggagttcattctgccttatgatggggagttcatcaagaagcacccggatgtggtccagcggcagcacatgctgtggacgggtatccaggccaaactggaaaaagtctataatcttgtaaaggaaaccatgccaaagaagccggatgcacaatcagggcctgccgggctggtctgtggggaccagcggatccaagtagccaaaaccaaggcccagcagaaccacgcgttgctggagcgggagctgcagcggcggaaggagcagctgcgggtgcctgcggtcccgcccggtgtgcggatcaaggaggagcccgtgagcgaggagggcgaggaggacgaggagcaggaggcggaggaggagcccatggacacttcccccagcggcctccacagcaagctggccaacgggctgcctctcgggcgggctgcgggcacagacagcttcaacgggcacccgccccagggctgcgccagcacccctgtggctcgggaactgaaggccttcgtggaggccacctttcagagacagtttgtgctcacgctgagcgaactcaagcgcctcttcaatctgcacttggccagcctgccccccggccacacactcttcagcggcatctcggaccgcatgctacaggacacggtgctggccgccggttgcaagcagatactggtgccttttcccccccagactgctgcttccccggatgagcagaaggtgtttgccctctgggagtctggagacatgagtgatcaggactgctgtgtaagctatggtggcatgtggtaccttaaagggacagtacagtcttgacaatagtagcaaactactaacccagcaaatctaagcccaaggaagaagggcggaaccagaagtagggcctcgacttgcttcagacgacacagagcaagaggaactgaccatctcatgacctgtggcattgcacggtgcagtggacagaagggattatcctcagccagtcacagggtcagcttaagttagttagatcactcccagaagagaccagctgggaccttctttgcagtacaatttgaaattcctgatgtattttgcttattatttggtttcattctcataataaagagagtgtatactgacatgggcaggatgataaaaatcatggtttaatattttcttttgtaaacttaatgccaacaaggtctaagttatgtttacaacatgaagaaaacctcaaagttcttaatttttaaaatgcctagaagacaatatttagtcttggattatctatctgctaagacctccaccaatttcattaaaccaaattgaattattctattcttgggattctgtggccacttcacctttgacaacaacctactttatgtagcagtctcaactgtttacatgaaccatagcaaaaaaatcagaatcaaatccatctccttttaatgtttgcagaaagatgcaaacaaaaccaggtaagtatggaacaatgtgtaagtgaggttatcacactttgatgtaaaaatttctattttgtgtatttttaaaataaatgcaaacactaaactagcatcatggtgctatcttcaaatggttacaggaaggcgatcttgttgggctcagcgttacgtgtatctagagggaacggagctaatggaggaagacagagcagcactgtccactagaaagaggcgagtcacgtacataattttgaaagtttctagcaaccacattagtttaaaaaggtcatgttagcatattatttagctcaaaatatctaaaacatcaacataaggtaaaagtcttcaaaatctggcattttacactttcctcaacactcagtttggactagccacatcataagtgctccgatgccacatggggctatttgcgacagtattggatagcacagccctagaaactgatggaaaaaataagagtaagctaggttggatgacatgtgaattttggtatctagataaggctttcgccatcttttttgtacaacacagtcactaattgtctgaaggtttaaatgacggtctatgctatttccccactccccccaaaataaaacatctaatattttagctatagaatcactaaggcattgatcaaggatgtactttgccaaataagtatttggtaacatcacttaacaagttgatcgtgtattgattctgttaacatatgtgaacctgaaaagtaaagttaccaaaagcgatttggaata

SEQ ID NO: 444605 - DNA, 2788 bp, Homo sapiens
acgtgtccgccggagtttctccaccagcaacatggccgccgcctgagaggagagccgggccgccgccgtctctgcagcccgcgggtaactgggccgttgccgccgtccgcgctcggcccccgcggagagatcgagctgaaggactgcgcggctggctctcctctagtatggccaatgaagaggatgacccagttgtacaggagatcgatgtgtacttggccaagagtctggcggaaaagctgtatctatttcagtaccctgtgcgtccagcctcgatgacctacgatgacattccgcacctctcagccaagatcaagcccaagcagcagaaggtagagcttgagatggccatcgacaccctgaaccccaactattgccgcagcaaaggggagcagattgcgctgaacgtggacggggcctgcgccgacgagaccagcacgtattcctcgaagctgatggacaagcagaccttctgctcttcccagaccaccagtaacacatcccgttatgccgctgcactctacaggcaaggtgagctccacctgacacctttacatggcatcctgcagctgcggcccagcttctcctacctggataaggctgacgccaagcaccgggagagggaggcggccaacgaggcaggggactcttcacaggatgaggcggaagacgatgttaagcagatcacggtgcggttctcccggccggagtcagagcaggcccgccagcgccgtgtgcagtcctatgagttcctgcagaagaagcacgcagaggagccctgggtccacctgcattactatggcctgagggacagtcgctctgagcatgagcgtcagtacctgctgtgccccggctcaagcggggtggagaacacggagctcgtcaagtcacccagtgagtacctgatgatgctgatgccacccagccaggaggaggagaaagacaagcctgtggcccccagcaacgtcctgtcgatggcccagctgcgcacgctgcccctggccgatcagatcaagatcctgatgaagaatgtgaaggtcatgccttttgccaacttgatgagcctcctgggcccctccatcgattccgtggctgttctgcggggcatccagaaggtggcgatgttggtccaagggaactgggtggtgaagagtgacatcctataccccaaggactcgtccagccctcacagcggcgtgcctgctgaggtgctctgcaggggccgagacttcgttatgtggaagttcacgcagagccgctgggtggttaggaaagaggtggcaaccgtgaccaaactctgcgccgaggatgtgaaggacttcctggagcacatggccgtggtgaggatcaacaaaggctgggagttcattctgccttatgatggggagttcatcaagaagcacccggatgtggtccagcggcagcacatgctgtggacgggtatccaggccaaactggaaaaagtctataatcttgtaaaggaaaccatgccaaagaagccggatgcacaatcagggcctgccgggctggtctgtggggaccagcggatccaagtagccaaaaccaaggcccaggctgcgccagcacccctgtggctcgggaactgaaggccttcgtggaggccacctttcagagacagtttgtgctcacgctgagcgaactcaagcgcctcttcaatctgcacttggccagcctgccccccggccacacactcttcagcggcatctcggaccgcatgctacaggacacggtgctggccgccggttgcaagcagatactggtgccttttcccccccagactgctgcttccccggatgagcagaaggtgtttgccctctgggagtctggagacatgagtgatcagcatcgacaggttttgcttgaaattttttccaaaaattaccgggtacgccgaaacatgatccagtctcggttgactcaagagtgtggagaagatctcagtaaacaggaggtggataaagtactaaaggactgctgtgtaagctatggtggcatgtggtaccttaaagggacagtacagtcttgacaatagtagcaaactactaacccagcaaatctaagcccaaggaagaagggcggaaccagaagtagggcctcgacttgcttcagacgacacagagcaagaggaactgaccatctcatgacctgtggcattgcacggtgcagtggacagaagggattatcctcagccagtcacagggtcagcttaagttagttagatcactcccagaagagaccagctgggaccttctttgcagtacaatttgaaattcctgatgtattttgcttattatttggtttcattctcataataaagagagtgtatactgacatgggcaggatgataaaaatcatggtttaatattttcttttgtaaacttaatgccaacaaggtctaagttatgtttacaacatgaagaaaacctcaaagttcttaatttttaaaatgcctagaagacaatatttagtcttggattatctatctgctaagacctccaccaatttcattaaaccaaattgaattattctattcttgggattctgtggccacttcacctttgacaacaacctactttatgtagcagtctcaactgtttacatgaaccatagcaaaaaaatcagaatcaaatccatctccttttaatgtttgcagaaagatgcaaacaaaaccaggtaagtatggaacaatgtgtaagtgaggttatcacactttgatgtaaaaatttctattttgtgtatttttaaaataaatgcaaacactaaacta

SEQ ID NO: 444606 - DNA, 2961 bp, Homo sapiens
acgtgtccgccggagtttctccaccagcaacatggccgccgcctgagaggagagccgggccgccgccgtctctgcagcccgcgggtaactgggccgttgccgccgtccgcgctcggcccccgcggagagatcgatgtgtacttggccaagagtctggcggaaaagctgtatctatttcagtaccctgtgcgtccagcctcgatgacctacgatgacattccgcacctctcagccaagatcaagcccaagcagcagaaggtagagcttgagatggccatcgacaccctgaaccccaactattgccgcagcaaaggggagcagattgcgctgaacgtggacggggcctgcgccgacgagaccagcacgtattcctcgaagctgatggacaagcagaccttctgctcttcccagaccaccagtaacacatcccgttatgccgctgcactctacaggcaaggtgagctccacctgacacctttacatggcatcctgcagctgcggcccagcttctcctacctggataaggctgacgccaagcaccgggagagggaggcggccaacgaggcaggggactcttcacaggatgaggcggaagacgatgttaagcagatcacggtgcggttctcccggccggagtcagagcaggcccgccagcgccgtgtgcagtcctatgagttcctgcagaagaagcacgcagaggagccctgggtccacctgcattactatggcctgagggacagtcgctctgagcatgagcgtcagtacctgctgtgccccggctcaagcggggtggagaacacggagctcgtcaagtcacccagtgagtacctgatgatgctgatgccacccagccaggaggaggagaaagacaagcctgtggcccccagcaacgtcctgtcgatggcccagctgcgcacgctgcccctggccgatcagatcaagatcctgatgaagaatgtgaaggtcatgccttttgccaacttgatgagcctcctgggcccctccatcgattccgtggctgttctgcggggcatccagaaggtggcgatgttggtccaagggaactgggtggtgaagagtgacatcctataccccaaggactcgtccagccctcacagcggcgtgcctgctgaggtgctctgcaggggccgagacttcgttatgtggaagttcacgcagagccgctgggtggttaggaaagaggtggcaaccgtgaccaaactctgcgccgaggatgtgaaggacttcctggagcacatggccgtggtgaggatcaacaaaggctgggagttcattctgccttatgatggggagttcatcaagaagcacccggatgtggtccagcggcagcacatgctgtggacgggtatccaggccaaactggaaaaagtctataatcttgtaaaggaaaccatgccaaagaagccggatgcacaatcagggcctgccgggctggtctgtggggaccagcggatccaagtagccaaaaccaaggcccagcagaaccacgcgttgctggagcgggagctgcagcggcggaaggagcagctgcgggtgcctgcggtcccgcccggtgtgcggatcaaggaggagcccgtgagcgaggagggcgaggaggacgaggagcaggaggcggaggaggagcccatggacacttcccccagcggcctccacagcaagctggccaacgggctgcctctcgggcgggctgcgggcacagacagcttcaacgggcacccgccccagggctgcgccagcacccctgtggctcgggaactgaaggccttcgtggaggccacctttcagagacagtttgtgctcacgctgagcgaactcaagcgcctcttcaatctgcacttggccagcctgccccccggccacacactcttcagcggcatctcggaccgcatgctacaggacacggtgctggccgccggttgcaagcagatactggtgccttttcccccccagactgctgcttccccggatgagcagaaggtgtttgccctctgggagtctggagacatgagtgatcagcatcgacaggttttgcttgaaattttttccaaaaattaccgggtacgccgaaacatgatccagtctcggttgactcaagagtgtggagaagatctcagtaaacaggaggtggataaagtactaaaggactgctgtgtaagctatggtggcatgtggtaccttaaagggacagtacagtcttgacaatagtagcaaactactaacccagcaaatctaagcccaaggaagaagggcggaaccagaagtagggcctcgacttgcttcagacgacacagagcaagaggaactgaccatctcatgacctgtggcattgcacggtgcagtggacagaagggattatcctcagccagtcacagggtcagcttaagttagttagatcactcccagaagagaccagctgggaccttctttgcagtacaatttgaaattcctgatgtattttgcttattatttggtttcattctcataataaagagagtgtatactgacatgggcaggatgataaaaatcatggtttaatattttcttttgtaaacttaatgccaacaaggtctaagttatgtttacaacatgaagaaaacctcaaagttcttaatttttaaaatgcctagaagacaatatttagtcttggattatctatctgctaagacctccaccaatttcattaaaccaaattgaattattctattcttgggattctgtggccacttcacctttgacaacaacctactttatgtagcagtctcaactgtttacatgaaccatagcaaaaaaatcagaatcaaatccatctccttttaatgtttgcagaaagatgcaaacaaaaccaggtaagtatggaacaatgtgtaagtgaggttatcacactttgatgtaaaaatttctattttgtgtatttttaaaataaatgcaaacactaaacta

SEQ ID NO: 444607 - DNA, 2981 bp, Homo sapiens
acgtgtccgccggagtttctccaccagcaacatggccgccgcctgagaggagagccgggccgccgccgtctctgcagcccgcgggtaactgggccgttgccgccgtccgcgctcggcccccgcggagagatcgagctgaaggactgcgcggctggctctcctctagtatggccaatgaagaggatgacccagttgtacaggagatcgatgtgtacttggccaagagtctggcggaaaagctgtatctatttcagtaccctgtgcgtccagcctcgatgacctacgatgacattccgcacctctcagccaagatcaagcccaagcagcagaaggtagagcttgagatggccatcgacaccctgaaccccaactattgccgcagcaaaggggagcagattgcgctgaacgtggacggggcctgcgccgacgagaccagcacgtattcctcgaagctgatggacaagcagaccttctgctcttcccagaccaccagtaacacatcccgttatgccgctgcactctacaggcaaggtgagctccacctgacacctttacatggcatcctgcagctgcggcccagcttctcctacctggataaggctgacgccaagcaccgggagagggaggcggccaacgaggcaggggactcttcacaggatgaggcggaagacgatgttaagcagatcacggtgcggttctcccggccggagtcagagcaggcccgccagcgccgtgtgcagtcctatgagttcctgcagaagaagcacgcagaggagccctgggtccacctgcattactatggcctgagggacagtcgctctgagcatgagcgtcagtacctgctgtgccccggctcaagcggggtggagaacacggagctcgtcaagtcacccagtgagtacctgatgatgctgatgccacccagccaggaggaggagaaagacaagcctgtggcccccagcaacgtcctgtcgatggcccagctgcgcacgctgcccctggccgatcagatcaagatcctgatgaagaatgtgaaggtcatgccttttgccaacttgatgagcctcctgggcccctccatcgattccgtggctgttctgcggggcatccagaaggtggcgatgttggtccaagggaactgggtggtgaagagtgacatcctataccccaaggactcgtccagccctcacagcggcgtgcctgctgaggtgctctgcaggggccgagacttcgttatgtggaagttcacgcagagccgctgggtggttaggaaagaggtggcaaccgtgaccaaactctgcgccgaggatgtgaaggacttcctggagcacatggccgtggtgaggatcaacaaaggctgggagttcattctgccttatgatggggagttcatcaagaagcacccggatgtggtccagcggcagcacatgctgtggacgggtatccaggccaaactggaaaaagtctataatcttgtaaaggaaaccatgccaaagaagccggatgcacaatcagggcctgccgggctggtctgtggggaccagcggatccaagtagccaaaaccaaggcccagcagaaccacgcgttgctggagcgggagctgcagcggcggaaggagcagctgcgggtgcctgcggtcccgcccggtgtgcggatcaaggaggagcccgtgagcgaggagggcgaggaggacgaggagcaggaggcggaggaggagcccatggacacttcccccagcggcctccacagcaagctggccaacgggctgcctctcgggcgggctgcgggcacagacagcttcaacgggcacccgccccagggctgcgccagcacccctgtggctcgggaactgaaggccttcgtggaggccacctttcagagacagtttgtgctcacgctgagcgaactcaagcgcctcttcaatctgcacttggccagcctgccccccggccacacactcttcagcggcatctcggaccgcatgctacaggacacggtgctggccgccggttgcaagcagatactggtgccttttcccccccagactgctgcttccccggatgagcagaaggtgtttgccctctgggagtctggagacatgagtgatcagcatcgacaggttttgcttgaaattttttccagagaagatctcagtaaacaggaggtggataaagtactaaaggactgctgtgtaagctatggtggcatgtggtaccttaaagggacagtacagtcttgacaatagtagcaaactactaacccagcaaatctaagcccaaggaagaagggcggaaccagaagtagggcctcgacttgcttcagacgacacagagcaagaggaactgaccatctcatgacctgtggcattgcacggtgcagtggacagaagggattatcctcagccagtcacagggtcagcttaagttagttagatcactcccagaagagaccagctgggaccttctttgcagtacaatttgaaattcctgatgtattttgcttattatttggtttcattctcataataaagagagtgtatactgacatgggcaggatgataaaaatcatggtttaatattttcttttgtaaacttaatgccaacaaggtctaagttatgtttacaacatgaagaaaacctcaaagttcttaatttttaaaatgcctagaagacaatatttagtcttggattatctatctgctaagacctccaccaatttcattaaaccaaattgaattattctattcttgggattctgtggccacttcacctttgacaacaacctactttatgtagcagtctcaactgtttacatgaaccatagcaaaaaaatcagaatcaaatccatctccttttaatgtttgcagaaagatgcaaacaaaaccaggtaagtatggaacaatgtgtaagtgaggttatcacactttgatgtaaaaatttctattttgtgtatttttaaaataaatgcaaacactaaacta

SEQ ID NO: 444608 - DNA, 2998 bp, Homo sapiens
acgtgtccgccggagtttctccaccagcaacatggccgccgcctgagaggagagccgggccgccgccgtctctgcagcccgcgggtaactgggccgttgccgccgtccgcgctcggcccccgcggagagatcgagctgaaggactgcgcggctggctctcctctagtatggccaatgaagaggatgacccagttgtacaggagatcgatgtgtacttggccaagagtctggcggaaaagctgtatctatttcagtaccctgtgcgtccagcctcgatgacctacgatgacattccgcacctctcagccaagatcaagcccaagcagcagaaggtagagcttgagatggccatcgacaccctgaaccccaactattgccgcagcaaaggggagcagattgcgctgaacgtggacggggcctgcgccgacgagaccagcacgtattcctcaccaccagtaacacatcccgttatgccgctgcactctacaggcaaggtgagctccacctgacacctttacatggcatcctgcagctgcggcccagcttctcctacctggataaggctgacgccaagcaccgggagagggaggcggccaacgaggcaggggactcttcacaggatgaggcggaagacgatgttaagcagatcacggtgcggttctcccggccggagtcagagcaggcccgccagcgccgtgtgcagtcctatgagttcctgcagaagaagcacgcagaggagccctgggtccacctgcattactatggcctgagggacagtcgctctgagcatgagcgtcagtacctgctgtgccccggctcaagcggggtggagaacacggagctcgtcaagtcacccagtgagtacctgatgatgctgatgccacccagccaggaggaggagaaagacaagcctgtggcccccagcaacgtcctgtcgatggcccagctgcgcacgctgcccctggccgatcagatcaagatcctgatgaagaatgtgaaggtcatgccttttgccaacttgatgagcctcctgggcccctccatcgattccgtggctgttctgcggggcatccagaaggtggcgatgttggtccaagggaactgggtggtgaagagtgacatcctataccccaaggactcgtccagccctcacagcggcgtgcctgctgaggtgctctgcaggggccgagacttcgttatgtggaagttcacgcagagccgctgggtggttaggaaagaggtggcaaccgtgaccaaactctgcgccgaggatgtgaaggacttcctggagcacatggccgtggtgaggatcaacaaaggctgggagttcattctgccttatgatggggagttcatcaagaagcacccggatgtggtccagcggcagcacatgctgtggacgggtatccaggccaaactggaaaaagtctataatcttgtaaaggaaaccatgccaaagaagccggatgcacaatcagggcctgccgggctggtctgtggggaccagcggatccaagtagccaaaaccaaggcccagcagaaccacgcgttgctggagcgggagctgcagcggcggaaggagcagctgcgggtgcctgcggtcccgcccggtgtgcggatcaaggaggagcccgtgagcgaggagggcgaggaggacgaggagcaggaggcggaggaggagcccatggacacttcccccagcggcctccacagcaagctggccaacgggctgcctctcgggcgggctgcgggcacagacagcttcaacgggcacccgccccagggctgcgccagcacccctgtggctcgggaactgaaggccttcgtggaggccacctttcagagacagtttgtgctcacgctgagcgaactcaagcgcctcttcaatctgcacttggccagcctgccccccggccacacactcttcagcggcatctcggaccgcatgctacaggacacggtgctggccgccggttgcaagcagatactggtgccttttcccccccagactgctgcttccccggatgagcagaaggtgtttgccctctgggagtctggagacatgagtgatcagcatcgacaggttttgcttgaaattttttccaaaaattaccgggtacgccgaaacatgatccagtctcggttgactcaagagtgtggagaagatctcagtaaacaggaggtggataaagtactaaaggactgctgtgtaagctatggtggcatgtggtaccttaaagggacagtacagtcttgacaatagtagcaaactactaacccagcaaatctaagcccaaggaagaagggcggaaccagaagtagggcctcgacttgcttcagacgacacagagcaagaggaactgaccatctcatgacctgtggcattgcacggtgcagtggacagaagggattatcctcagccagtcacagggtcagcttaagttagttagatcactcccagaagagaccagctgggaccttctttgcagtacaatttgaaattcctgatgtattttgcttattatttggtttcattctcataataaagagagtgtatactgacatgggcaggatgataaaaatcatggtttaatattttcttttgtaaacttaatgccaacaaggtctaagttatgtttacaacatgaagaaaacctcaaagttcttaatttttaaaatgcctagaagacaatatttagtcttggattatctatctgctaagacctccaccaatttcattaaaccaaattgaattattctattcttgggattctgtggccacttcacctttgacaacaacctactttatgtagcagtctcaactgtttacatgaaccatagcaaaaaaatcagaatcaaatccatctccttttaatgtttgcagaaagatgcaaacaaaaccaggtaagtatggaacaatgtgtaagtgaggttatcacactttgatgtaaaaatttctattttgtgtatttttaaaataaatgcaaacactaaacta

SEQ ID NO: 444609 - DNA, 5166 bp, Homo sapiens
acgtgtccgccggagtttctccaccagcaacatggccgccgcctgagaggagagccgggccgccgccgtctctgcagcccgcgggtaactgggccgttgccgccgtccgcgctcggcccccgcggagagatcgagctgaaggactgcgcggctggctctcctctagtatggccaatgaagaggatgacccagttgtacaggagatcgatgtgtacttggccaagagtctggcggaaaagctgtatctatttcagtaccctgtgcgtccagcctcgatgacctacgatgacattccgcacctctcagccaagatcaagcccaagcagcagaaggtagagcttgagatggccatcgacaccctgaaccccaactattgccgcagcaaaggggagcagattgcgctgaacgtggacggggcctgcgccgacgagaccagcacgtattcctcgaagctgatggacaagcagaccttctgctcttcccagaccaccagtaacacatcccgttatgccgctgcactctacaggcaaggtgagctccacctgacacctttacatggcatcctgcagctgcggcccagcttctcctacctggataaggctgacgccaagcaccgggagagggaggcggccaacgaggcaggggactcttcacaggatgaggcggaagacgatgttaagcagatcacggtgcggttctcccggccggagtcagagcaggcccgccagcgccgtgtgcagtcctatgagttcctgcagaagaagcacgcagaggagccctgggtccacctgcattactatggcctgagggacagtcgctctgagcatgagcgtcagtacctgctgtgccccggctcaagcggggtggagaacacggagctcgtcaagtcacccagtgagtacctgatgatgctgatgccacccagccaggaggaggagaaagacaagcctgtggcccccagcaacgtcctgtcgatggcccagctgcgcacgctgcccctggccgatcagatcaagatcctgatgaagaatgtgaaggtcatgccttttgccaacttgatgagcctcctgggcccctccatcgattccgtggctgttctgcggggcatccagaaggtggcgatgttggtccaagggaactgggtggtgaagagtgacatcctataccccaaggactcgtccagccctcacagcggcgtgcctgctgaggtgctctgcaggggccgagacttcgttatgtggaagttcacgcagagccgctgggtggttaggaaagaggtggcaaccgtgaccaaactctgcgccgaggatgtgaaggacttcctggagcacatggccgtggtgaggatcaacaaaggctgggagttcattctgccttatgatggggagttcatcaagaagcacccggatgtggtccagcggcagcacatgctgtggacgggtatccaggccaaactggaaaaagtctataatcttgtaaaggaaaccatgccaaagaagccggatgcacaatcagggcctgccgggctggtctgtggggaccagcggatccaagtagccaaaaccaaggcccagcagaaccacgcgttgctggagcgggagctgcagcggcggaaggagcagctgcgggtgcctgcggtcccgcccggtgtgcggatcaaggaggagcccgtgagcgaggagggcgaggaggacgaggagcaggaggcggaggaggagcccatggacacttcccccagcggcctccacagcaagctggccaacgggctgcctctcgggcgggctgcgggcacagacagcttcaacgggcacccgccccagggctgcgccagcacccctgtggctcgggaactgaaggccttcgtggaggccacctttcagagacagtttgtgctcacgctgagcgaactcaagcgcctcttcaatctgcacttggccagcctgccccccggccacacactcttcagcggcatctcggaccgcatgctacaggacacggtgctggccgccggttgcaagcagatactggtgcctgtaagtagagccctgcctgccaggggcatggggggtggggggtggggagaaccagctgttgggaggccacgtggggacacgggaggccatgcttggtgagcatctgctctcacgtgggcctaggtgtgacatgggcaagtcagcctctctgaggctctattctcatgaaatgggatcatgttgggttttatgtcacaggactgtggtaggggctaaatacggtgtctgaaggcccggcctattgcctggcctgcagcagggcctagtgaaacagggcccctgcctggtttctcaccctgtcccccaccaagaacacctgtttcctactagctttgccattgtttggaatgatttaacttctaagatcgtttgatcttctttgcaatctgcagatgaagaaactgaggctccaaggaatgaaatgtacgtttaaaggtcactacctaggaggtagtagagctggaatttggacctcagtatagtggcctggagttttgaatcctttctgctcagctaagatgagctgcttccccacagctgcgccacgccccagcttgggcctgggtcctggcggcctccctgtgcatcagaagcaagctgaccagctcagcgctgtgctctcagcacttccagtgccaggccttgagtgtggtattgcaagcctcctgccccttccccctgggctgcttttctgtcactgggaggggccctgacgggggagcagagtgcttgctggggaccgtttccctgcgctgaggatagagagcgccaggtgctgcctgaggcacgcctttcccgtgctccttttccacaaggctctgcccagacctggcagcaaaatggggtgaggtggggctgtggtggtctctaagaaagcattgatgttttcattgccaaggtcaggagcgggcctgcagccttgggtgatgatctgaggccaaggcccatccctgtgtatgaggaatagaaactaggacaggaggccttgtggagcctaggctgtctcaggggatcggccctgctggcaggcagccccctgtgggaggtactggcagagttcggagctcctgcccacccagcacatgggtctgggtctccacaagctcacctttcttcatgagctgggccaggacaggcaggacacctgcctgacattagttgttttgggccgctggagtggacagaggtgaggggtgggacatggccaccctcagacaccctcacccctccttccggaccccctctgtccatgttgctttggggtggggccagcgtctccaggagacaccatggccctaactgtaatgctctccttgccatcctgacaaggagactgtattgtagtcacatccaagacgtaagagacctccgatcccagccacctctgtgttgtacatgagggagctgaggtccagggcaagtgaatagatcgagaacttgacttgaactcctggttctgctgcttattagctgtgtgaccatggacagtgagcaaacctctctgagcttacttttccccatgtactacctccccagtttctaatgctcaaatgcaaatgtgtattggaggcctcacagggcttttactggtagtaaccattattgctacttgtgtgatggaaccaggactggaaactaccatcccagatgccccctcccctgtccccttctctccaggacccaggcctgtgtcacacttgtcctggtctacctttggaccaagtggcctggattgcttgggagtcaggcagtgcctctaacccacactgacatggtacatgtgggaagcagttgaaaagaacccccagggtaccccaagagttatggggaagggggcgcccctccatcagggttggcatcttcaggagggaggactctgggtgttaaagcacagttgagttggtgccaggctgatgggaaacagacgcagcttccccactgtacggaggatatctgcagactcgaagccgggcatttcactgggcccatcacactccccctctcgctgaagccctgtcaggccctggggggtgtgctggcctcctccccatggtgaggtgagaggcacaggtttgtggctgcccaaggccctcagagatggtgagtagcagaagctgggattggaacccatgttcctgcatctgggctggggcagacagggagggatgaggcaagcaaatggatccatggggtagagatggacaagcaactcacccctgggccttggtcagtttcccccccagactgctgcttccccggatgagcagaaggtgtttgccctctgggagtctggagacatgagtgatcagcatcgacaggttttgcttgaaattttttccaaaaattaccgggtacgccgaaacatgatccagtctcggttgactcaagagtgtggagaagatctcagtaaacaggaggtggataaagtactaaaggactgctgtgtaagctatggtggcatgtggtaccttaaagggacaacagagcaagaggaactgaccatctcatgacctgtggcattgcacggtgcagtggacagaagggattatcctcagccagtcacagggtcagcttaagttagttagatcactcccagaagagaccagctgggaccttctttgcagtacaatttgaaattcctgatgtattttgcttattatttggtttcattctcataataaagagagtgtatactgacatgggcaggatgataaaaatcatggtttaatattttcttttgtaaacttaatgccaacaaggtctaagttatgtttacaacatgaagaaaacctcaaagttcttaatttttaaaatgcctagaagacaatatttagtcttggattatctatctgctaagacctccaccaatttcattaaaccaaattgaattattctattcttgggattctgtggccacttcacctttgacaacaacctactttatgtagcagtctcaactgtttacatgaaccatagcaaaaaaatcagaatcaaatccatctccttttaatgtttgcagaaagatgcaaacaaaaccaggtaagtatggaacaatgtgtaagtgaggttatcacactttgatgtaaaaatttctattttgtgtatttttaaaataaatgcaaacactaaacta

SEQ ID NO: 444610 - DNA, 2768 bp, Homo sapiens
  misc_feature (2650)..(2652): n is a, c, g, or t
  misc_feature (2674)..(2674): n is a, c, g, or t
  misc_feature (2677)..(2677): n is a, c, g, or t
  misc_feature (2684)..(2684): n is a, c, g, or t
  misc_feature (2688)..(2688): n is a, c, g, or t
  misc_feature (2732)..(2732): n is a, c, g, or t
acgtgtccgccggagtttctccaccagcaacatggccgccgcctgagaggagagccgggccgccgccgtctctgcagcccgcgggtaactgggccgttgccgccgtccgcgctcggcccccgcggagagatcgagctgaaggactgcgcggctggctctcctctagtatggccaatgaagaggatgacccagttgtacaggagatcgatgtgtacttggccaagagtctggcggaaaagctgtatctatttcagtaccctgtgcgtccagcctcgatgacctacgatgacattccgcacctctcagccaagatcaagcccaagcagcagaaggtagagcttgagatggccatcgacaccctgaaccccaactattgccgcagcaaaggggagcagattgcgctgaacgtggacggggcctgcgccgacgagaccagcacgtattcctcgaagctgatggacaagcagaccttctgctcttcccagaccaccagtaacacatcccgttatgccgctgcactctacaggcaaggtgagctccacctgacacctttacatggcatcctgcagctgcggcccagcttctcctacctggataaggctgacgccaagcaccgggagagggaggcggccaacgaggcaggggactcttcacaggatgaggcggaagacgatgttaagcagatcacggtgcggttctcccggccggagtcagagcaggcccgccagcgccgtgtgcagtcctatgagttcctgcagaagaagcacgcagaggagccctgggtccacctgcattactatggcctgagggacagtcgctctgagcatgagcgtcagtacctgctgtgccccggctcaagcggggtggagaacacggagctcgtcaagtcacccagtgagtacctgatgatgctgatgccacccagccaggaggaggagaaagacaagcctgtggcccccagcaacgtcctgtcgatggcccagctgcgcacgctgcccctggccgatcagatcaagatcctgatgaagaatgtgaaggtcatgccttttgccaacttgatgagcctcctgggcccctccatcgattccgtggctgttctgcggggcatccagaaggtggcgatgttggtccaagggaactgggtggtgaagagtgacatcctataccccaaggactcgtccagccctcacagcggcgtgcctgctgaggtgctctgcaggggccgagacttcgttatgtggaagttcacgcagagccgctgggtggttaggaaagaggtggcaaccgtgaccaaactctgcgccgaggatgtgaaggacttcctggagcacatggccgtggtgaggatcaacaaaggctgggagttcattctgccttatgatggggagttcatcaagaagcacccggatgtggtccagcggcagcacatgctgtggacgggtatccaggccaaactggaaaaagtctataatcttgtaaaggaaaccatgccaaagaagccggatgcacaatcagggcctgccgggctggtctgtggggaccagcggatccaagtagccaaaaccaaggcccagcagaaccacgcgttgctggagcgggagctgcagcggcggaaggagcagctgcgggtgcctgcggtcccgcccggtgtgcggatcaaggaggagcccgtgagcgaggagggcgaggaggacgaggagcaggaggcggaggaggagcccatggacacttcccccagcggcctccacagcaagctggccaacgggctgcctctcgggcgggctgcgggcacagacagcttcaacgggcacccgccccagggctgcgccagcacccctgtggctcgggaactgaaggccttcgtggaggccacctttcagagacagtttgtgctcacgctgagcgaactcaagcgcctcttcaatctgcacttggccagcctgccccccggccacacactcttcagcggcatctcggaccgcatgctacaggacacggtgctggccgccggttgcaagcagatactggtgccttttcccccccagactgctgcttccccggatgagcagaaggtgtttgccctctgggagtctggagacatgagtgatcagcatcgacaggttttgcttgaaattttttccaaaaattaccgggtacgccgaaacatgatccagtctcggttgactcaagagtgtggagaagatctcagtaaacaggaggtggataaagtactaaaggactgctgtgtaagctatggtggcatgtggtaccttaaagggacagtacagtcttgacaatagtagcaaactactaacccagcaaatctaagcccaaggaagaagggcggaaccagaagtagggcctcgacttgcttcagacgacacagagcaagaggaactgaccatctcatgacctgtggcattgcacggtgcagtggacagaagggattatcctcagccagtcacagggtcagcttaagttagttagatcactcccagaagagaccagctgggaccttctttgcagtacaatttgaaattcctgatgtattttgcttattatttggtttcattctcataataaagagagtgtatactgacatggacaaaaaaaaaaaaaaaaaaaaaaaaaaaaaaagcggccgctcgannngtcgacgcggccgcgaattcgngcngcaaacngggnctgcgagaagacgacagaagggaaccaagaaatgtacagatttngaatatggtgactaggcaagggcactttgggctata

SEQ ID NO: 444611 - DNA, 1305 bp, Homo sapiens
gggctgcaggaattggcacgagagctggccaacgggctgcctctcgggcgggctgcgggcacagacagcttcaacgggcacccgccccagggctgcgccagcacccctgtggctcgggaactgaaggccttcgtggaggccacctttcagagacagtttgtgctcacgctgagcgaactcaagcgcctcttcaatctgcacttggccagcctgccccccggccacacactcttcagcggcatctcggaccgcatgctacaggacacggtgctggccgccggttgcaagcagatactggtgccttttcccccccagactgctgcttccccggatgagcagaaggtgtttgccctctgggagtctggagacatgagtgatcagcatcgacaggttttgcttgaaattttttccaaaaattaccgggtacgccgaaacatgatccagtctcggttgactcaagagtgtggagaagatctcagtaaacaggaggtggataaagtactaaaggactgctgtgtaagctatggtggcatgtggtaccttaaagggacagtacagtcttgacaatagtagcaaactactaacccagcaaatctaagcccaaggaagaagggcggaaccagaagtagggcctcgacttgcttcagacgacacagagcaagaggaactgaccatctcatgacctgtggcattgcacggtgcagtggacagaagggattatcctcagccagtcacagggtcagcttaagttagttagatcactcccagaagagaccagctgggaccttctttgcagtacaatttgaaattcctgatgtattttgcttattatttggtttcattctcataataaagagagtgtatactgacatgggcaggatgataaaaatcatggtttaatattttcttttgtaaacttaatgccaacaaggtctaagttatgtttacaacatgaagaaaacctcaaagttcttaatttttaaaatgcctagaagacaatatttagtcttggattatctatctgctaagacctccaccaatttcattaaaccaaattgaattattctattcttgggattctgtggccacttcacctttgacaacaacctactttatgtagcagtctcaactgtttacatgaaccatagcaaaaaaatcagaatcaaatccatctccttttaatgtttgcagaaagatgcaaacaaaaccaggtaagtatggaacaatgtgtaagtgaggttatcacactttgatgtaaaaatttctattttgtgtatttttaaaataaatgcaaacactaaacta

SEQ ID NO: 444612 - DNA, 2504 bp, Homo sapiens
acgtgtccgccggagtttctccaccagcaacatggccgccgcctgagaggagagccgggccgccgccgtctctgcagcccgcgggtaactgggccgttgccgccgtccgcgctcggcccccgcggagagatcgagctgaaggactgcgcggctggctctcctctagtatggccaatgaagaggatgacccagttgtacaggagatcgatgtgtacttggccaagagtctggcggaaaagctgtatctatttcagtaccctgtgcgtccagcctcgatgacctacgatgacattccgcacctctcagccaagatcaagcccaagcagcagaaggtagagcttgagatggccatcgacaccctgaaccccaactattgccgcagcaaaggggagcagattgcgctgaacgtggacggggcctgcgccgacgagaccagcacgtattcctcgaagctgatggacaagcagaccttctgctcttcccagaccaccagtaacacatcccgttatgccgctgcactctacaggcaaggtgagctccacctgacacctttacatggcatcctgcagctgcggcccagcttctcctacctggataaggctgacgccaagcaccgggagagggaggcggccaacgaggcaggggactcttcacaggatgaggcggaagacgatgttaagcagatcacggtgcggttctcccggccggagtcagagcaggcccgccagcgccgtgtgcagtcctatgagttcctgcagaagaagcacgcagaggagccctgggtccacctgcattactatggcctgagggacagtcgctctgagcatgagcgtcagtacctgctgtgccccggctcaagcggggtggagaacacggagctcgtcaagtcacccagtgagtacctgatgatgctgatgccacccagccaggaggaggagaaagacaagcctgtggcccccagcaacgtcctgtcgatggcccagctgcgcacgctgcccctggccgatcagatcaagatcctgatgaagaatgtgaaggtcatgccttttgccaacttgatgagcctcctgggcccctccatcgattccgtggctgttctgcggggcatccagaaggtggcgatgttggtccaagggaactgggtggtgaagagtgacatcctataccccaaggactcgtccagccctcacagcggcgtgcctgctgaggtgctctgcaggggccgagacttcgttatgtggaagttcacgcagagccgctgggtggttaggaaagaggtggcaaccgtgaccaaactctgcgccgaggatgtgaaggacttcctggagcacatggccgtggtgaggatcaacaaaggctgggagttcattctgccttatgatggggagttcatcaagaagcacccggatgtggtccagcggcagcacatgctgtggacgggtatccaggccaaactggaaaaagtctataatcttgtaaaggaaaccatgccaaagaagccggatgcacaatcagggcctgccgggctggtctgtggggaccagcggatccaagtagccaaaaccaaggcccagcagaaccacgcgttgctggagcgggagctgcagcggcggaaggagcagctgcgggtgcctgcggtcccgcccggtgtgcggatcaaggaggagcccgtgagcgaggagggcgaggaggacgaggagcaggaggcggaggaggagcccatggacacttcccccagcggcctccacagcaagctggccaacgggctgcctctcgggcgggctgcgggcacagacagcttcaacgggcacccgccccagggctgcgccagcacccctgtggctcgggaactgaaggccttcgtggaggccacctttcagagacagtttgtgctcacgctgagcgaactcaagcgcctcttcaatctgcacttggccagcctgccccccggccacacactcttcagcggcatctcggaccgcatgctacaggacacggtgctggccgccggttgcaagcagatactggtgccttttcccccccagactgctgcttccccggatgagcagaaggtgtttgccctctgggagtctggagacatgagtgatcagcatcgacaggttttgcttgaaattttttccaaaaattaccgggtacgccgaaacatgatccagtctcggttgactcaagagtgtggagaagatctcagtaaacaggaggtggataaagtactaaaggactgctgtgtaagctatggtggcatgtggtaccttaaagggacaacagagcaagaggaactgaccatctcatgacctgtggcattgcacggtgcagtggacagaagggattatcctcagccagtcacagggtcagcttaagttagttagatcactcccagaagagaccagctgggaccttctttgcagtacaatttgaaattcctgatgtattttgcttattatttggtttcattctcataataaagagagtgtatactgacatgg

SEQ ID NO: 444613 - DNA, 977 bp, Homo sapiens
  misc_feature (4)..(4): n is a, c, g, or t
aaanactacccctgaggaaagggtggctggtagtagccatggtggtatggttaggcactttttgatttcccatttgtattctattcactaatcataaatcgagtgttgacattgtggacagaatgtaattagctccttttcctgcaaaaatctgtgcttaccctgtttctctctcataggactgctgtgtaagctatggtggcatgtggtaccttaaagggacagtacagtcttgacaatagtagcaaactactaacccagcaaatctaagcccaaggaagaagggcggaaccagaagtagggcctcgacttgcttcagacgacacagagcaagaggaactgaccatctcatgacctgtggcattgcacggtgcagtggacagaagggattatcctcagccagtcacagggtcagcttaagttagttagatcactcccagaagagaccagctgggaccttctttgcagtacaatttgaaattcctgatgtattttgcttattatttggtttcattctcataataaagagagtgtatactgacatgggcaggatgataaaaatcatggtttaatattttcttttgtaaacttaatgccaacaaggtctaagttatgtttacaacatgaagaaaacctcaaagttcttaatttttaaaatgcctagaagacaatatttagtcttggattatctatctgctaagacctccaccaatttcattaaaccaaattgaattattctattcttgggattctgtggccacttcacctttgacaacaacctactttatgtagcagtctcaactgtttacatgaaccatagcaaaaaaatcagaatcaaatccatctccttttaatgtttgcagaaagatgcaaacaaaaccaggtaagtatggaacaatgtgtaagtgaggttatcacactttgatgtaaaaatttctattttgtgtatttttaaaataaatgcaaacactaaacta

SEQ ID NO: 444614 - DNA, 820 bp, Homo sapiens
acgtgtccgccggagtttctccaccagcaacatggccgccgcctgagaggagagccgggccgccgccgtctctgcagcccgcgggtaactgggccgttgccgccgtccgcgctcggcccccgcggagagatcgagctgaaggactgcgcggctggctctcctctagtatggccaatgaagaggatgacccagttgtacaggagatcgatgtgtacttggccaagagtctggcggaaaagctgtatctatttcagtaccctgtgcgtccagcctcgatgacctacgatgacattccgcacctctcagccaagatcaagcccaagcagcagaaggtagagcttgagatggccatcgacaccctgaaccccaactattgccgcagcaaaggggagcagattgcgctgaacgtggacggggcctgcgccgacgagaccagcacgtattcctcgaagctgatggacaagcagaccttctgctcttcccagaccaccagtaacacatcccgttatgccgctgcactctacaggcaaggtgagctccacctgacacctttacatggcatcctgcagctgcggcccagcttctcctacctggataaggctgacgccaagcaccgggaaaaggaagcagcacaccaagtaatgggactcttcacaggatgaagcgcaaaaccatgttaaaccctacaaggtgcggttcttccggtccggagtaataccaggccccgccaagtccagttccatccccttgaatctctgcaaaacaaacaccccaaagtacccctgggatccacttgcatatctaatgcccgataggacac

SEQ ID NO: 444615 - DNA, 299 bp, Homo sapiens
agagatggtccacttttctgcaggggctcagggctgctgggggagggcgggggtgggctgtctgcaccctctccccagaccctcacttgggtggctggtgaggagggtccagcctggatcagccctgagcctctgcccctgccatgtccctgcagtgagtacctgatgatgctgatgccacccagccaggaggaggagaagtgagtagaggcggcaggacaccctctccctttccgggctggctgcctctaacccgtcccctctgcttttcccagagacaagcctgtggcccccagcaa

SEQ ID NO: 444616 - DNA, 654 bp, Homo sapiens
ccgggacacagatacatacaagtagctaacataagtttagggacagaattttgtctttaaatatgaagcttatgacagagcaattccattcctaggcagcatctatccaaaagaaatgaaaacatgtgtccacacaaaaccatacacagttgttcacagtagcatcttcatgatagccaaaaagtggaaacaacccagatgcccatccgctggattcatggagaaacagaatgtggtccattcacgcaatgggatgttatttgaccatggaaaagaatgaagcagtgatgctaccacgcagatgagccttgagaacattgtgctaagtgaaagaagccacatgcttcttcactcgcagctacgcgctgtgtgattacgtctcagtcagcgaccgaccacatactcaacggtggtcccataacattataatggagctgaagaattggcttacctagtgatgtcttaatgagcctgaccctgtgtaagcctaggctaactcgtatgtttgtgtcttaggtttttgcttgttcgtttgttttgttttgttttgagacagagtctcgctctgttgcctaggctggagtgcagtggcacagtctcggctcactgcaacctctgcctcctgggttcaagcgattctcctgcctcagcctc

SEQ ID NO: 444617 - DNA, 5829 bp, Homo sapiens
acgtgtccgccggagtttctccaccagcaacatggccgccgcctgagaggagagccgggccgccgccgtctctgcagcccgcgggtaactgggccgttgccgccgtccgcgctcggcccccgcggagagatcgagctgaaggactgcgcggctggctctcctctagtatggccaatgaagaggatgacccagttgtacaggagatcgatgtgtacttggccaagagtctggcggaaaagctgtatctatttcagtaccctgtgcgtccagcctcgatgacctacgatgacattccgcacctctcagccaagatcaagcccaagcagcagaaggtagagcttgagatggccatcgacaccctgaaccccaactattgccgcagcaaaggggagcagattgcgctgaacgtggacggggcctgcgccgacgagaccagcacgtattcctcgaagctgatggacaagcagaccttctgctcttcccagaccaccagtaacacatcccgttatgccgctgcactctacaggcaaggtgagctccacctgacacctttacatggcatcctgcagctgcggcccagcttctcctacctggataaggctgacgccaagcaccgggagagggaggcggccaacgaggcaggggactcttcacaggatgaggcggaagacgatgttaagcagatcacggtgcggttctcccggccggagtcagagcaggcccgccagcgccgtgtgcagtcctatgagttcctgcagaagaagcacgcagaggagccctgggtccacctgcattactatggcctgagggacagtcgctctgagcatgagcgtcagtacctgctgtgccccggctcaagcggggtggagaacacggagctcgtcaagtcacccagtgagtacctgatgatgctgatgccacccagccaggaggaggagaaagacaagcctgtggcccccagcaacgtcctgtcgatggcccagctgcgcacgctgcccctggccgatcagatcaagatcctgatgaagaatgtgaaggtcatgccttttgccaacttgatgagcctcctgggcccctccatcgattccgtggctgttctgcggggcatccagaaggtggcgatgttggtccaagggaactgggtggtgaagagtgacatcctataccccaaggactcgtccagccctcacagcggcgtgcctgctgaggtgctctgcaggggccgagacttcgttatgtggaagttcacgcagagccgctgggtggttaggaaagaggtggcaaccgtgaccaaactctgcgccgaggatgtgaaggacttcctggagcacatggccgtggtgaggatcaacaaaggctgggagttcattctgccttatgatggggagttcatcaagaagcacccggatgtggtccagcggcagcacatgctgtggacgggtatccaggccaaactggaaaaagtctataatcttgtaaaggaaaccatgccaaagaagccggatgcacaatcagggcctgccgggctggtctgtggggaccagcggatccaagtagccaaaaccaaggcccagcagaaccacgcgttgctggagcgggagctgcagcggcggaaggagcagctgcgggtgcctgcggtcccgcccggtgtgcggatcaaggaggagcccgtgagcgaggagggcgaggaggacgaggagcaggaggcggaggaggagcccatggacacttcccccagcggcctccacagcaagctggccaacgggctgcctctcgggcgggctgcgggcacagacagcttcaacgggcacccgccccagggctgcgccagcacccctgtggctcgggaactgaaggccttcgtggaggccacctttcagagacagtttgtgctcacgctgagcgaactcaagcgcctcttcaatctgcacttggccagcctgccccccggccacacactcttcagcggcatctcggaccgcatgctacaggacacggtgctggccgccggttgcaagcagatactggtgcctgtaagtagagccctgcctgccaggggcatggggggtggggggtggggagaaccagctgttgggaggccacgtggggacacgggaggccatgcttggtgagcatctgctctcacgtgggcctaggtgtgacatgggcaagtcagcctctctgaggctctattctcatgaaatgggatcatgttgggttttatgtcacaggactgtggtaggggctaaatacggtgtctgaaggcccggcctattgcctggcctgcagcagggcctagtgaaacagggcccctgcctggtttctcaccctgtcccccaccaagaacacctgtttcctactagctttgccattgtttggaatgatttaacttctaagatcgtttgatcttctttgcaatctgcagatgaagaaactgaggctccaaggaatgaaatgtacgtttaaaggtcactacctaggaggtagtagagctggaatttggacctcagtatagtggcctggagttttgaatcctttctgctcagctaagatgagctgcttccccacagctgcgccacgccccagcttgggcctgggtcctggcggcctccctgtgcatcagaagcaagctgaccagctcagcgctgtgctctcagcacttccagtgccaggccttgagtgtggtattgcaagcctcctgccccttccccctgggctgcttttctgtcactgggaggggccctgacgggggagcagagtgcttgctggggaccgtttccctgcgctgaggatagagagcgccaggtgctgcctgaggcacgcctttcccgtgctccttttccacaaggctctgcccagacctggcagcaaaatggggtgaggtggggctgtggtggtctctaagaaagcattgatgttttcattgccaaggtcaggagcgggcctgcagccttgggtgatgatctgaggccaaggcccatccctgtgtatgaggaatagaaactaggacaggaggccttgtggagcctaggctgtctcaggggatcggccctgctggcaggcagccccctgtgggaggtactggcagagttcggagctcctgcccacccagcacatgggtctgggtctccacaagctcacctttcttcatgagctgggccaggacaggcaggacacctgcctgacattagttgttttgggccgctggagtggacagaggtgaggggtgggacatggccaccctcagacaccctcacccctccttccggaccccctctgtccatgttgctttggggtggggccagcgtctccaggagacaccatggccctaactgtaatgctctccttgccatcctgacaaggagactgtattgtagtcacatccaagacgtaagagacctccgatcccagccacctctgtgttgtacatgagggagctgaggtccagggcaagtgaatagatcgagaacttgacttgaactcctggttctgctgcttattagctgtgtgaccatggacagtgagcaaacctctctgagcttacttttccccatgtactacctccccagtttctaatgctcaaatgcaaatgtgtattggaggcctcacagggcttttactggtagtaaccattattgctacttgtgtgatggaaccaggactggaaactaccatcccagatgccccctcccctgtccccttctctccaggacccaggcctgtgtcacacttgtcctggtctacctttggaccaagtggcctggattgcttgggagtcaggcagtgcctctaacccacactgacatggtacatgtgggaagcagttgaaaagaacccccagggtaccccaagagttatggggaagggggcgcccctccatcagggttggcatcttcaggagggaggactctgggtgttaaagcacagttgagttggtgccaggctgatgggaaacagacgcagcttccccactgtacggaggatatctgcagactcgaagccgggcatttcactgggcccatcacactccccctctcgctgaagccctgtcaggccctggggggtgtgctggcctcctccccatggtgaggtgagaggcacaggtttgtggctgcccaaggccctcagagatggtgagtagcagaagctgggattggaacccatgttcctgcatctgggctggggcagacagggagggatgaggcaagcaaatggatccatggggtagagatggacaagcaactcacccctgggccttggtcagtttcccccccagactgctgcttccccggatgagcagaaggtgtttgccctctgggagtctggagacatgagtgatcaggtgaggtgaactttgctgccatcttcccgaagagccaggggggtttcctgcagcgttggaggccttgggggacatgtgcacccaaagtgcagccacacatttcagattttctggcacactcggttttaaatatcctgctccaactctgtacgctaacaaaataagctgtatgtgccaatagtttgaacctaaaccagtggttcccagatgccagtctgtgagccagctccatcagaatcatcttttaaaaaatacaggctgggcgtagtggctcacgcctgtaatcccagcactttgggaggccaaggtgggtggatcacctggggttgggagtttgacaccagcctgaccaatatggtgaaaccccatctctactaaaaatgcccatagtcgtgggaggctgagacagaattgcttgaacctgggagagagaggttgcagtgagccgagattgcaccactgcactccagactgggcgacagagcaagactgtgtctcagaaagaaaaaaaaaaaaaacatagattcagttctgttcagtaggtatgcggtactgtcctaggtatctgaatttctgtaaagcttcctgagcaactctgatccagccaggcttatagagcactggtgaagcacatttctcaggcggcctctggagcaggaatcaaaaggattccttgtcagatgtcaggtcctggacttttaggttaaagaaattggtcattttgcctctagtcatactgtgatggggagggtcacaggtgtccagtgcccagaaatgtgagtggaagcagcagcgccttgcgtgtgtgtggtgtagtcatggaccctgcatcccagcttttcttaggccgtgaacgtacctaatttgatggtcgaaacgccagtcggtctgaccgtgtctaggccctgctcctaaggtgtggggagaagggagtcagcagaaatcccactgagctctctgtccccagctgcctcttaggggagccaactggcaggctgaggatctaaggggctggggccttttcctgagcaagcttgagtgcttttgtccagaatagagggtatctgaaatactttgataacaaaaaggcaaaaaaacaaaagtcataaatgcagatttttaaacatcaaatcagactagaagttttaataggaaagctcttgcactgctggacctgactgccacccctcagaggtgaccacttttattactacttttttaatagaaacagggtctcactatgttggccaggctagtcttgaactcctggcctcaagcagttctcctgcctcagcctcccaaagtgctaggatcataggcatttacatcaccaaaagataccactaaaatagctgcccccatttaaaaaaaaaaatcagcctgtcattagcaatgggcttcccattgtggtggatgagatttagctctcaactattttaggagactgtagagatagatatgttacgccagttttttttttttttttg

SEQ ID NO: 444618 - DNA, 3035 bp, Homo sapiens
acgtgtccgccggagtttctccaccagcaacatggccgccgcctgagaggagagccgggccgccgccgtctctgcagcccgcgggtaactgggccgttgccgccgtccgcgctcggcccccgcggagagatcgagctgaaggactgcgcggctggctctcctctagtatggccaatgaagaggatgacccagttgtacaggagatcgatgtgtacttggccaagagtctggcggaaaagctgtatctatttcagtaccctgtgcgtccagcctcgatgacctacgatgacattccgcacctctcagccaagatcaagcccaagcagcagaaggtagagcttgagatggccatcgacaccctgaaccccaactattgccgcagcaaaggggagcagattgcgctgaacgtggacggggcctgcgccgacgagaccagcacgtattcctcgaagctgatggacaagcagaccttctgctcttcccagaccaccagtaacacatcccgttatgccgctgcactctacaggcaaggtgagctccacctgacacctttacatggcatcctgcagctgcggcccagcttctcctacctggataaggctgacgccaagcaccgggagagggaggcggccaacgaggcaggggactcttcacaggatgaggcggaagacgatgttaagcagatcacggtgcggttctcccggccggagtcagagcaggcccgccagcgccgtgtgcagtcctatgagttcctgcagaagaagcacgcagaggagccctgggtccacctgcattactatggcctgagggacagtcgctctgagcatgagcgtcagtacctgctgtgccccggctcaagcggggtggagaacacggagctcgtcaagtcacccagtgagtacctgatgatgctgatgccacccagccaggaggaggagaaagacaagcctgtggcccccagcaacgtcctgtcgatggcccagctgcgcacgctgcccctggccgatcagatcaagatcctgatgaagaatgtgaaggtcatgccttttgccaacttgatgagcctcctgggcccctccatcgattccgtggctgttctgcggggcatccagaaggtggcgatgttggtccaagggaactgggtggtgaagagtgacatcctataccccaaggactcgtccagccctcacagcggcgtgcctgctgaggtgctctgcaggggccgagacttcgttatgtggaagttcacgcagagccgctgggtggttaggaaagaggtggcaaccgtgaccaaactctgcgccgaggatgtgaaggacttcctggagcacatggccgtggtgaggatcaacaaaggctgggagttcattctgccttatgatggggagttcatcaagaagcacccggatgtggtccagcggcagcacatgctgtggacgggtatccaggccaaactggaaaaagtctataatcttgtaaaggaaaccatgccaaagaagccggatgcacaatcagggcctgccgggctggtctgtggggaccagcggatccaagtagccaaaaccaaggcccagcagaaccacgcgttgctggagcgggagctgcagcggcggaaggagcagctgcgggtgcctgcggtcccgcccggtgtgcggatcaaggaggagcccgtgagcgaggagggcgaggaggacgaggagcaggaggcggaggaggagcccatggacacttcccccagcggcctccacagcaagctggccaacgggctgcctctcgggcgggctgcgggcacagacagcttcaacgggcacccgccccagggctgcgccagcacccctgtggctcgggaactgaaggccttcgtggaggccacctttcagagacagtttgtgctcacgctgagcgaactcaagcgcctcttcaatctgcacttggccagcctgccccccggccacacactcttcagcggcatctcggaccgcatgctacaggacacggtgctggccgccggttgcaagcagatactggtgccttttcccccccagactgctgcttccccggatgagcagaaggtgtttgccctctgggagtctggagacatgagtgatcagcatcgacaggttttgcttgaaattttttccaaaaattaccgggtacgccgaaacatgatccagtctcggttgactcaagagtgtggagaagatctcagtaaacaggaggtggataaagtactaaaggactgctgtgtaagctatggtggcatgtggtaccttaaagggacagtacagtcttgacaatagtagcaaactactaacccagcaaatctaagcccaaggaagaagggcggaaccagaagtagggcctcgacttgcttcagacgacacagagcaagaggaactgaccatctcatgacctgtggcattgcacggtgcagtggacagaagggattatcctcagccagtcacagggtcagcttaagttagttagatcactcccagaagagaccagctgggaccttctttgcagtacaatttgaaattcctgatgtattttgcttattatttggtttcattctcataataaagagagtgtatactgacatgggcaggatgataaaaatcatggtttaatattttcttttgtaaacttaatgccaacaaggtctaagttatgtttacaacatgaagaaaacctcaaagttcttaatttttaaaatgcctagaagacaatatttagtcttggattatctatctgctaagacctccaccaatttcattaaaccaaattgaattattctattcttgggattctgtggccacttcacctttgacaacaacctactttatgtagcagtctcaactgtttacatgaaccatagcaaaaaaatcagaatcaaatccatctccttttaatgtttgcagaaagatgcaaacaaaaccaggtaagtatggaacaatgtgtaagtgaggttatcacactttgatgtaaaaatttctattttgtgtatttttaaaataaatgcaaacactaaacta

SEQ ID NO: 444619 - DNA, 5266 bp, Homo sapiens
acgtgtccgccggagtttctccaccagcaacatggccgccgcctgagaggagagccgggccgccgccgtctctgcagcccgcgggtaactgggccgttgccgccgtccgcgctcggcccccgcggagagatcgagctgaaggactgcgcggctggctctcctctagtatggccaatgaagaggatgacccagttgtacaggagatcgatgtgtacttggccaagagtctggcggaaaagctgtatctatttcagtaccctgtgcgtccagcctcgatgacctacgatgacattccgcacctctcagccaagatcaagcccaagcagcagaaggtagagcttgagatggccatcgacaccctgaaccccaactattgccgcagcaaaggggagcagattgcgctgaacgtggacggggcctgcgccgacgagaccagcacgtattcctcgaagctgatggacaagcagaccttctgctcttcccagaccaccagtaacacatcccgttatgccgctgcactctacaggcaaggtgagctccacctgacacctttacatggcatcctgcagctgcggcccagcttctcctacctggataaggctgacgccaagcaccgggagagggaggcggccaacgaggcaggggactcttcacaggatgaggcggaagacgatgttaagcagatcacggtgcggttctcccggccggagtcagagcaggcccgccagcgccgtgtgcagtcctatgagttcctgcagaagaagcacgcagaggagccctgggtccacctgcattactatggcctgagggacagtcgctctgagcatgagcgtcagtacctgctgtgccccggctcaagcggggtggagaacacggagctcgtcaagtcacccagtgagtacctgatgatgctgatgccacccagccaggaggaggagaaagacaagcctgtggcccccagcaacgtcctgtcgatggcccagctgcgcacgctgcccctggccgatcagatcaagatcctgatgaagaatgtgaaggtcatgccttttgccaacttgatgagcctcctgggcccctccatcgattccgtggctgttctgcggggcatccagaaggtggcgatgttggtccaagggaactgggtggtgaagagtgacatcctataccccaaggactcgtccagccctcacagcggcgtgcctgctgaggtgctctgcaggggccgagacttcgttatgtggaagttcacgcagagccgctgggtggttaggaaagaggtggcaaccgtgaccaaactctgcgccgaggatgtgaaggacttcctggagcacatggccgtggtgaggatcaacaaaggctgggagttcattctgccttatgatggggagttcatcaagaagcacccggatgtggtccagcggcagcacatgctgtggacgggtatccaggccaaactggaaaaagtctataatcttgtaaaggaaaccatgccaaagaagccggatgcacaatcagggcctgccgggctggtctgtggggaccagcggatccaagtagccaaaaccaaggcccagcagaaccacgcgttgctggagcgggagctgcagcggcggaaggagcagctgcgggtgcctgcggtcccgcccggtgtgcggatcaaggaggagcccgtgagcgaggagggcgaggaggacgaggagcaggaggcggaggaggagcccatggacacttcccccagcggcctccacagcaagctggccaacgggctgcctctcgggcgggctgcgggcacagacagcttcaacgggcacccgccccagggctgcgccagcacccctgtggctcgggaactgaaggccttcgtggaggccacctttcagagacagtttgtgctcacgctgagcgaactcaagcgcctcttcaatctgcacttggccagcctgccccccggccacacactcttcagcggcatctcggaccgcatgctacaggacacggtgctggccgccggttgcaagcagatactggtgcctgtaagtagagccctgcctgccaggggcatggggggtggggggtggggagaaccagctgttgggaggccacgtggggacacgggaggccatgcttggtgagcatctgctctcacgtgggcctaggtgtgacatgggcaagtcagcctctctgaggctctattctcatgaaatgggatcatgttgggttttatgtcacaggactgtggtaggggctaaatacggtgtctgaaggcccggcctattgcctggcctgcagcagggcctagtgaaacagggcccctgcctggtttctcaccctgtcccccaccaagaacacctgtttcctactagctttgccattgtttggaatgatttaacttctaagatcgtttgatcttctttgcaatctgcagatgaagaaactgaggctccaaggaatgaaatgtacgtttaaaggtcactacctaggaggtagtagagctggaatttggacctcagtatagtggcctggagttttgaatcctttctgctcagctaagatgagctgcttccccacagctgcgccacgccccagcttgggcctgggtcctggcggcctccctgtgcatcagaagcaagctgaccagctcagcgctgtgctctcagcacttccagtgccaggccttgagtgtggtattgcaagcctcctgccccttccccctgggctgcttttctgtcactgggaggggccctgacgggggagcagagtgcttgctggggaccgtttccctgcgctgaggatagagagcgccaggtgctgcctgaggcacgcctttcccgtgctccttttccacaaggctctgcccagacctggcagcaaaatggggtgaggtggggctgtggtggtctctaagaaagcattgatgttttcattgccaaggtcaggagcgggcctgcagccttgggtgatgatctgaggccaaggcccatccctgtgtatgaggaatagaaactaggacaggaggccttgtggagcctaggctgtctcaggggatcggccctgctggcaggcagccccctgtgggaggtactggcagagttcggagctcctgcccacccagcacatgggtctgggtctccacaagctcacctttcttcatgagctgggccaggacaggcaggacacctgcctgacattagttgttttgggccgctggagtggacagaggtgaggggtgggacatggccaccctcagacaccctcacccctccttccggaccccctctgtccatgttgctttggggtggggccagcgtctccaggagacaccatggccctaactgtaatgctctccttgccatcctgacaaggagactgtattgtagtcacatccaagacgtaagagacctccgatcccagccacctctgtgttgtacatgagggagctgaggtccagggcaagtgaatagatcgagaacttgacttgaactcctggttctgctgcttattagctgtgtgaccatggacagtgagcaaacctctctgagcttacttttccccatgtactacctccccagtttctaatgctcaaatgcaaatgtgtattggaggcctcacagggcttttactggtagtaaccattattgctacttgtgtgatggaaccaggactggaaactaccatcccagatgccccctcccctgtccccttctctccaggacccaggcctgtgtcacacttgtcctggtctacctttggaccaagtggcctggattgcttgggagtcaggcagtgcctctaacccacactgacatggtacatgtgggaagcagttgaaaagaacccccagggtaccccaagagttatggggaagggggcgcccctccatcagggttggcatcttcaggagggaggactctgggtgttaaagcacagttgagttggtgccaggctgatgggaaacagacgcagcttccccactgtacggaggatatctgcagactcgaagccgggcatttcactgggcccatcacactccccctctcgctgaagccctgtcaggccctggggggtgtgctggcctcctccccatggtgaggtgagaggcacaggtttgtggctgcccaaggccctcagagatggtgagtagcagaagctgggattggaacccatgttcctgcatctgggctggggcagacagggagggatgaggcaagcaaatggatccatggggtagagatggacaagcaactcacccctgggccttggtcagtttcccccccagactgctgcttccccggatgagcagaaggtgtttgccctctgggagtctggagacatgagtgatcagcatcgacaggttttgcttgaaattttttccaaaaattaccgggtacgccgaaacatgatccagtctcggttgactcaagagtgtggagaagatctcagtaaacaggaggtggataaagtactaaaggactgctgtgtaagctatggtggcatgtggtaccttaaagggacagtacagtcttgacaatagtagcaaactactaacccagcaaatctaagcccaaggaagaagggcggaaccagaagtagggcctcgacttgcttcagacgacacagagcaagaggaactgaccatctcatgacctgtggcattgcacggtgcagtggacagaagggattatcctcagccagtcacagggtcagcttaagttagttagatcactcccagaagagaccagctgggaccttctttgcagtacaatttgaaattcctgatgtattttgcttattatttggtttcattctcataataaagagagtgtatactgacatgggcaggatgataaaaatcatggtttaatattttcttttgtaaacttaatgccaacaaggtctaagttatgtttacaacatgaagaaaacctcaaagttcttaatttttaaaatgcctagaagacaatatttagtcttggattatctatctgctaagacctccaccaatttcattaaaccaaattgaattattctattcttgggattctgtggccacttcacctttgacaacaacctactttatgtagcagtctcaactgtttacatgaaccatagcaaaaaaatcagaatcaaatccatctccttttaatgtttgcagaaagatgcaaacaaaaccaggtaagtatggaacaatgtgtaagtgaggttatcacactttgatgtaaaaatttctattttgtgtatttttaaaataaatgcaaacactaaacta

SEQ ID NO: 444620 - DNA, 2834 bp, Homo sapiens
acgtgtccgccggagtttctccaccagcaacatggccgccgcctgagaggagagccgggccgccgccgtctctgcagcccgcgggtaactgggccgttgccgccgtccgcgctcggcccccgcggagagatcgagctgaaggactgcgcggctggctctcctctagtatggccaatgaagaggatgacccagttgtacaggagatcgatgtgtacttggccaagagtctggcggaaaagctgtatctatttcagtaccctgtgcgtccagcctcgatgacctacgatgacattccgcacctctcagccaagatcaagcccaagcagcagaaggtagagcttgagatggccatcgacaccctgaaccccaactattgccgcagcaaaggggagcagattgcgctgaacgtggacggggcctgcgccgacgagaccagcacgtattcctcgaagctgatggacaagcagaccttctgctcttcccagaccaccagtaacacatcccgttatgccgctgcactctacaggcaaggtgagctccacctgacacctttacatggcatcctgcagctgcggcccagcttctcctacctggataaggctgacgccaagcaccgggagagggaggcggccaacgaggcaggggactcttcacaggatgaggcggaagacgatgttaagcagatcacggtgcggttctcccggccggagtcagagcaggcccgccagcgccgtgtgcagtcctatgagttcctgcagaagaagcacgcagaggagccctgggtccacctgcattactatggcctgagggacagtcgctctgagcatgagcgtcagtacctgctgtgccccggctcaagcggggtggagaacacggagctcgtcaagtcacccagtgagtacctgatgatgctgatgccacccagccaggaggaggagaaagacaagcctgtggcccccagcaacgtcctgtcgatggcccagctgcgcacgctgcccctggccgatcagatcaagatcctgatgaagaatgtgaaggtcatgccttttgccaacttgatgagcctcctgggcccctccatcgattccgtggctgttctgcggggcatccagaaggtggcgatgttggtccaagggaactgggtggtgaagagtgacatcctataccccaaggactcgtccagccctcacagcggcgtgcctgctgaggtgctctgcaggggccgagacttcgttatgtggaagttcacgcagagccgctgggtggttaggaaagaggtggcaaccgtgaccaaactctgcgccgaggatgtgaaggacttcctggagcacatggccgtggtgaggatcaacaaaggctgggagttcattctgccttatgatggggagttcatcaagaagcacccggatgtggtccagcggcagcacatgctgtggacgggtatccaggccaaactggaaaaagtctataatcttgtaaaggaaaccatgccaaagaagccggatgcacaatcagggcctgccgggctggtctgtggggaccagcggatccaactggccaacgggctgcctctcgggcgggctgcgggcacagacagcttcaacgggcacccgccccagggctgcgccagcacccctgtggctcgggaactgaaggccttcgtggaggccacctttcagagacagtttgtgctcacgctgagcgaactcaagcgcctcttcaatctgcacttggccagcctgccccccggccacacactcttcagcggcatctcggaccgcatgctacaggacacggtgctggccgccggttgcaagcagatactggtgccttttcccccccagactgctgcttccccggatgagcagaaggtgtttgccctctgggagtctggagacatgagtgatcagcatcgacaggttttgcttgaaattttttccaaaaattaccgggtacgccgaaacatgatccagtctcggttgactcaagagtgtggagaagatctcagtaaacaggaggtggataaagtactaaaggactgctgtgtaagctatggtggcatgtggtaccttaaagggacagtacagtcttgacaatagtagcaaactactaacccagcaaatctaagcccaaggaagaagggcggaaccagaagtagggcctcgacttgcttcagacgacacagagcaagaggaactgaccatctcatgacctgtggcattgcacggtgcagtggacagaagggattatcctcagccagtcacagggtcagcttaagttagttagatcactcccagaagagaccagctgggaccttctttgcagtacaatttgaaattcctgatgtattttgcttattatttggtttcattctcataataaagagagtgtatactgacatgggcaggatgataaaaatcatggtttaatattttcttttgtaaacttaatgccaacaaggtctaagttatgtttacaacatgaagaaaacctcaaagttcttaatttttaaaatgcctagaagacaatatttagtcttggattatctatctgctaagacctccaccaatttcattaaaccaaattgaattattctattcttgggattctgtggccacttcacctttgacaacaacctactttatgtagcagtctcaactgtttacatgaaccatagcaaaaaaatcagaatcaaatccatctccttttaatgtttgcagaaagatgcaaacaaaaccaggtaagtatggaacaatgtgtaagtgaggttatcacactttgatgtaaaaatttctattttgtgtatttttaaaataaatgcaaacactaaacta

SEQ ID NO: 444621 - DNA, 2820 bp, Homo sapiens
ggccaagatcaagcccaagcagcagaaggtcatcgaggctgggaggtgcggaatgtcatcgtaggtcatcgaggctggacgcacctctcagccaagatcaagcccaagcagcagaaggtagagcttgagatggccatcgacaccctgaaccccaactattgccgcagcaaaggggagcagattgcgctgaacgtggacggggcctgcgccgacgagaccagcacgtattcctcgaagctgatggacaagcagaccttctgctcttcccagaccaccagtaacacatcccgttatgccgctgcactctacaggcaaggtgagctccacctgacacctttacatggcatcctgcagctgcggcccagcttctcctacctggataaggctgacgccaagcaccgggagagggaggcggccaacgaggcaggggactcttcacaggatgaggcggaagacgatgttaagcagatcacggtgcggttctcccggccggagtcagagcaggcccgccagcgccgtgtgcagtcctatgagttcctgcagaagaagcacgcagaggagccctgggtccacctgcattactatggcctgagggacagtcgctctgagcatgagcgtcagtacctgctgtgccccggctcaagcggggtggagaacacggagctcgtcaagtcacccagtgagtacctgatgatgctgatgccacccagccaggaggaggagaaagacaagcctgtggcccccagcaacgtcctgtcgatggcccagctgcgcacgctgcccctggccgatcagatcaagatcctgatgaagaatgtgaaggtcatgccttttgccaacttgatgagcctcctgggcccctccatcgattccgtggctgttctgcggggcatccagaaggtggcgatgttggtccaagggaactgggtggtgaagagtgacatcctataccccaaggactcgtccagccctcacagcggcgtgcctgctgaggtgctctgcaggggccgagacttcgttatgtggaagttcacgcagagccgctgggtggttaggaaagaggtggcaaccgtgaccaaactctgcgccgaggatgtgaaggacttcctggagcacatggccgtggtgaggatcaacaaaggctgggagttcattctgccttatgatggggagttcatcaagaagcacccggatgtggtccagcggcagcacatgctgtggacgggtatccaggccaaactggaaaaagtctataatcttgtaaaggaaaccatgccaaagaagccggatgcacaatcagggcctgccgggctggtctgtggggaccagcggatccaagtagccaaaaccaaggcccagcagaaccacgcgttgctggagcgggagctgcagcggcggaaggagcagctgcgggtgcctgcggtcccgcccggtgtgcggatcaaggaggagcccgtgagcgaggagggcgaggaggacgaggagcaggaggcggaggaggagcccatggacacttcccccagcggcctccacagcaagctggccaacgggctgcctctcgggcgggctgcgggcacagacagcttcaacgggcacccgccccagggctgcgccagcacccctgtggctcgggaactgaaggccttcgtggaggccacctttcagagacagtttgtgctcacgctgagcgaactcaagcgcctcttcaatctgcacttggccagcctgccccccggccacacactcttcagcggcatctcggaccgcatgctacaggacacggtgctggccgccggttgcaagcagatactggtgccttttcccccccagactgctgcttccccggatgagcagaaggtgtttgccctctgggagtctggagacatgagtgatcagcatcgacaggttttgcttgaaattttttccaaaaattaccgggtacgccgaaacatgatccagtctcggttgactcaagagtgtggagaagatctcagtaaacaggaggtggataaagtactaaaggactgctgtgtaagctatggtggcatgtggtaccttaaagggacagtacagtcttgacaatagtagcaaactactaacccagcaaatctaagcccaaggaagaagggcggaaccagaagtagggcctcgacttgcttcagacgacacagagcaagaggaactgaccatctcatgacctgtggcattgcacggtgcagtggacagaagggattatcctcagccagtcacagggtcagcttaagttagttagatcactcccagaagagaccagctgggaccttctttgcagtacaatttgaaattcctgatgtattttgcttattatttggtttcattctcataataaagagagtgtatactgacatgggcaggatgataaaaatcatggtttaatattttcttttgtaaacttaatgccaacaaggtctaagttatgtttacaacatgaagaaaacctcaaagttcttaatttttaaaatgcctagaagacaatatttagtcttggattatctatctgctaagacctccaccaatttcattaaaccaaattgaattattctattcttgggattctgtggccacttcacctttgacaacaacctactttatgtagcagtctcaactgtttacatgaaccatagcaaaaaaatcagaatcaaatccatctccttttaatgtttgcagaaagatgcaaacaaaaccaggtaagtatggaacaatgtgtaagtgaggttatcacactttgatgtaaaaatttctattttgtgtatttttaaaataaatgcaaacactaaacta

SEQ ID NO: 444622 - DNA, 2626 bp, Homo sapiens
  misc_feature (93)..(93): n is a, c, g, or t
  misc_feature (97)..(98): n is a, c, g, or t
agagatatgtactagtacgtcaccggttttatttcagtacgcgggacgcagagctttacatgttcttcacatgagccagctagttcacacatnccgnnatgccgctgcactctacaggcaaggtgagctccacctgacacctttacatggcatcctgcagctgcggcccagcttctcctacctggataaggctgacgccaagcaccgggagagggaggcggccaacgaggcaggggactcttcacaggatgaggcggaagacgatgttaagcagatcacggtgcggttctcccggccggagtcagagcaggcccgccagcgccgtgtgcagtcctatgagttcctgcagaagaagcacgcagaggagccctgggtccacctgcattactatggcctgagggacagtcgctctgagcatgagcgtcagtacctgctgtgccccggctcaagcggggtggagaacacggagctcgtcaagtcacccagtgagtacctgatgatgctgatgccacccagccaggaggaggagaaagacaagcctgtggcccccagcaacgtcctgtcgatggcccagctgcgcacgctgcccctggccgatcagatcaagatcctgatgaagaatgtgaaggtcatgccttttgccaacttgatgagcctcctgggcccctccatcgattccgtggctgttctgcggggcatccagaaggtggcgatgttggtccaagggaactgggtggtgaagagtgacatcctataccccaaggactcgtccagccctcacagcggcgtgcctgctgaggtgctctgcaggggccgagacttcgttatgtggaagttcacgcagagccgctgggtggttaggaaagaggtggcaaccgtgaccaaactctgcgccgaggatgtgaaggacttcctggagcacatggccgtggtgaggatcaacaaaggctgggagttcattctgccttatgatggggagttcatcaagaagcacccggatgtggtccagcggcagcacatgctgtggacgggtatccaggccaaactggaaaaagtctataatcttgtaaaggaaaccatgccaaagaagccggatgcacaatcagggcctgccgggctggtctgtggggaccagcggatccaagtagccaaaaccaaggcccagcagaaccacgcgttgctggagcgggagctgcagcggcggaaggagcagctgcgggtgcctgcggtcccgcccggtgtgcggatcaaggaggagcccgtgagcgaggagggcgaggaggacgaggagcaggaggcggaggaggagcccatggacacttcccccagcggcctccacagcaagctggccaacgggctgcctctcgggcgggctgcgggcacagacagcttcaacgggcacccgccccagggctgcgccagcacccctgtggctcgggaactgaaggccttcgtggaggccacctttcagagacagtttgtgctcacgctgagcgaactcaagcgcctcttcaatctgcacttggccagcctgccccccggccacacactcttcagcggcatctcggaccgcatgctacaggacacggtgctggccgccggttgcaagcagatactggtgccttttcccccccagactgctgcttccccggatgagcagaaggtgtttgccctctgggagtctggagacatgagtgatcagcatcgacaggttttgcttgaaattttttccaaaaattaccgggtacgccgaaacatgatccagtctcggttgactcaagagtgtggagaagatctcagtaaacaggaggtggataaagtactaaaggactgctgtgtaagctatggtggcatgtggtaccttaaagggacagtacagtcttgacaatagtagcaaactactaacccagcaaatctaagcccaaggaagaagggcggaaccagaagtagggcctcgacttgcttcagacgacacagagcaagaggaactgaccatctcatgacctgtggcattgcacggtgcagtggacagaagggattatcctcagccagtcacagggtcagcttaagttagttagatcactcccagaagagaccagctgggaccttctttgcagtacaatttgaaattcctgatgtattttgcttattatttggtttcattctcataataaagagagtgtatactgacatgggcaggatgataaaaatcatggtttaatattttcttttgtaaacttaatgccaacaaggtctaagttatgtttacaacatgaagaaaacctcaaagttcttaatttttaaaatgcctagaagacaatatttagtcttggattatctatctgctaagacctccaccaatttcattaaaccaaattgaattattctattcttgggattctgtggccacttcacctttgacaacaacctactttatgtagcagtctcaactgtttacatgaaccatagcaaaaaaatcagaatcaaatccatctccttttaatgtttgcagaaagatgcaaacaaaaccaggtaagtatggaacaatgtgtaagtgaggttatcacactttgatgtaaaaatttctattttgtgtatttttaaaataaatgcaaacactaaacta

SEQ ID NO: 444623 - DNA, 1707 bp, Homo sapiens
  misc_feature (45)..(45): n is a, c, g, or t
caccgtcccgcgctgccccaccaatacgggctaggtagcgaggcntcggtgttgggggagttcatcaagaagcacccggatgtggtccagcggcagcacatgctgtggacgggtatccaggccaaactggaaaaagtctataatcttgtaaaggaaaccatgccaaagaagccggatgcacaatcagggcctgccgggctggtctgtggggaccagcggatccaagtagccaaaaccaaggcccagcagaaccacgcgttgctggagcgggagctgcagcggcggaaggagcagctgcgggtgcctgcggtcccgcccggtgtgcggatcaaggaggagcccgtgagcgaggagggcgaggaggacgaggagcaggaggcggaggaggagcccatggacacttcccccagcggcctccacagcaagctggccaacgggctgcctctcgggcgggctgcgggcacagacagcttcaacgggcacccgccccagggctgcgccagcacccctgtggctcgggaactgaaggccttcgtggaggccacctttcagagacagtttgtgctcacgctgagcgaactcaagcgcctcttcaatctgcacttggccagcctgccccccggccacacactcttcagcggcatctcggaccgcatgctacaggacacggtgctggccgccggttgcaagcagatactggtgccttttcccccccagactgctgcttccccggatgagcagaaggtgtttgccctctgggagtctggagacatgagtgatcagcatcgacaggttttgcttgaaattttttccaaaaattaccgggtacgccgaaacatgatccagtctcggttgactcaagagtgtggagaagatctcagtaaacaggaggtggataaagtactaaaggactgctgtgtaagctatggtggcatgtggtaccttaaagggacagtacagtcttgacaatagtagcaaactactaacccagcaaatctaagcccaaggaagaagggcggaaccagaagtagggcctcgacttgcttcagacgacacagagcaagaggaactgaccatctcatgacctgtggcattgcacggtgcagtggacagaagggattatcctcagccagtcacagggtcagcttaagttagttagatcactcccagaagagaccagctgggaccttctttgcagtacaatttgaaattcctgatgtattttgcttattatttggtttcattctcataataaagagagtgtatactgacatgggcaggatgataaaaatcatggtttaatattttcttttgtaaacttaatgccaacaaggtctaagttatgtttacaacatgaagaaaacctcaaagttcttaatttttaaaatgcctagaagacaatatttagtcttggattatctatctgctaagacctccaccaatttcattaaaccaaattgaattattctattcttgggattctgtggccacttcacctttgacaacaacctactttatgtagcagtctcaactgtttacatgaaccatagcaaaaaaatcagaatcaaatccatctccttttaatgtttgcagaaagatgcaaacaaaaccaggtaagtatggaacaatgtgtaagtgaggttatcacactttgatgtaaaaatttctattttgtgtatttttaaaataaatgcaaacactaaacta

SEQ ID NO: 444624 - DNA, 2605 bp, Homo sapiens
acgtgtccgccggagtttctccaccagcaacatggccgccgcctgagaggagagccgggccgccgccgtctctgcagcccgcgggtaactgggccgttgccgccgtccgcgctcggcccccgcggagagatcgagctgaaggactgcgcggctggctctcctctagtatggccaatgaagaggatgacccagttgtacaggagatcgatgtgtacttggccaagagtctggcggaaaagctgtatctatttcagtaccctgtgcgtccagcctcgatgacctacgatgacattccgcacctctcagccaagatcaagcccaagcagcagaaggtagagcttgagatggccatcgacaccctgaaccccaactattgccgcagcaaaggggagcagattgcgctgaacgtggacggggcctgcgccgacgagaccagcacgtattcctcgaagctgatggacaagcagaccttctgctcttcccagaccaccagtaacacatcccgttatgccgctgcactctacaggcaaggtgagctccacctgacacctttacatggcatcctgcagctgcggcccagcttctcctacctggataaggctgacgccaagcaccgggagagggaggcggccaacgaggcaggggactcttcacaggatgaggcggaagacgatgttaagcagatcacggtgcggttctcccggccggagtcagagcaggcccgccagcgccgtgtgcagtcctatgagttcctgcagaagaagcacgcagaggagccctgggtccacctgcattactatggcctgagggacagtcgctctgagcatgagcgtcagtacctgctgtgccccggctcaagcggggtggagaacacggagctcgtcaagtcacccagtgagtacctgatgatgctgatgccacccagccaggaggaggagaaagacaagcctgtggcccccagcaacgtcctgtcgatggcccagctgcgcacgctgcccctggccgatcagatcaagatcctgatgaagaatgtgaaggtcatgccttttgccaacttgatgagcctcctgggcccctccatcgattccgtggctgttctgcggggcatccagaaggtggcgatgttggtccaagggaactgggtggtgaagagtgacatcctataccccaaggactcgtccagccctcacagcggcgtgcctgctgaggtgctctgcaggggccgagacttcgttatgtggaagttcacgcagagccgctgggtggttaggaaagaggtggcaaccgtgaccaaactctgcgccgaggatgtgaaggacttcctggagcacatggccgtggtgaggatcaacaaaggctgggagttcattctgccttatgatggggagttcatcaagaagcacccggatgtggtccagcggcagcacatgctgtggacgggtatccaggccaaactggaaaaagtctataatcttgtaaaggaaaccatgccaaagaagccggatgcacaatcagggcctgccgggctggtctgtggggaccagcggatccaagtagccaaaaccaaggcccagcagaaccacgcgttgctggagcgggagctgcagcggcggaaggagcagctgcgggtgcctgcggtcccgcccggtgtgcggatcaaggaggagcccgtgagcgaggagggcgaggaggacgaggagcaggaggcggaggaggagcccatggacacttcccccagcggcctccacagcaagctggccaacgggctgcctctcgggcgggctgcgggcacagacagcttcaacgggcacccgccccagggctgcgccagcacccctgtggctcgggaactgaaggccttcgtggaggccacctttcagagacagtttgtgctcacgctgagcgaactcaagcgcctcttcaatctgcacttggccagcctgccccccggccacacactcttcagcggcatctcggaccgcatgctacaggacacggtgctggccgccggttgcaagcagatactggtgccttttcccccccagactgctgcttccccggatgagcagaaggtgtttgccctctgggagtctggagacatgagtgatcagcatcgacaggttttgcttgaaattttttccaaaaattaccgggtacgccgaaacatgatccagtctcggttgactcaagagtgtggagaagatctcagtaaacaggaggtggataaagtactaaaggactgctgtgtaagctatggtggcatgtggtaccttaaagggacagtacagtcttgacaatagtagcaaactactaacccagcaaatctaagcccaaggaagaagggcggaaccagaagtagggcctcgacttgcttcagacgacacagagcaagaggaactgaccatctcatgacctgtggcattgcacggtgcagtggacagaagggattatcctcagccagtcacagggtcagcttaagttagttagatcactcccagaagagaccagctgggaccttcttttggtgggccaattcgaaaattccttgtgtagtttttgcttaagcttttggggtttggtcttcatttcttaataaataatggta

SEQ ID NO: 444625 - DNA, 1563 bp, Homo sapiens
acgtgtccgccggagtttctccaccagcaacatggccgccgcctgagaggagagccgggccgccgccgtctctgcagcccgcgggtaactgggccgttgccgccgtccgcgctcggcccccgcggagagatcgagctgaaggactgcgcggctggctctcctctagtatggccaatgaagaggatgacccagttgtacaggagatcgatgtgtacttggccaagagtctggcggaaaagctgtatctatttcagtaccctgtgcgtccagcctcgatgacctacgatgacattccgcacctctcagccaagatcaagcccaagcagcagaaggtagagcttgagatggccatcgacaccctgaaccccaactattgccgcagcaaaggggagcagattgcgctgaacgtggacggggcctgcgccgacgagaccagcacgtattcctcgaagctgatggacaagcagaccttctgctcttcccagaccaccagtaacacatcccgttatgccgctgcactctacaggcaaggtgagctccacctgacacctttacatggcatcctgcagctgcggcccagcttctcctacctggataaggctgacgccaagcaccgggagagggaggcggccaacgaggcaggggactcttcacaggatgaggcggaagacgatgttaagcagatcacggtgcggttctcccggccggagtcagagcaggcccgccagcgccgtgtgcagtcctatgagttcctgcagaagaagcacgcagaggagccctgggtccacctgcattactatggcctgagggacagtcgctctgagcatgagcgtcagtacctgctgtgccccggctcaagcggggtggagaacacggagctcgtcaagtcacccagtgagtacctgatgatgctgatgccacccagccaggaggaggagaaagacaagcctgtggcccccagcaacgtcctgtcgatggcccagctgcgcacgctgcccctggccgatcagatcaagatcctgatgaagaatgtgaaggtcatgccttttgccaacttgatgagcctcctgggcccctccatcgattccgtggctgttctgcggggcatccagaaggtggcgatgttggtccaagggaactgggtggtgaagagtgacatcctataccccaaggactcgtccagccctcacagcggcgtgcctgctgaggtgctctgcaggggccgagacttcgttatgtggaagttcacgcagagccgctgggtggttaggaaagaggtggcaaccgtgaccaaactctgcgccgaggatgtgaaggacttcctggagcacatggccgtggtgaggatcaacaaaggctgggagttcattctgccttatgatggggagttcatcaagaagcacccggatgtggtccagcggcagcacatgctgtggacgggtatccaggccaaactggaaaaagtctataatcttgtaaaggaaaccatgccaaagaagccggatgcacaatcagggctgccggctggtctgtgggacacgatccattaccaaaccaggccac

SEQ ID NO: 444626 - DNA, 628 bp, Homo sapiens
acgtgtccgccggagtttctccaccagcaacatggccgccgcctgagaggagagccgggccgccgccgtctctgcagcccgcgggtaactgggccgttgccgccgtccgcgctcggcccccgcggagagatcgagctgaaggactgcgcggctggctctcctctagtatggccaatgaagaggatgacccagttgtacaggagatcgatgtgtacttggccaagagtctggcggaaaagctgtatctatttcagtaccctgtgcgtccagcctcgatgacctacgatgacattccgcacctctcagccaagatcaagcccaagcagcagaaggtagagcttgagatggccatcgacaccctgaaccccaactattgccgcagcaaaggggagcagattgcgctgaacgtggacggggcctgcgccgacgagaccagcacgtattcctcgaagctgatggacaagcagaccttctgctcttcccagaccaccagtaacacatcccgttatgccgctgcactctacaggcaaggcagcatctatccaaaagaaatgaaaacatgtgtccacacaaaaccatacacagttgttcacagtagcatcttcatgatagccaaaaagtggaaaca

SEQ ID NO: 444627 - DNA, 564 bp, Homo sapiens
gggggttgtggctgtggagcggaagtgggtctcaaccactataaagcctctctgtgcccgtccggagctggtgaggacagcctgccagagtctggtctctggacactatgggcacacgactcctcccagctctgtttcttgtcctcctggtattgggatttgaggtccaggggacccaacagccccagcaagatgagatgcctagcccgaccttcctcacccaggtgaaggaatctctctccagttactgggagtcagcaaagacagccgcccagaacctgtacgagaagacatacctgcccgctgtagatgagaaactcagggacttgtacagcaaaagcacagcagccatgagcacttacacaggcatttttactgaccaagttctttctgtgctgaagggagaggagtaacagccagaccccccatcagtggacaaggggagagtcccctactcccctgatcccccaggttcagactgagctcccccttcccagtagctcttgcatcctcctcccaactctagcctgaattcttttcaataaaaaatacaattcaagttgc

SEQ ID NO: 444628 - DNA, 652 bp, Homo sapiens
cgagagaacaagaccttgtcttggaaaaaaaaaaagaattgtagaccatttgcttgtgttctttctccggggatcagatctcaccctctttctgccgtacttcctcatctcctacgtgtggatgatgatattgtgccctgtgcatgttcttcgtcaccaaaagtgcctctctcatagagcaggtctctggacactatgggcacacgactcctcccagctctgtttcttgtcctcctggtattgggatttgaggtccaggggacccaacagccccagcaagatgagatgcctagcccgaccttcctcacccaggtgaaggaatctctctccagttactgggagtcagcaaagacagccgcccagaacctgtacgagaagacatacctgcccgctgtagatgagaaactcagggacttgtacagcaaaagcacagcagccatgagcacttacacaggcatttttactgaccaagttctttctgtgctgaagggagaggagtaacagccagaccccccatcagtggacaaggggagagtcccctactcccctgatcccccaggttcagactgagctcccccttcccagtagctcttgcatcctcctcccaactctagcctgaattcttttcaataaaaaatacaattcaagttgc

SEQ ID NO: 444629 - DNA, 506 bp, Homo sapiens
gggggttgtggctgtggagcggaagtgggtctcaaccactataaagcctctctgtgcccgtccggagctggtgaggacagcctgccagagtctggtctctggacactatgggcacacgactcctcccagctctgtttcttgtcctcctggtattgggatttgaggtccaggggacccaacagccccagcaagatgagatgcctagcccgaccttcctcacccaggtgaaggaatctctctccagttactgggagtcagcaaagacagccgcccagaacctgtacgagaagacatacctgcccgctgtagatgagaaactcagcaagttctttctgtgctgaagggagaggagtaacagccagaccccccatcagtggacaaggggagagtcccctactcccctgatcccccaggttcagactgagctcccccttcccagtagctcttgcatcctcctcccaactctagcctgaattcttttcaataaaaaatacaattcaagttgc

SEQ ID NO: 444630 - DNA, 705 bp, Homo sapiens
gggggttgtggctgtggagcggaagtgggtctcaaccactataaagcctctctgtgcccgtccggagctggtgaggacagcctgccagagtctggtctctggacactatgggcacacgactcctcccagctctgtttcttgtcctcctggtattgggatttgaggtccaggggacccaacagccccagcaagatgagatgcctagcccgaccttcctcacccaggtgaaggaatctctctccagttactgggagtcagcaaagacagccgcccagaacctgtacgagaagacatacctgcccgctgtagatgagaaactcagcaagttctttctgtgctgaagggagaggagtaacagccagaccccccatcagtggacaaggggagagtcccctactcccctgatcccccaggttcagactgagctcccccttcccagtagctcttgcatcctcctcccaactctagcctgaattcttttcaataaaaaatacaattcaagttgcaaaaaaatgacactctcacctagaattcttcacaacttctctatttacctattctcgcgaattgaaacaaaaacactttagggggggccctcggtaccccaattctcctctataggggagtcggattacaattccactggcccggtgttttacaacggtggagactgcgaccctgggtgttaccccttcgcctttggag

SEQ ID NO: 444631 - DNA, 956 bp, Homo sapiens
gggggttgtggctgtggagcggaagtgggtctcaaccactataaagcctctctgtgcccgtccggagctggtgaggacagcctgccagagtctggtctctggacactatgggcacacgactcctcccagctctgtttcttgtcctcctggtattgggatttgaggtccaggggacccaacagccccagcaagatgagatgcctagcccgaccttcctcacccaggtgaaggaatctctctccagttactgggagtcagcaaagacagccgcccagaacctgtacgagaagacatacctgcccgctgtagatgagaaactcagggacttgtacagcaaaagcacagcagccatgagcacttacacaggcatttttactgaccaagttctttctgtgctgaagggagaggagtaacagccagaccccccatcagtggacaaggggagagtcccctactcccctgatcccccaggttcagactgagctcccccttcccagtagctcttgcatcctcctcccaactctagcctgaattcttttcaataaaaaatacaattcaagttgcttctcatggatggcactgcttttctgaggactcaaggtgccaagatggaggggctgactcagtccagccaacatttaatgagcacctactttatgtatggagctctaacccatgggtccatgggaataaagcagtgaatagtaacaataaataatcgtaacagcaaaaaaaaaaaaaccgaaaaaacacctttttgggccgcgtcatgggactcttgaaagaaggtttttgaaacccatgtcgttagggcacgggcgccccaagtgagtgtaatacgacacggtgccacgacggcggttccccagaggaaactcgtgcccagaacaaggccgtgcgattttccccaatataaaagcgccgggggaaacccggcgtgtttggaactacccgcg

SEQ ID NO: 444632 - DNA, 677 bp, Homo sapiens
gggggttgtggctgtggagcggaagtgggtctcaaccactataaagcctctctgtgcccgtccggagctggtgaggacagcctgccagagtctggtctctggacactatgggcacacgactcctcccagctctgtttcttgtcctcctggtattgggatttgaggtccaggggacccaacagccccagcaagatgagatgcctagcccgaccttcctcacccaggtgaaggaatctctctccagttactgggagtcagcaaagacagccgcccagaacctgtacgagaagacatacctgcccgctgtagatgagaaactcagggacttgtacagcaaaagcacagcagccatgagcacttacacaggcatttttactgaccaagttctttctgtgctgaagggagaggagtaacagccagaccccccatcagtggacaaggggagagtcccctactcccctgatcccccaggttcagactgagctcccccttcccagtagctcttgcatcctcctcccaactctagcctgaattcttttcaatcaaggtgccaagatggaggggctgactcagtccagccaacatttaatgagcacctactttatgtatggagctctaacccatgggtccatgggaataaagcagtgaatagtaacaataaataatcgtaacagcaa

SEQ ID NO: 444633 - DNA, 502 bp, Homo sapiens
gggggttgtggctgtggagcggaagtgggtctcaaccactataaagcctctctgtgcccgtccggagctggtgaggacagcctgccagagtctggtctctggacactatgggcacacgactcctcccagctctgtttcttgtcctcctggtattgggatttggtgaaggaatctctctccagttactgggagtcagcaaagacagccgcccagaacctgtacgagaagacatacctgcccgctgtagatgagaaactcagggacttgtacagcaaaagcacagcagccatgagcacttacacaggcatttttactgaccaagttctttctgtgctgaagggagaggagtaacagccagaccccccatcagtggacaaggggagagtcccctactcccctgatcccccaggttcagactgagctcccccttcccagtagctcttgcatcctcctcccaactctagcctgaattcttttcaataaaaaatacaattcaagttgc

SEQ ID NO: 444634 - DNA, 266 bp, Homo sapiens
cgagagaacaagaccttgtcttggaaaaaaaaaaagaattgtagaccatttgcttgtgttctttctccggggatcagatctcaccctctttctgccgtacttcctcatctcctacgtgtggatgatgatattgtgccctgtgcatgttcttcgtcaccaaaagtgcctctctcatagagcaggtgagaactcagtgaggagatgcagggacatgaggtctgacttagggcagagccctaaggtaacacatttgatctactgtaggt

SEQ ID NO: 444635 - DNA, 495 bp, Homo sapiens
acatgacaccccctcaatgttccaggtctctggacactatgggcacacgactcctcccagctctgtttcttgtcctcctggtattgggatttgaggtccaggggacccaacagccccagcaagatgagatgcctagcccgaccttcctcacccaggtgaaggaatctctctccagttactgggagtcagcaaagacagccgcccagaacctgtacgagaagacatacctgcccgctgtagatgagaaactcagggacttgtacagcaaaagcacagcagccatgagcacttacacaggcatttttactgaccaagttctttctgtgctgaagggagaggagtaacagccagaccccccatcagtggacaaggggagagtcccctactcccctgatcccccaggttcagactgagctcccccttcccagtagctcttgcatcctcctcccaactctagcctgaattcttttcaataaaaaatacaattcaagttgc

SEQ ID NO: 444636 - DNA, 672 bp, Homo sapiens
gggggttgtggctgtggagcggaagtgggtctcaaccactataaagcctctctgtgcccgtccggagctggtgaggacagcctgccagagtctggtctctggacactatgggcacacgactcctcccagctctgtttcttgtcctcctggtattgggatttgaggtccaggggacccaacagccccagcaagatgagatgcctagcccgaccttcctcacccaggtgaaggaatctctctccagttactgggagtcagcaaagacagccgcccagaacctgtacgagaagacatacctgcccgctgtagatgagaaactcagcaagttctttctgtgctgaagggagaggagtaacagccagaccccccatcagtggacaaggggagagtcccctactcccctgatcccccaggttcagactgagctcccccttcccagtagctcttgcatcctcctcccaactctagcctgaattcttttcaataaaaaatacaattcaagttgcttctcatggatggcactgcttttctgaggactcaaggtgccaagatggaggggctgactcagtccagccaacatttaatgagcacctactttatgtatggagctctaacccatgggtccatgggaataaagcagtgaatagtaacaataaataatcgtaacagcaa

SEQ ID NO: 444637 - DNA, 503 bp, Homo sapiens
acccaggagtccaggtccccagaccctcctccctcagacccaggagtccaggcccccagcccctcctccctctaaccatctgtgctttctccccaggacttgtacagcaaaagcacagcagccatgagcacttacacaggcatttttactgaccaagttctttctgtgctgaagggagaggagtaacagccagaccccccatcagtggacaaggggagagtcccctactcccctgatcccccaggttcagactgagctcccccttcccagtagctcttgcatcctcctcccaactctagcctgaattcttttcaataaaaaatacaattcaagttgcttctcatggatggcactgcttttctgaggactcaaggtgccaagatggaggggctgactcagtccagccaacatttaatgagcacctactttatgtatggagctctaacccatgggtccatgggaataaagcagtgaatagtaacaataaataatcgtaacagcaa

SEQ ID NO: 444638 - DNA, 593 bp, Homo sapiens
gactgacagagactgagatatagacactatgagcgcgcgactcctaccaactatggatcttgacctcctgatattgggatttgaggtccaggggacccaacagccccagcaagatgagatgcctagcccgaccttcctcacccaggtgaaggaatctctctccagttactgggagtcagcaaagacagccgcccagaacctgtacgagaagacatacctgcccgctgtagatgagaaactcagcaagttctttctgtgctgaagggagaggagtaacagccagaccccccatcagtggacaaggggagagtcccctactcccctgatcccccaggttcagactgagctcccccttcccagtagctcttgcatcctcctcccaactctagcctgaattcttttcaataaaaaatacaattcaagttgcttctcatggatggcactgcttttctgaggactcaaggtgccaagatggaggggctgactcagtccagccaacatttaatgagcacctactttatgtatggagctctaacccatgggtccatgggaataaagcagtgaatagtaacaataaataatcgtaacagcaa

SEQ ID NO: 444639 - DNA, 430 bp, Homo sapiens
gggggttgtggctgtggagcggaagtgggtctcaaccactataaagcctctctgtgcccgtccggagctggtgaggacagcctgccagagtctggtctctggacactatgggcacacgactcctcccagctctgtttcttgtcctcctggtattgggatttgaggtccaggggacccaacagccccagcaagatgagatgcctagcccgaccttcctcacccaggtgaaggaatctctctccagttactgggagtcagcaaagacagccgcccagaacctgtacgagaagacatacctgcccgctgtagatgagaaactcagtagcacctgcccctggagaaatggggtctggcccataccaccgactgcatccaggacccagaagttcaggccccagcccctcctccctcagacccaggagtccaggcc

SEQ ID NO: 444640 - DNA, 543 bp, Homo sapiens
  misc_feature (15)..(15): n is a, c, g, or t
tccgattaatacgcncactttggggatttggctcgagccaagattcggcacgaggacagcctgccagagtctggtctctggacactatgggcacacgactcctcccagctctgtttcttgtcctcctggtattgggatttgaggtccaggggacccaacagccccagcaagatgagatgcctagcccgaccttcctcacccaggtgaaggaatctctctccagttactgggagtcagcaaagacagccgcccagaacctgtacgagaagacatacctgcccgctgtagatgagaaactcagggacttgtacagcaaaagcacagcagccatgagcacttacacaggcatttttactgaccaagttctttctgtgctgaagggagaggagtaacagccagaccccccatcagtggacaaggggagagtcccctactcccctgatcccccaggttcagactgagctcccccttcccagtagctcttgcatcctcctcccaactctagcctgaattcttttcaataaaaaatacaattcaagttgc

SEQ ID NO: 444641 - DNA, 667 bp, Homo sapiens
  misc_feature (15)..(15): n is a, c, g, or t
  misc_feature (563)..(564): n is a, c, g, or t
  misc_feature (568)..(568): n is a, c, g, or t
tccgattaatacgcncactttggggatttggctcgagccaagattcggcacgaggacagcctgccagagtctggtctctggacactatgggcacacgactcctcccagctctgtttcttgtcctcctggtattgggatttgaggtccaggggacccaacagccccagcaagatgagatgcctagcccgaccttcctcacccaggtgaaggaatctctctccagttactgggagtcagcaaagacagccgcccagaacctgtacgagaagacatacctgcccgctgtagatgagaaactcagggacttgtacagcaaaagcacagcagccatgagcacttacacaggcatttttactgaccaagttctttctgtgctgaagggagaggagtaacagccagaccccccatcagtggacaaggggagagtcccctactcccctgatcccccaggttcagactgagctcccccttcccagtagctcttgcatcctcctcccaactctagcctgaattcttttcaataaaaaatacaattcaagttgcaaaacaaatgaaaagacctnnctgnagaccgctctggggatgagaacttgagaactggtaaggccttccaggtcactggcaaccatggggaaaaaaacattcacttggccgccttttacaacgc

SEQ ID NO: 444642 - DNA, 596 bp, Homo sapiens
cgagagaacaagaccttgtcttggaaaaaaaaaaagaattgtagaccatttgcttgtgttctttctccggggatcagatctcaccctctttctgccgtacttcctcatctcctacgtgtggatgatgatattgtgccctgtgcatgttcttcgtcaccaaaagtgcctctctcatagagcaggtctctggacactatgggcacacgactcctcccagctctgtttcttgtcctcctggtattgggatttgaggtccaggggacccaacagccccagcaagatgagatgcctagcccgaccttcctcacccaggtgaaggaatctctctccagttactgggagtcagcaaagacaggacttgtacagcaaaagcacagcagccatgagcacttacacaggcatttttactgaccaagttctttctgtgctgaagggagaggagtaacagccagaccccccatcagtggacaaggggagagtcccctactcccctgatcccccaggttcagactgagctcccccttcccagtagctcttgcatcctcctcccaactctagcctgaattcttttcaataaaaaatacaattcaagttgc

SEQ ID NO: 444643 - DNA, 730 bp, Homo sapiens
gggggttgtggctgtggagcggaagtgggtctcaaccactataaagcctctctgtgcccgtccggagctggtgaggacagcctgccagagtctggtctctggacactatgggcacacgactcctcccagctctgtttcttgtcctcctggtattgggatttgaggtccaggggacccaacagccccagcaagatgagatgcctagcccgaccttcctcacccaggtgaaggaatctctctccagttactgggagtcagcaaagacagccgcccagaacctgtacgagaagacatacctgcccgctgtagatgagaaactcagggacttgtacagcaaaagcacagcagccatgagcacttacacaggcatttttactgaccaagttctttctgtgctgaagggagaggagtaacagccagaccccccatcagtggacaaggggagagtcccctactcccctgatcccccaggttcagactgagctcccccttcccagtagctcttgcatcctcctcccaactctagcctgaattcttttcaataaaaaatacaattcaagttgcttctcatggatggcactgcttttctgaggactcaaggtgccaagatggaggggctgactcagtccagccaacatttaatgagcacctactttatgtatggagctctaacccatgggtccatgggaataaagcagtgaatagtaacaataaataatcgtaacagcaa

SEQ ID NO: 444644 - DNA, 219 bp, Homo sapiens
aaactaaataacattgtgttaaataaggagaaatgcctttaggcaaaagcaaattaagtacacctgctggatctgtagggaagatacaataaagcagtaaatgtctgtgaaaaatatgaaacagaaatctaagcttgcatgttttagattaagaaaatattagtgtagttttttatctaccaaatattttactaagagttaaagtaatactttataaag

SEQ ID NO: 444645 - DNA, 6799 bp, Homo sapiens
  misc_feature (3190)..(3190): n is a, c, g, or t
  misc_feature (3709)..(3709): n is a, c, g, or t
ttcccggagtcgagcgggtgctgctagcggaggcgccatattggaggggacaaaactccggcgacagcgagtgacacaaataaacccctggacccccttgttccctcagctctaagggccgcgatgttgtacctagaagactatctggaaatgattgagcagcttcctatggatctgcgggaccgcttcacggaaatgcgcgagatggacctgcaggtgcagaatgcaatggatcaactagaacaaagagtcagtgaattctttatgaatgcaaagaaaaataaacctgagtggagggaagagcaaatggcatccatcaaaaaagactactataaagctttggaagatgcagatgagaaggttcagttggcaaaccagatatatgacttggtagatcgacacttgagaaagctggatcaggaactggctaagtttaaaatggagctggaagctgataatgctggaattacagaaatattagagaggcgatctttggaattagacactccttcacagccagtgaacaatcaccatgctcattcacatactccagtggaaaaaaggaaatataatccaacttctcaccatacgacaacagatcatattcctgaaaagaaatttaaatctgaagctcttctatccacccttacgtcagatgcctctaaggaaaatacactaggttgtcgaaataataattccacagcctcttctaacaatgcctacaatgtgaattcctcccaacctctgggatcctataacattggctcgttatcttcaggaactggtgcaggggcaattaccatggcagctgctcaagcagttcaggctacagctcagatgaaggagggacgaagaacatcaagtttaaaagccagttatgaagcatttaagaataatgactttcagttgggaaaagaattttcaatggccagggaaacagttggctattcatcatcttcggcacttatgacaacattaacacagaatgccagttcatcagcagccgactcacggagtggtcgaaagagcaaaaacaacaacaagtcttcaagccagcagtcatcatcttcctcctcctcttcttccttatcatcgtgttcttcatcatcaactgttgtacaagaaatctctcaacaaacaactgtagtgccagaatctgattcaaatagtcaggttgattggacttacgacccaaatgaacctcgatactgcatttgtaatcaggtaaaagtctgttatatctataaaagtataatctgaataaactagaaggaagagaactatttcatttttaagcacttttttaaactcacttaaaatacctttgctttatttgtatacttttctcccccttcttacaaaagtgacatttgctgtaaatactgagtataaagaaaaatgttacccataatcctagccctcagatacaacctgtaactaaacatttttggtataccactaccatatacctcatgtgcacattggctgccttaataaaatacaacagactgggtagcttaaacaacagaaaataattttctcacaggtatgaaggctgggaagtccaagatcaaggtgtccactgactcagttctggaggagggctcccttcctagatggagactgctgccttctcaccgggtcctcacatgatagagggagaaagagtgtgctctggtgtcttttcttataagggcaccagccttgtcagagtaggaccccactctatgacctcatttaacctttaccacctcctcacaggccctgtttccaattatagtcacgttgggggttagggcttcaacatatgattttgagacataagcttgcatttcataacacgtgtctatgcagatttgcacatgcatgtgtgtataagtttgtcagtaggaaccacagtgtatactttcttgttactggcttttttctctaaatcaggtataccgaacatgatttttctttaagatcatatttttaattttcacatagttatctcttatgccatccagtgtagttttcttaaccaatacctagctatagattatattagtggttttaatttgtttgaaattagggataatattacgataggcattttttaaatgtaatccattttatacatctaatttcttggataatcttttagaaataaaattaggctgtaaatatttgacagacaccaaaatatattttctagaaatttattaccaaaaattaataaacataccggtttactaaaccctgtccaacactggatattattttcttttaaaaactaagtaccaatttggtagttttatattatgattgttttaaatacactagtattattgaagttggacattttttgaccatttttgttttttacattatgaatcgactcctaatggtgtcggctgatttttctattgtttttgttatgtactctaaatatttgcttgatttagttttttaaaaataattctaaaattttaattttatgtagttatgactgttaatttttttttatgaagcaagccatggattatatacttagaagggctttctctttggctcttctttctacaaaaaattgtcttgtataatattttctcctagtttttatatggttttgtctagttctttgcatgcttcagtttcttcacatttaagacttagtctatcagcagattattgtgtctaacagtatgagttgccagtctgatttttaaaaattttaacaatttgttagctgttccactatcacccgataaacatttttcagtacaaatgatagaaaagcatatcctgtatcctgacaacaaaagtagattacttgcaaaagaacaaaatcagactgaacctagagttttcctctgtaacactaaaaaactagaaggtgatggaatatgtctgtagagctttcagggaaaaattaagagcccccaaaaacttgatattcagagaagttatttctctgcataggaccatgtaaatatattttcactcatgcagagaatcagaagatatgccatctagttaatcctgtctgaaaaattattcaatccactgagaacttcagtgaactcaagaattagcaagttatgccctaaagtgctggtgatgaagagcaaaagaaaaatgagaaaggacataaaatagataagtttagaagtttcaaggaaggagactattaattgcaaaaatatanatgacctaatgtgacccaagaagtaaaaactttcagtaagtaaataatcaagaaaggaacttaaaatttttacaataagaactacccagaaagatgactccttcatccgggtgatttatatgtcaagttcttccagacttctgaagggcagataattcctgtgcatttcttcccacccttgccccaccctgcccaaaagagtatttcaggaaaaaattattataccttgattctcaatgtaattgtatattcagtgtatttccctttattttccagcagtatcatacataaacagttaattggtatctaggtgtttgttacatagtcataataaagacatttaattttttttaactaggtatcttatggtgagatggtgggatgtgataaccaagatgtaagtattacatttttctatttaggaatgaaaaaaatcacaggttgttattacttgaatatttgtcttatttgctgtatggtttggtctaagaaaacaggtttgcaggtatattagttatnttatgctaatgctagaatattcctcttcaaaatagggtagtgtcccttaatgtgttccctattttaatttttaaagctaattttatggttttatgtgcagattgtctcagaagtgttatgttgtatgaaaattataaataccctcctttccctttactaaaaaatactgtgtttactagaatccagttcatttatcacattgaagaaatggaattttaaaacaattcattctttcaggctgcaccgtgctaaagtgaagggtgggataattgaggatctaatgtgagattatcttcctctcatgagtataatattttttcctgtactctgcaggtgtcagctgataagagccacccctgatctaaaaagtaaaggaaatttgaaaggaaggaattcttggtttttaggagacttaattttagttagagatacgttttttattcaatactgagaatattgttgtctagtaattttgactccctccttatttagtagtgacaggatcctaagattaacaagagttttaaatttgtaaaacaatctgaagattgagggagctggctaggtgcattaaaatgtgtacttttcctagacctgatagggttacagcaacatgctcacgtagattgggacagagcctccttctgtttccctgtctagaatcccttgtaggctgtttgtggttgttgcaaaaacaatattgcccaaccatttcaagaacatcactgtaaactcttctggggcagttagtgaaaatgatgaatgaggtttctatggagtacccagcatcatgcttctctggattcttcttattccccagttgtgctcttctgagtgctaaggactttcatgaaagagttttctgcttaatatgtttcaaagaggaataatttttctctacatttcaaggaatagaaacacccacgtaggaaatgcagggcataagacataaattaatgtctttaattacaatcagcttattctactttatgagacagcaaataaggctgactattaaataaaatcttaagttatatttaccttctacatagaagattcatcccacttctttttgcccttgaaagctgaaaactagtgaattttcattcattaggatgaggggactagattacatggacctcaggattcttgaagatgcataatttttctgtgccttcatttcctcattcctgaagcttatcatttagtctaaatgatgtctaaataatctagatctaaaaattctgatgtcacacatctaattattgttaaattaaatggattattcagtctcctgagcatattttaatatactctcttgtcttcagaagtactgaaaacttgttttttgcaattttgctttctagtgccctatagaatggttccattatggctgcgttggattgacagaggcaccaaaaggcaaatggtactgtccacagtgcactgctgcaatgaagagaagaggcagcagacacaaataaaggtggtccttttgtttgatgaagaaataaacttcagctgaagattttatataggactttaaaaagaagagaagagaaagaagaaacaatgcatttccaggcaaccacttaaaggatttacatagacaatcctataagatcttgaacttgaattttatgggttgtattttaataatgtaagtaaattatttatgcactcctggtgtgctatgaatattattccagttagccttggattatttcagtggccaacatatgcagacatttgtactcctcaaccattttctcaaagtaatgggcattctatgatttagacttcaaggaattccaatgatgaagattttaaggaaagtattttatattcaacaggtatattctgctgcatgtactgtactccagagctgttatgtaacactgtatataaatggttgcaaaaaaaaaaaaaagtcagtgcttctaaaaagaatttaagataatggtttttaaaatgcctttataataagctttgtttctttgtgaaactaattcagcaggctgaaggaaatggttcatgtgataatgtgggctggtatcctctagagtacctgggtacataaacagaaactcctgtaggtaaaaagtaatttgtgccattagtctttctatgtttctgcatccagatagagtgcagttcatgagggagggggcgggggactgaaggggaaagggcgttaaagtgatacatttttataccaaatgtgtttatttttttgtgcaagtaatccttaaaattgcaattgtattaggtgttaaaataaagtttttaaaaaattacttgtatttatactttacatacttaataatgaaaatttctgaattccaattaactttcaactttcataatctaaaaagaatcagagacccaggacacagaatactgtgtaatctgtgatgtctttaatgatgtttagagtttgtgatataagaatacaggaaagacatttttaatgtaaatttgaaatgccaatgtatttttttaagaacatcatctggcttttccttcagtctaaaagacatgaaagaagtgtaagtatagcagttaaaacgaaaataatggttatgggtgttttgactggaggcaatgtagccaaatagagtaaagagacccccctggtcgggagctccaaattgagctatttttgattctaccacttactgatatgacagttaattcaaattttgtatcactctgggccttactacaccagggtgatgctgactgcagaatagatcttattctaaggtgctatttaaattataaatttgcatagtggaggttttatttaaagtataatattgagtctggtcgatagaaaaatccttaacttttaagatacttaatatatcatatatattttatattgaaacttactgggtccatcagatttctgctttaattaaaccacttatgagcttcttagaacttattcagataacagtgtaaaatctatgcagtgctacccaaagggtgtgaggtagataggggatttcaaagatctcttccacctttgagatcccatgattctgagctgccacagtctgattatacaactctaccagctcccta

SEQ ID NO: 444646 - DNA, 2889 bp, Homo sapiens
ttcccggagtcgagcgggtgctgctagcggaggcgccatattggaggggacaaaactccggcgacagcgagtgacacaaataaacccctggacccccttgttccctcagctctaagggccgcgatgttgtacctagaagactatctggaaatgattgagcagcttcctatggatctgcgggaccgcttcacggaaatgcgcgagatggacctgcaggtgcagaatgcaatggatcaactagaacaaagagtcagtgaattctttatgaatgcaaagaaaaataaacctgagtggagggaagagcaaatggcatccatcaaaaaagactactataaagctttggaagatgcagatgagaaggttcagttggcaaaccagatatatgacttggatctttggaattagacactccttcacagccagtgaacaatcaccatgctcattcacatactccagtggaaaaaaggaaatataatccaacttctcaccatacgacaacagatcatattcctgaaaagaaatttaaatctgaagctcttctatccacccttacgtcagatgcctctaaggaaaatacactaggttgtcgaaataataattccacagcctcttctaacaatgcctacaatgtgaattcctcccaacctctgggatcctataacattggctcgttatcttcaggaactggtgcaggggcaattaccatggcagctgctcaagcagttcaggctacagctcagatgaaggagggacgaagaacatcaagtttaaaagccagttatgaagcatttaagaataatgactttcagttgggaaaagaattttcaatggccagggaaacagttggctattcatcatcttcggcacttatgacaacattaacacagaatgccagttcatcagcagccgactcacggagtggtcgaaagagcaaaaacaacaacaagtcttcaagccagcagtcatcatcttcctcctcctcttcttccttatcatcgtgttcttcatcatcaactgttgtacaagaaatctctcaacaaacaactgtagtgccagaatctgattcaaatagtcaggttgattggacttacgacccaaatgaacctcgatactgcatttgtaatcaggtatcttatggtgagatggtgggatgtgataaccaagattgccctatagaatggttccattatggctgcgttggattgacagaggcaccaaaaggcaaatggtactgtccacagtgcactgctgcaatgaagagaagaggcagcagacacaaataaaggtggtccttttgtttgatgaagaaataaacttcagctgaagattttatataggactttaaaaagaagagaagagaaagaagaaacaatgcatttccaggcaaccacttaaaggatttacatagacaatcctataagatcttgaacttgaattttatgggttgtattttaataatgtaagtaaattatttatgcactcctggtgtgctatgaatattattccagttagccttggattatttcagtggccaacatatgcagacatttgtactcctcaaccattttctcaaagtaatgggcattctatgatttagacttcaaggaattccaatgatgaagattttaaggaaagtattttatattcaacaggtatattctgctgcatgtactgtactccagagctgttatgtaacactgtatataaatggttgcaaaaaaaaaaaaaagtcagtgcttctaaaaagaatttaagataatggtttttaaaatgcctttataataagctttgtttctttgtgaaactaattcagcaggctgaaggaaatggttcatgtgataatgtgggctggtatcctctagagtacctgggtacataaacagaaactcctgtaggtaaaaagtaatttgtgccattagtctttctatgtttctgcatccagatagagtgcagttcatgagggagggggcgggggactgaaggggaaagggcgttaaagtgatacatttttataccaaatgtgtttatttttttgtgcaagtaatccttaaaattgcaattgtattaggtgttaaaataaagtttttaaaaaattacttgtatttatactttacatacttaataatgaaaatttctgaattccaattaactttcaactttcataatctaaaaagaatcagagacccaggacacagaatactgtgtaatctgtgatgtctttaatgatgtttagagtttgtgatataagaatacaggaaagacatttttaatgtaaatttgaaatgccaatgtatttttttaagaacatcatctggcttttccttcagtctaaaagacatgaaagaagtgtaagtatagcagttaaaacgaaaataatggttatgggtgttttgactggaggcaatgtagccaaatagagtaaagagacccccctggtcgggagctccaaattgagctatttttgattctaccacttactgatatgacagttaattcaaattttgtatcactctgggccttactacaccagggtgatgctgactgcagaatagatcttattctaaggtgctatttaaattataaatttgcatagtggaggttttatttaaagtataatattgagtctggtcgatagaaaaatccttaacttttaagatacttaatatatcatatatattttatattgaaacttactgggtccatcagatttctgctttaattaaaccacttatgagcttcttagaacttattcagataacagtgtaaaatctatgcagtgctacccaaagggtgtgaggtagataggggatttcaaagatctcttccacctttgagatcccatgattctgagctgccacagtctgattatacaactctaccagctcccta

SEQ ID NO: 444647 - DNA, 2204 bp, Homo sapiens
  misc_feature (42)..(42): n is a, c, g, or t
tttttctagttcctcgtccaccctttttgttttttttatttnccctttttctactatgaaggagggacgaagaacatcaagtttaaaagccagttatgaagcatttaagaataatgactttcagttgggaaaagaattttcaatggccagggaaacagttggctattcatcatcttcggcacttatgacaacattaacacagaatgccagttcatcagcagccgactcacggagtggtcgaaagagcaaaaacaacaacaagtcttcaagccagcagtcatcatcttcctcctcctcttcttccttatcatcgtgttcttcatcatcaactgttgtacaagaaatctctcaacaaacaactgtagtgccagaatctgattcaaatagtcaggttgattggacttacgacccaaatgaacctcgatactgcatttgtaatcaggtatcttatggtgagatggtgggatgtgataaccaagattgccctatagaatggttccattatggctgcgttggattgacagaggcaccaaaaggcaaatggtactgtccacagtgcactgctgcaatgaagagaagaggcagcagacacaaataaaggtggtccttttgtttgatgaagaaataaacttcagctgaagattttatataggactttaaaaagaagagaagagaaagaagaaacaatgcatttccaggcaaccacttaaaggatttacatagacaatcctataagatcttgaacttgaattttatgggttgtattttaataatgtaagtaaattatttatgcactcctggtgtgctatgaatattattccagttagccttggattatttcagtggccaacatatgcagacatttgtactcctcaaccattttctcaaagtaatgggcattctatgatttagacttcaaggaattccaatgatgaagattttaaggaaagtattttatattcaacaggtatattctgctgcatgtactgtactccagagctgttatgtaacactgtatataaatggttgcaaaaaaaaaaaaaagtcagtgcttctaaaaagaatttaagataatggtttttaaaatgcctttataataagctttgtttctttgtgaaactaattcagcaggctgaaggaaatggttcatgtgataatgtgggctggtatcctctagagtacctgggtacataaacagaaactcctgtaggtaaaaagtaatttgtgccattagtctttctatgtttctgcatccagatagagtgcagttcatgagggagggggcgggggactgaaggggaaagggcgttaaagtgatacatttttataccaaatgtgtttatttttttgtgcaagtaatccttaaaattgcaattgtattaggtgttaaaataaagtttttaaaaaattacttgtatttatactttacatacttaataatgaaaatttctgaattccaattaactttcaactttcataatctaaaaagaatcagagacccaggacacagaatactgtgtaatctgtgatgtctttaatgatgtttagagtttgtgatataagaatacaggaaagacatttttaatgtaaatttgaaatgccaatgtatttttttaagaacatcatctggcttttccttcagtctaaaagacatgaaagaagtgtaagtatagcagttaaaacgaaaataatggttatgggtgttttgactggaggcaatgtagccaaatagagtaaagagacccccctggtcgggagctccaaattgagctatttttgattctaccacttactgatatgacagttaattcaaattttgtatcactctgggccttactacaccagggtgatgctgactgcagaatagatcttattctaaggtgctatttaaattataaatttgcatagtggaggttttatttaaagtataatattgagtctggtcgatagaaaaatccttaacttttaagatacttaatatatcatatatattttatattgaaacttactgggtccatcagatttctgctttaattaaaccacttatgagcttcttagaacttattcagataacagtgtaaaatctatgcagtgctacccaaagggtgtgaggtagataggggatttcaaagatctcttccacctttgagatcccatgattctgagctgccacagtctgattatacaactctaccagctcccta

SEQ ID NO: 444648 - DNA, 804 bp, Homo sapiens
ttcccggagtcgagcgggtgctgctagcggaggcgccatattggaggggacaaaactccggcgacagcgagtgacacaaataaacccctggacccccttgttccctcagctctaagggccgcgatgttgtacctagaagactatctggaaatgattgagcagcttcctatggatctgcgggaccgcttcacggaaatgcgcgagatggacctgcaggtgcagaatgcaatggatcaactagaacaaagagtcagtgaattctttatgaatgcaaagaaaaataaacctgagtggagggaagagcaaatggcatccatcaaaaaagactactataaagctttggaagatgcagatgagaaggttcagttggcaaaccagatatatgacttggtaagtaaaagtaatgtgcatactgtgccataagtacttgaataacagattatatcttaaattgtattggcttaaatgtagtaggaagaagcaactaaaactgaagtattgctctcttgatcacatctaatttgacatttcagtgtccattttatggtttctttgtggaaaagtcagagtggttagttaatgtggtgagaactgtacattttagcaagtctatacggcggtaaggtggtttctgatgttagatattttttaaacaagaattaatgtttaactttattttactaatccttgtcttcttaaggtagtgtgtttacttgccttatacatcattttgagattgtttctgtggtaaaatacacctaagaagactgctttgacaagagttcttggtagtctgattaaaat

SEQ ID NO: 444649 - DNA, 2889 bp, Homo sapiens
ccggagtcgagcgggtgctgctagcgatgttgtacctagaagactatctggaaatgattgagcagcttcctatggatctgcgggaccgcttcacggaaatgcgcgagatggacctgcaggtgcagaatgcaatggatcaactagaacaaagagtcagtgaattctttatgaatgcaaagaaaaataaacctgagtggagggaagagcaaatggcatccatcaaaaaagactactataaagctttggaagatgcagatgagaaggttcagttggcaaaccagatatatgacttggtagatcgacacttgagaaagctggatcaggaactggctaagtttaaaatggagctggaagctgataatgctggaattacagaaatattagagaggcgatctttggaattagacactccttcacagccagtgaacaatcaccatgctcattcacatactccagtggaaaaaaggaaatataatccaacttctcaccatacgacaacagatcatattcctgaaaagaaatttaaatctgaagctcttctatccacccttacgtcagatgcctctaaggaaaatacactaggttgtcgaaataataattccacagcctcttctaacaatgcctacaatgtgaattcctcccaacctctgggatcctataacattggctcgttatcttcaggaactggtgcaggggcaattaccatggcagctgctcaagcagttcaggctacagctcagatgaaggagggacgaagaacatcaagtttaaaagccagttatgaagcatttaagaataatgactttcagttgggaaaagaattttcaatggccagggaaacagttggctattcatcatcttcggcacttatgacaacattaacacagaatgccagttcatcagcagccgactcacggagtggtcgaaagagcaaaaacaacaacaagtcttcaagccagcagtcatcatcttcctcctcctcttcttccttatcatcgtgttcttcatcatcaactgttgtacaagaaatctctcaacaaacaactgtagtgccagaatctgattcaaatagtcaggttgattggacttacgacccaaatgaacctcgatactgcatttgtaatcaggtatcttatggtgagatggtgggatgtgataaccaagattgccctatagaatggttccattatggctgcgttggattgacagaggcaccaaaaggcaaatggtactgtccacagtgcactgctgcaatgaagagaagaggcagcagacacaaataaaggtggtccttttgtttgatgaagaaataaacttcagctgaagattttatataggactttaaaaagaagagaagagaaagaagaaacaatgcatttccaggcaaccacttaaaggatttacatagacaatcctataagatcttgaacttgaattttatgggttgtattttaataatgtaagtaaattatttatgcactcctggtgtgctatgaatattattccagttagccttggattatttcagtggccaacatatgcagacatttgtactcctcaaccattttctcaaagtaatgggcattctatgatttagacttcaaggaattccaatgatgaagattttaaggaaagtattttatattcaacaggtatattctgctgcatgtactgtactccagagctgttatgtaacactgtatataaatggttgcaaaaaaaaaaaaaagtcagtgcttctaaaaagaatttaagataatggtttttaaaatgcctttataataagctttgtttctttgtgaaactaattcagcaggctgaaggaaatggttcatgtgataatgtgggctggtatcctctagagtacctgggtacataaacagaaactcctgtaggtaaaaagtaatttgtgccattagtctttctatgtttctgcatccagatagagtgcagttcatgagggagggggcgggggactgaaggggaaagggcgttaaagtgatacatttttataccaaatgtgtttatttttttgtgcaagtaatccttaaaattgcaattgtattaggtgttaaaataaagtttttaaaaaattacttgtatttatactttacatacttaataatgaaaatttctgaattccaattaactttcaactttcataatctaaaaagaatcagagacccaggacacagaatactgtgtaatctgtgatgtctttaatgatgtttagagtttgtgatataagaatacaggaaagacatttttaatgtaaatttgaaatgccaatgtatttttttaagaacatcatctggcttttccttcagtctaaaagacatgaaagaagtgtaagtatagcagttaaaacgaaaataatggttatgggtgttttgactggaggcaatgtagccaaatagagtaaagagacccccctggtcgggagctccaaattgagctatttttgattctaccacttactgatatgacagttaattcaaattttgtatcactctgggccttactacaccagggtgatgctgactgcagaatagatcttattctaaggtgctatttaaattataaatttgcatagtggaggttttatttaaagtataatattgagtctggtcgatagaaaaatccttaacttttaagatacttaatatatcatatatattttatattgaaacttactgggtccatcagatttctgctttaattaaaccacttatgagcttcttagaacttattcagataacagtgtaaaatctatgcagtgctacccaaagggtgtgaggtagataggggatttcaaagatctcttccacctttgagatcccatgattctgagctgccacagtctgattatacaactctaccagctcccta

SEQ ID NO: 444650 - DNA, 2914 bp, Homo sapiens
ttcccggagtcgagcgggtgctgctagcggaggcgccatattggaggggacaaaactccggcgacagcgagtgacacaaataaacccctggacccccttgttccctcagctctaagggccgcgatgttgtacctagaagactatctggaaaatgcaatggatcaactagaacaaagagtcagtgaattctttatgaatgcaaagaaaaataaacctgagtggagggaagagcaaatggcatccatcaaaaaagactactataaagctttggaagatgcagatgagaaggttcagttggcaaaccagatatatgacttggtagatcgacacttgagaaagctggatcaggaactggctaagtttaaaatggagctggaagctgataatgctggaattacagaaatattagagaggcgatctttggaattagacactccttcacagccagtgaacaatcaccatgctcattcacatactccagtggaaaaaaggaaatataatccaacttctcaccatacgacaacagatcatattcctgaaaagaaatttaaatctgaagctcttctatccacccttacgtcagatgcctctaaggaaaatacactaggttgtcgaaataataattccacagcctcttctaacaatgcctacaatgtgaattcctcccaacctctgggatcctataacattggctcgttatcttcaggaactggtgcaggggcaattaccatggcagctgctcaagcagttcaggctacagctcagatgaaggagggacgaagaacatcaagtttaaaagccagttatgaagcatttaagaataatgactttcagttgggaaaagaattttcaatggccagggaaacagttggctattcatcatcttcggcacttatgacaacattaacacagaatgccagttcatcagcagccgactcacggagtggtcgaaagagcaaaaacaacaacaagtcttcaagccagcagtcatcatcttcctcctcctcttcttccttatcatcgtgttcttcatcatcaactgttgtacaagaaatctctcaacaaacaactgtagtgccagaatctgattcaaatagtcaggttgattggacttacgacccaaatgaacctcgatactgcatttgtaatcaggtatcttatggtgagatggtgggatgtgataaccaagattgccctatagaatggttccattatggctgcgttggattgacagaggcaccaaaaggcaaatggtactgtccacagtgcactgctgcaatgaagagaagaggcagcagacacaaataaaggtggtccttttgtttgatgaagaaataaacttcagctgaagattttatataggactttaaaaagaagagaagagaaagaagaaacaatgcatttccaggcaaccacttaaaggatttacatagacaatcctataagatcttgaacttgaattttatgggttgtattttaataatgtaagtaaattatttatgcactcctggtgtgctatgaatattattccagttagccttggattatttcagtggccaacatatgcagacatttgtactcctcaaccattttctcaaagtaatgggcattctatgatttagacttcaaggaattccaatgatgaagattttaaggaaagtattttatattcaacaggtatattctgctgcatgtactgtactccagagctgttatgtaacactgtatataaatggttgcaaaaaaaaaaaaaagtcagtgcttctaaaaagaatttaagataatggtttttaaaatgcctttataataagctttgtttctttgtgaaactaattcagcaggctgaaggaaatggttcatgtgataatgtgggctggtatcctctagagtacctgggtacataaacagaaactcctgtaggtaaaaagtaatttgtgccattagtctttctatgtttctgcatccagatagagtgcagttcatgagggagggggcgggggactgaaggggaaagggcgttaaagtgatacatttttataccaaatgtgtttatttttttgtgcaagtaatccttaaaattgcaattgtattaggtgttaaaataaagtttttaaaaaattacttgtatttatactttacatacttaataatgaaaatttctgaattccaattaactttcaactttcataatctaaaaagaatcagagacccaggacacagaatactgtgtaatctgtgatgtctttaatgatgtttagagtttgtgatataagaatacaggaaagacatttttaatgtaaatttgaaatgccaatgtatttttttaagaacatcatctggcttttccttcagtctaaaagacatgaaagaagtgtaagtatagcagttaaaacgaaaataatggttatgggtgttttgactggaggcaatgtagccaaatagagtaaagagacccccctggtcgggagctccaaattgagctatttttgattctaccacttactgatatgacagttaattcaaattttgtatcactctgggccttactacaccagggtgatgctgactgcagaatagatcttattctaaggtgctatttaaattataaatttgcatagtggaggttttatttaaagtataatattgagtctggtcgatagaaaaatccttaacttttaagatacttaatatatcatatatattttatattgaaacttactgggtccatcagatttctgctttaattaaaccacttatgagcttcttagaacttattcagataacagtgtaaaatctatgcagtgctacccaaagggtgtgaggtagataggggatttcaaagatctcttccacctttgagatcccatgattctgagctgccacagtctgattatacaactctaccagctcccta

SEQ ID NO: 444651 - DNA, 2986 bp, Homo sapiens
ttcccggagtcgagcgggtgctgctagcggaggcgccatattggaggggacaaaactccggcgacagcgagtgacacaaataaacccctggacccccttgttccctcagctctaagggccgcgatgttgtacctagaagactatctggaaatgattgagcagcttcctatggatctgcgggaccgcttcacggaaatgcgcgagatggacctgcaggtgcagaatgcaatggatcaactagaacaaagagtcagtgaattctttatgaatgcaaagaaaaataaacctgagtggagggaagagcaaatggcatccatcaaaaaagactactataaagctttggaagatgcagatgagaaggttcagttggcaaaccagatatatgacttggtagatcgacacttgagaaagctggatcaggaactggctaagtttaaaatggagctggaagctgataatgctggaattacagaaatattagagaggcgatctttggaattagacactccttcacagccagtgaacaatcaccatgctcattcacatactccagtggaaaaaaggaaatataatccaacttctcaccatacgacaacagatcatattcctgaaaagaaatttaaatctgaagctcttctatccacccttacgtcagatgcctctaaggaaaatacactaggttgtcgaaataataattccacagcctcttctaacaatgcctacaatgtgaattcctcccaacctctgggatcctataacattggctcgttatcttcaggaactggtgcaggggcaattaccatggcagctgctcaagcagttcaggctacagctcagatgaaggagggacgaagaacatcaagtttaaaagccagttatgaagcatttaagaataatgactttcagttgggaaaagaattttcaatggccagggaaacagttggctattcatcatcttcggcacttatgacaacattaacacagaatgccagttcatcagcagccgactcacggagtggtcgaaagagcaaaaacaacaacaagtcttcaagccagcagtcatcatcttcctcctcctcttcttccttatcatcgtgttcttcatcatcaactgttgtacaagaaatctctcaacaaacaactgtagtgccagaatctgattcaaatagtcaggttgattggacttacgacccaaatgaacctcgatactgcatttgtaatcaggtatcttatggtgagatggtgggatgtgataaccaagattgccctatagaatggttccattatggctgcgttggattgacagaggcaccaaaaggcaaatggtactgtccacagtgcactgctgcaatgaagagaagaggcagcagacacaaataaaggtggtccttttgtttgatgaagaaataaacttcagctgaagattttatataggactttaaaaagaagagaagagaaagaagaaacaatgcatttccaggcaaccacttaaaggatttacatagacaatcctataagatcttgaacttgaattttatgggttgtattttaataatgtaagtaaattatttatgcactcctggtgtgctatgaatattattccagttagccttggattatttcagtggccaacatatgcagacatttgtactcctcaaccattttctcaaagtaatgggcattctatgatttagacttcaaggaattccaatgatgaagattttaaggaaagtattttatattcaacaggtatattctgctgcatgtactgtactccagagctgttatgtaacactgtatataaatggttgcaaaaaaaaaaaaaagtcagtgcttctaaaaagaatttaagataatggtttttaaaatgcctttataataagctttgtttctttgtgaaactaattcagcaggctgaaggaaatggttcatgtgataatgtgggctggtatcctctagagtacctgggtacataaacagaaactcctgtaggtaaaaagtaatttgtgccattagtctttctatgtttctgcatccagatagagtgcagttcatgagggagggggcgggggactgaaggggaaagggcgttaaagtgatacatttttataccaaatgtgtttatttttttgtgcaagtaatccttaaaattgcaattgtattaggtgttaaaataaagtttttaaaaaattacttgtatttatactttacatacttaataatgaaaatttctgaattccaattaactttcaactttcataatctaaaaagaatcagagacccaggacacagaatactgtgtaatctgtgatgtctttaatgatgtttagagtttgtgatataagaatacaggaaagacatttttaatgtaaatttgaaatgccaatgtatttttttaagaacatcatctggcttttccttcagtctaaaagacatgaaagaagtgtaagtatagcagttaaaacgaaaataatggttatgggtgttttgactggaggcaatgtagccaaatagagtaaagagacccccctggtcgggagctccaaattgagctatttttgattctaccacttactgatatgacagttaattcaaattttgtatcactctgggccttactacaccagggtgatgctgactgcagaatagatcttattctaaggtgctatttaaattataaatttgcatagtggaggttttatttaaagtataatattgagtctggtcgatagaaaaatccttaacttttaagatacttaatatatcatatatattttatattgaaacttactgggtccatcagatttctgctttaattaaaccacttatgagcttcttagaacttattcagataacagtgtaaaatctatgcagtgctacccaaagggtgtgaggtagataggggatttcaaagatctcttccacctttgagatcccatgattctgagctgccacagtctgattatacaactctaccagctcccta

SEQ ID NO: 444652 - DNA, 1819 bp, Homo sapiens
  misc_feature (47)..(47): n is a, c, g, or t
  misc_feature (91)..(91): n is a, c, g, or t
gttccgactacaccttactgactactacatcgacattcaacccacancctccagtgacaactagcgggcggagttttgggatgtgataacnaagattgccctatagaatggttccattatggctgcgttggattgacagaggcaccaaaaggcaaatggtactgtccacagtgcactgctgcaatgaagagaagaggcagcagacacaaataaaggtggtccttttgtttgatgaagaaataaacttcagctgaagattttatataggactttaaaaagaagagaagagaaagaagaaacaatgcatttccaggcaaccacttaaaggatttacatagacaatcctataagatcttgaacttgaattttatgggttgtattttaataatgtaagtaaattatttatgcactcctggtgtgctatgaatattattccagttagccttggattatttcagtggccaacatatgcagacatttgtactcctcaaccattttctcaaagtaatgggcattctatgatttagacttcaaggaattccaatgatgaagattttaaggaaagtattttatattcaacaggtatattctgctgcatgtactgtactccagagctgttatgtaacactgtatataaatggttgcaaaaaaaaaaaaaagtcagtgcttctaaaaagaatttaagataatggtttttaaaatgcctttataataagctttgtttctttgtgaaactaattcagcaggctgaaggaaatggttcatgtgataatgtgggctggtatcctctagagtacctgggtacataaacagaaactcctgtaggtaaaaagtaatttgtgccattagtctttctatgtttctgcatccagatagagtgcagttcatgagggagggggcgggggactgaaggggaaagggcgttaaagtgatacatttttataccaaatgtgtttatttttttgtgcaagtaatccttaaaattgcaattgtattaggtgttaaaataaagtttttaaaaaattacttgtatttatactttacatacttaataatgaaaatttctgaattccaattaactttcaactttcataatctaaaaagaatcagagacccaggacacagaatactgtgtaatctgtgatgtctttaatgatgtttagagtttgtgatataagaatacaggaaagacatttttaatgtaaatttgaaatgccaatgtatttttttaagaacatcatctggcttttccttcagtctaaaagacatgaaagaagtgtaagtatagcagttaaaacgaaaataatggttatgggtgttttgactggaggcaatgtagccaaatagagtaaagagacccccctggtcgggagctccaaattgagctatttttgattctaccacttactgatatgacagttaattcaaattttgtatcactctgggccttactacaccagggtgatgctgactgcagaatagatcttattctaaggtgctatttaaattataaatttgcatagtggaggttttatttaaagtataatattgagtctggtcgatagaaaaatccttaacttttaagatacttaatatatcatatatattttatattgaaacttactgggtccatcagatttctgctttaattaaaccacttatgagcttcttagaacttattcagataacagtgtaaaatctatgcagtgctacccaaagggtgtgaggtagataggggatttcaaagatctcttccacctttgagatcccatgattctgagctgccacagtctgattatacaactctaccagctcccta

SEQ ID NO: 444653 - DNA, 3002 bp, Homo sapiens
aaaccgttaaatacttggaaacgctaccgattaagtggggggccggccccatgcgcgggatacgaacgacgagcgcagcgagtagtgagcgagagcggcgataacttcgtatactacatatcgaagtatagtcgaggacgaattccggaatcggcatacgcggggcctgattgagcagcttcctatggatctgcgggaccgcttcacggaaatgcgcgagatggacctgcaggtgcagaatgcaatggatcaactagaacaaagagtcagtgaattctttatgaatgcaaagaaaaataaacctgagtggagggaagagcaaatggcatccatcaaaaaagactactataaagctttggaagatgcagatgagaaggttcagttggcaaaccagatatatgacttggtagatcgacacttgagaaagctggatcaggaactggctaagtttaaaatggagctggaagctgataatgctggaattacagaaatattagagaggcgatctttggaattagacactccttcacagccagtgaacaatcaccatgctcattcacatactccagtggaaaaaaggaaatataatccaacttctcaccatacgacaacagatcatattcctgaaaagaaatttaaatctgaagctcttctatccacccttacgtcagatgcctctaaggaaaatacactaggttgtcgaaataataattccacagcctcttctaacaatgcctacaatgtgaattcctcccaacctctgggatcctataacattggctcgttatcttcaggaactggtgcaggggcaattaccatggcagctgctcaagcagttcaggctacagctcagatgaaggagggacgaagaacatcaagtttaaaagccagttatgaagcatttaagaataatgactttcagttgggaaaagaattttcaatggccagggaaacagttggctattcatcatcttcggcacttatgacaacattaacacagaatgccagttcatcagcagccgactcacggagtggtcgaaagagcaaaaacaacaacaagtcttcaagccagcagtcatcatcttcctcctcctcttcttccttatcatcgtgttcttcatcatcaactgttgtacaagaaatctctcaacaaacaactgtagtgccagaatctgattcaaatagtcaggttgattggacttacgacccaaatgaacctcgatactgcatttgtaatcaggtatcttatggtgagatggtgggatgtgataaccaagattgccctatagaatggttccattatggctgcgttggattgacagaggcaccaaaaggcaaatggtactgtccacagtgcactgctgcaatgaagagaagaggcagcagacacaaataaaggtggtccttttgtttgatgaagaaataaacttcagctgaagattttatataggactttaaaaagaagagaagagaaagaagaaacaatgcatttccaggcaaccacttaaaggatttacatagacaatcctataagatcttgaacttgaattttatgggttgtattttaataatgtaagtaaattatttatgcactcctggtgtgctatgaatattattccagttagccttggattatttcagtggccaacatatgcagacatttgtactcctcaaccattttctcaaagtaatgggcattctatgatttagacttcaaggaattccaatgatgaagattttaaggaaagtattttatattcaacaggtatattctgctgcatgtactgtactccagagctgttatgtaacactgtatataaatggttgcaaaaaaaaaaaaaagtcagtgcttctaaaaagaatttaagataatggtttttaaaatgcctttataataagctttgtttctttgtgaaactaattcagcaggctgaaggaaatggttcatgtgataatgtgggctggtatcctctagagtacctgggtacataaacagaaactcctgtaggtaaaaagtaatttgtgccattagtctttctatgtttctgcatccagatagagtgcagttcatgagggagggggcgggggactgaaggggaaagggcgttaaagtgatacatttttataccaaatgtgtttatttttttgtgcaagtaatccttaaaattgcaattgtattaggtgttaaaataaagtttttaaaaaattacttgtatttatactttacatacttaataatgaaaatttctgaattccaattaactttcaactttcataatctaaaaagaatcagagacccaggacacagaatactgtgtaatctgtgatgtctttaatgatgtttagagtttgtgatataagaatacaggaaagacatttttaatgtaaatttgaaatgccaatgtatttttttaagaacatcatctggcttttccttcagtctaaaagacatgaaagaagtgtaagtatagcagttaaaacgaaaataatggttatgggtgttttgactggaggcaatgtagccaaatagagtaaagagacccccctggtcgggagctccaaattgagctatttttgattctaccacttactgatatgacagttaattcaaattttgtatcactctgggccttactacaccagggtgatgctgactgcagaatagatcttattctaaggtgctatttaaattataaatttgcatagtggaggttttatttaaagtataatattgagtctggtcgatagaaaaatccttaacttttaagatacttaatatatcatatatattttatattgaaacttactgggtccatcagatttctgctttaattaaaccacttatgagcttcttagaacttattcagataacagtgtaaaatctatgcagtgctacccaaagggtgtgaggtagataggggatttcaaagatctcttccacctttgagatcccatgattctgagctgccacagtctgattatacaactctaccagctcccta

SEQ ID NO: 444654 - DNA, 2462 bp, Homo sapiens
gtttaaaaacacatgaattttttatttatatttagaaaggaaatataatccaacttctcaccatacgacaacagatcatattcctgaaaagaaatttaaatctgaagctcttctatccacccttacgtcagatgcctctaaggaaaatacactaggttgtcgaaataataattccacagcctcttctaacaatgcctacaatgtgaattcctcccaacctctgggatcctataacattggctcgttatcttcaggaactggtgcaggggcaattaccatggcagctgctcaagcagttcaggctacagctcagatgaaggagggacgaagaacatcaagtttaaaagccagttatgaagcatttaagaataatgactttcagttgggaaaagaattttcaatggccagggaaacagttggctattcatcatcttcggcacttatgacaacattaacacagaatgccagttcatcagcagccgactcacggagtggtcgaaagagcaaaaacaacaacaagtcttcaagccagcagtcatcatcttcctcctcctcttcttccttatcatcgtgttcttcatcatcaactgttgtacaagaaatctctcaacaaacaactgtagtgccagaatctgattcaaatagtcaggttgattggacttacgacccaaatgaacctcgatactgcatttgtaatcaggtatcttatggtgagatggtgggatgtgataaccaagattgccctatagaatggttccattatggctgcgttggattgacagaggcaccaaaaggcaaatggtactgtccacagtgcactgctgcaatgaagagaagaggcagcagacacaaataaaggtggtccttttgtttgatgaagaaataaacttcagctgaagattttatataggactttaaaaagaagagaagagaaagaagaaacaatgcatttccaggcaaccacttaaaggatttacatagacaatcctataagatcttgaacttgaattttatgggttgtattttaataatgtaagtaaattatttatgcactcctggtgtgctatgaatattattccagttagccttggattatttcagtggccaacatatgcagacatttgtactcctcaaccattttctcaaagtaatgggcattctatgatttagacttcaaggaattccaatgatgaagattttaaggaaagtattttatattcaacaggtatattctgctgcatgtactgtactccagagctgttatgtaacactgtatataaatggttgcaaaaaaaaaaaaaagtcagtgcttctaaaaagaatttaagataatggtttttaaaatgcctttataataagctttgtttctttgtgaaactaattcagcaggctgaaggaaatggttcatgtgataatgtgggctggtatcctctagagtacctgggtacataaacagaaactcctgtaggtaaaaagtaatttgtgccattagtctttctatgtttctgcatccagatagagtgcagttcatgagggagggggcgggggactgaaggggaaagggcgttaaagtgatacatttttataccaaatgtgtttatttttttgtgcaagtaatccttaaaattgcaattgtattaggtgttaaaataaagtttttaaaaaattacttgtatttatactttacatacttaataatgaaaatttctgaattccaattaactttcaactttcataatctaaaaagaatcagagacccaggacacagaatactgtgtaatctgtgatgtctttaatgatgtttagagtttgtgatataagaatacaggaaagacatttttaatgtaaatttgaaatgccaatgtatttttttaagaacatcatctggcttttccttcagtctaaaagacatgaaagaagtgtaagtatagcagttaaaacgaaaataatggttatgggtgttttgactggaggcaatgtagccaaatagagtaaagagacccccctggtcgggagctccaaattgagctatttttgattctaccacttactgatatgacagttaattcaaattttgtatcactctgggccttactacaccagggtgatgctgactgcagaatagatcttattctaaggtgctatttaaattataaatttgcatagtggaggttttatttaaagtataatattgagtctggtcgatagaaaaatccttaacttttaagatacttaatatatcatatatattttatattgaaacttactgggtccatcagatttctgctttaattaaaccacttatgagcttcttagaacttattcagataacagtgtaaaatctatgcagtgctacccaaagggtgtgaggtagataggggatttcaaagatctcttccacctttgagatcccatgattctgagctgccacagtctgattatacaactctaccagctcccta

SEQ ID NO: 444655 - DNA, 1201 bp, Homo sapiens
ttcccggagtcgagcgggtgctgctagcggaggcgccatattggaggggacaaaactccggcgacagcgagtgacacaaataaacccctggacccccttgttccctcagctctaagggccgcgatgttgtacctagaagactatctggaaatgattgagcagcttcctatggatctgcgggaccgcttcacggaaatgcgcgagatggacctgcaggtgcagaatgcaatggatcaactagaacaaagagtcagtgaattctttatgaatgcaaagaaaaataaacctgagtggagggaagagcaaatggcatccatcaaaaaagactactataaagctttggaagatgcagatgagaaggttcagttggcaaaccagatatatgacttgcagcacttctaaaagattgaaaacaccaagaagatagatagaatattcactatttctcatattgatgcaattgtggtgctctttttcatttgaaacatcttctcctaaaatatacactttaagaaatagtcatttctgtttttgcattaaagtaaattaaagcagaaaacacatgctcacttttggctaacttcagtgtatagatttcatacttatgttgtctttcctgggtacagatttattactgaacaagtacgtgtaagtaaaatgtcattggtgagcaggacacaagataaaaggtgaacaccacatatggtgtgaattgtaaatgcttataccacaaacttgaaaatgtgtcatgtagagccatggaaaatgtctagttgtttttatgtagtacacacattttaatggtgctaacaacctgggctcttttgttcatagagttattctgaaaaaaatttcataaaagacactgcctaaagataggtagaataggctgtagcttgatttactgtggaataaaaaccaaaaaaaaaaaggtcttaattgtttcagtctttaattatgtctataaacttagaaaaaggcatttacatttgaatctagactaatttgtttagtaacattcttcctcatattcaatgactgtatgtatcagtccttatttagagactgcctgctttttaattcatatagctctttggttctattctttgttttgtttattattttgttgttttattgcttgttagacctttactaaagatattttgtgtatttagaaaaaatataacataaatatatgctt

SEQ ID NO: 444656 - DNA, 585 bp, Homo sapiens
  misc_feature (27)..(27): n is a, c, g, or t
cggacgcgtgggtcgacccacgcgtcngttaagccaattaaaatcacataagattaaaaattccttcctcagttgcactaaccacgtttctagaggcgtcactgtatgtagttcatggctactgtactgacagcgagagcatgtccatctgttggacagcactattctagagaactaaactggcttaacgagtcacagcctcagctgtgctgggacgacccttgtctccctgggtaggaggggggggaatgggggagggctgatgaggccccagctggggcctgttgtctgggaccctccctctcctgagaggggaggcctggtggcttagcctgggcaggtcgtgtctcctcctgaccccagtggctgcggtgaggggaaccaccctcccttgctgcaccagtggccattagctcccgtcaccactgcaacccagggtcccagctggctgggtcctcttctgcccccagtgcccttccccttgggctgtgttggagtgagcacctcctctgtaggcacctctcacactgttgtctgttactgattttttttgataaaaagataataaaacctggtacttctaaa

SEQ ID NO: 444657 - DNA, 595 bp, Homo sapiens
aaaataatgtgtaaaatatttgtgctatctgtataagatgtatatgaaaccccaaagaattttgacttgggtcccatccccaagatatctcattatgtatatgcaaatatccccaaatctgaaaaaaaaaaaaaaaaaaaaactcgagactagttctctcctcgtgccgcactattctagagaactaaactggcttaacgagtcacagcctcagctgtgctgggacgacccttgtctccctgggtaggaggggggggaatgggggagggctgatgaggccccagctggggcctgttgtctgggaccctccctctcctgagaggggaggcctggtggcttagcctgggcaggtcgtgtctcctcctgaccccagtggctgcggtgaggggaaccaccctcccttgctgcaccagtggccattagctcccgtcaccactgcaacccagggtcccagctggctgggtcctcttctgcccccagtgcccttccccttgggctgtgttggagtgagcacctcctctgtaggcacctctcacactgttgtctgttactgattttttttgataaaaagataataaaacctggtacttctaaa

SEQ ID NO: 444658 - DNA, 2553 bp, Homo sapiens
cactcgccgcagcctgcgcgccttctccagtccgcggtgccatggcccccgcccgtctgttcgcgctgctgctgttcttcgtaggcggagtcgccgagtcgatccgagagactgaggtcatcgacccccaggacctcctagaaggccgatacttctccggagccctaccagacgatgaggatgtagtggggcccgggcaggaatctgatgactttgagctgtctggctctggagatctggatgacttggaagactccatgatcggccctgaagttgtccatcccttggtgcctctagataaccatatccctgagagggcagggtctgggagccaagtccccaccgaacccaagaaactagaggagaatgaggttatccccaagagaatctcacccgttgaagagagtgaggatgtgtccaacaaggtgtcaatgtccagcactgtgcagggcagcaacatctttgagagaacggaggtcctggcagctctgattgtgggtggcatcgtgggcatcctctttgccgtcttcctgatcctactgctcatgtaccgtatgaagaagaaggatgaaggcagctatgacctgggcaagaaacccatctacaagaaagcccccaccaatgagttctacgcgtgaagcttgcttgtgggcactggcttggactttagcggggagggaagccaggggattttgaagggtggacattagggtagggtgaggtcaacctaatactgacttgtcagtatctccagctctgattacctttgaagtgttcagaagagacattgtcttctactgttctgccaggttcttcttgagctttgggcctcagttgccctggcagaaaaatggattcaacttggcctttctgaaggcaagactgggattggatcacttcttaaacttccagttaagaatctaggtccgccctcaagcccatactgaccatgcctcatccagagctcctctgaagccagggggctaacggatgttgtgtggagtcctggctggaggtcctcccccagtggccttcctcccttcctttcacagccggtctctctgccaggaaatgggggaaggaactagaaccacctgcaccttgagatgtttctgtaaatgggtacttgtgatcacactacgggaatcttttttatttgggggggaggatggggaaaagagctgagagtttatgctgaaatggatttatagaatatttgtaaatctatttttagtgtttgttcgtttttttaactgttcattcctttgtgcagagtgtatatctctgcctgggcaagagtgtggaggtgccgaggtgtcttcattctctcgcacatttccacagcacctgctaagtttgtatttaatggtttttgtttttgtttttgtttgtttcttgaaaatgagagaagagccggagagatgatttttattaattttttttttttttttttttttactatttatagctttagatagggcctcccttcccctcttctttctttgttctctttcattaaaccccttccccagttttttttttatactttaaaccccgctcctcatggccttggccctttctgaagctgcttcctcttataaaatagcttttgccgaaacatagtttttttttagcagatcccaaaatataatgaaggggatggtgggatatttgtgtctgtgttcttataatatattattattcttccttggttctagaaaaatagataaatatatttttttcaggaaatagtgtggtgtttccagtttgatgttgctgggtggttgagtgagtgaattttcatgtggctgggtgggtttttgcctttttctcttgccctgttcctggtgccttctgatggggctggaatagttgaggtggatggttctaccctttctgccttctgtttgggacccagctggtgttctttggtttgctttcttcaggctctagggctgtgctatccaatacagtaaccacatgcggctgtttaaagttaagccaattaaaatcacataagattaaaaattccttcctcagttgcactaaccacgtttctagaggcgtcactgtatgtagttcatggctactgtactgacagcgagagcatgtccatctgttggacagcactattctagagaactaaactggcttaacgagtcacagcctcagctgtgctgggacgacccttgtctccctgggtaggaggggggggaatgggggagggctgatgaggccccagctggggcctgttgtctgggaccctccctctcctgagaggggaggcctggtggcttagcctgggcaggtcgtgtctcctcctgaccccagtggctgcggtgaggggaaccaccctcccttgctgcaccagtggccattagctcccgtcaccactgcaacccagggtcccagctggctgggtcctcttctgcccccagtgcccttccccttgggctgtgttggagtgagcacctcctctgtaggcacctctcacactgttgtctgttactgattttttttgataaaaagataataaaacctggtacttctaaa

SEQ ID NO: 444659 - DNA, 2229 bp, Homo sapiens
cactcgccgcagcctgcgcgccttctccagtccgcggtgccatggcccccgcccgtctgttcgcgctgctgctgttcttcgtaggcggagtcgccgagtcgatccgagagactgaggtcatcgacccccaggacctcctagaaggccgatacttctccggagccctaccagacgatgaggatgtagtggggcccgggcaggaatctgatgactttgagctgtctggctctggagatctggatgacttggaagactccatgatcggccctgaagttgtccatcccttggtgcctctagataaccatatccctgagagggcagggtctgggagccaagtccccaccgaacccaagaaactagaggagaatgaggttatccccaagagaatctcacccgttgaagagagtgaggatgtgtccaacaaggtgtcaatgtccagcactgtgcagggcagcaacatctttgagagaacggaggtcctggcagctctgattgtgggtggcatcgtgggcatcctctttgccgtcttcctgatcctactgctcatgtaccgtatgaagaagaaggatgaaggcagctatgacctgggcaagaaacccatctacaagaaagcccccaccaatgagttctacgcgtgaagccagtggccttcctcccttcctttcacagccggtctctctgccaggaaatgggggaaggaactagaaccacctgcaccttgagatgtttctgtaaatgggtacttgtgatcacactacgggaatctctgtggtatatacctggggccattctaggctctttcaagtgacttttggaaatcaaccttttttatttgggggggaggatggggaaaagagctgagagtttatgctgaaatggatttatagaatatttgtaaatctatttttagtgtttgttcgtttttttaactgttcattcctttgtgcagagtgtatatctctgcctgggcaagagtgtggaggtgccgaggtgtcttcattctctcgcacatttccacagcacctgctaagtttgtatttaatggtttttgtttttgtttttgtttgtttcttgaaaatgagagaagagccggagagatgatttttattaattttttttttttttttttttttactatttatagctttagatagggcctcccttcccctcttctttctttgttctctttcattaaaccccttccccagttttttttttatactttaaaccccgctcctcatggccttggccctttctgaagctgcttcctcttataaaatagcttttgccgaaacatagtttttttttagcagatcccaaaatataatgaaggggatggtgggatatttgtgtctgtgttcttataatatattattattcttccttggttctagaaaaatagataaatatatttttttcaggaaatagtgtggtgtttccagtttgatgttgctgggtggttgagtgagtgaattttcatgtggctgggtgggtttttgcctttttctcttgccctgttcctggtgccttctgatggggctggaatagttgaggtggatggttctaccctttctgccttctgtttgggacccagctggtgttctttggtttgctttcttcaggctctagggctgtgctatccaatacagtaaccacatgcggctgtttaaagttaagccaattaaaatcacataagattaaaaattccttcctcagttgcactaaccacgtttctagaggcgtcactgtatgtagttcatggctactgtactgacagcgagagcatgtccatctgttggacagcactattctagagaactaaactggcttaacgagtcacagcctcagctgtgctgggacgacccttgtctccctgggtaggaggggggggaatgggggagggctgatgaggccccagctggggcctgttgtctgggaccctccctctcctgagaggggaggcctggtggcttagcctgggcaggtcgtgtctcctcctgaccccagtggctgcggtgaggggaaccaccctcccttgctgcaccagtggccattagctcccgtcaccactgcaacccagggtcccagctggctgggtcctcttctgcccccagtgcccttccccttgggctgtgttggagtgagcacctcctctgtaggcacctctcacactgttgtctgttactgattttttttgataaaaagataataaaacctggtacttctaaa

SEQ ID NO: 444660 - DNA, 1074 bp, Homo sapiens
tatttctcgatcgagaacctagcatgtctcgaatcgttaaaccccttccccagttttttttttatactttaaaccccgctcctcatggccttggccctttctgaagctgcttcctcttataaaatagcttttgccgaaacatagtttttttttagcagatcccaaaatataatgaaggggatggtgggatatttgtgtctgtgttcttataatatattattattcttccttggttctagaaaaatagataaatatatttttttcaggaaatagtgtggtgtttccagtttgatgttgctgggtggttgagtgagtgaattttcatgtggctgggtgggtttttgcctttttctcttgccctgttcctggtgccttctgatggggctggaatagttgaggtggatggttctaccctttctgccttctgtttgggacccagctggtgttctttggtttgctttcttcaggctctagggctgtgctatccaatacagtaaccacatgcggctgtttaaagttaagccaattaaaatcacataagattaaaaattccttcctcagttgcactaaccacgtttctagaggcgtcactgtatgtagttcatggctactgtactgacagcgagagcatgtccatctgttggacagcactattctagagaactaaactggcttaacgagtcacagcctcagctgtgctgggacgacccttgtctccctgggtaggaggggggggaatgggggagggctgatgaggccccagctggggcctgttgtctgggaccctccctctcctgagaggggaggcctggtggcttagcctgggcaggtcgtgtctcctcctgaccccagtggctgcggtgaggggaaccaccctcccttgctgcaccagtggccattagctcccgtcaccactgcaacccagggtcccagctggctgggtcctcttctgcccccagtgcccttccccttgggctgtgttggagtgagcacctcctctgtaggcacctctcacactgttgtctgttactgattttttttgataaaaagataataaaacctggtacttctaaa

SEQ ID NO: 444661 - DNA, 1088 bp, Homo sapiens
  misc_feature (27)..(27): n is a, c, g, or t
cggacgcgtgggtcgacccacgcgtcngcttctttctttgttctctttcattaaaccccttccccagttttttttttatactttaaaccccgctcctcatggccttggccctttctgaagctgcttcctcttataaaatagcttttgccgaaacatagtttttttttagcagatcccaaaatataatgaaggggatggtgggatatttgtgtctgtgttcttataatatattattattcttccttggttctagaaaaatagataaatatatttttttcaggaaatagtgtggtgtttccagtttgatgttgctgggtggttgagtgagtgaattttcatgtggctgggtgggtttttgcctttttctcttgccctgttcctggtgccttctgatggggctggaatagttgaggtggatggttctaccctttctgccttctgtttgggacccagctggtgttctttggtttgctttcttcaggctctagggctgtgctatccaatacagtaaccacatgcggctgtttaaagttaagccaattaaaatcacataagattaaaaattccttcctcagttgcactaaccacgtttctagaggcgtcactgtatgtagttcatggctactgtactgacagcgagagcatgtccatctgttggacagcactattctagagaactaaactggcttaacgagtcacagcctcagctgtgctgggacgacccttgtctccctgggtaggaggggggggaatgggggagggctgatgaggccccagctggggcctgttgtctgggaccctccctctcctgagaggggaggcctggtggcttagcctgggcaggtcgtgtctcctcctgaccccagtggctgcggtgaggggaaccaccctcccttgctgcaccagtggccattagctcccgtcaccactgcaacccagggtcccagctggctgggtcctcttctgcccccagtgcccttccccttgggctgtgttggagtgagcacctcctctgtaggcacctctcacactgttgtctgttactgattttttttgataaaaagataataaaacctggtacttctaaa

SEQ ID NO: 444662 - DNA, 3116 bp, Homo sapiens
cactcgccgcagcctgcgcgccttctccagtccgcggtgccatggcccccgcccgtctgttcgcgctgctgctgttcttcgtaggcggagtcgccgagtcgatccgagagactgaggtcatcgacccccaggacctcctagaaggccgatacttctccggagccctaccagacgatgaggatgtagtggggcccgggcaggaatctgatgactttgagctgtctggctctggagatctggatgacttggaagactccatgatcggccctgaagttgtccatcccttggtgcctctagataaccatatccctgagagggcagggtctgggagccaagtccccaccgaacccaagaaactagaggagaatgaggttatccccaagagaatctcacccgttgaagagagtgaggatgtgtccaacaaggtgtcaatgtccagcactgtgcagggcagcaacatctttgagagaacggaggtcctggcagctctgattgtgggtggcatcgtgggcatcctctttgccgtcttcctgatcctactgctcatgtaccgtatgaagaagaaggatgaaggcagctatgacctgggcaagaaacccatctacaagaaagcccccaccaatgagttctacgcgtgaagcttgcttgtgggcactggcttggactttagcggggagggaagccaggggattttgaagggtggacattagggtagggtgaggtcaacctaatactgacttgtcagtatctccagctctgattacctttgaagtgttcagaagagacattgtcttctactgttctgccaggttcttcttgagctttgggcctcagttgccctggcagaaaaatggattcaacttggcctttctgaaggcaagactgggattggatcacttcttaaacttccagttaagaatctaggtccgccctcaagcccatactgaccatgcctcatccagagctcctctgaagccagggggctaacggatgttgtgtggagtcctggctggaggtcctcccccagtggccttcctcccttcctttcacagccggtctctctgccaggaaatgggggaaggaactagaaccacctgcaccttgagatgtttctgtaaatgggtacttgtgatcacactacgggaatctctgtggtatatacctggggccattctaggctctttcaagtgacttttggaaatcaaccttttttatttgggggggaggatggggaaaagagctgagagtttatgctgaaatggatttatagaatatttgtaaatctatttttagtgtttgttcgtttttttaactgttcattcctttgtgcagagtgtatatctctgcctgggcaagagtgtggaggtgccgaggtgtcttcattctctcgcacatttccacagcacctgctaagtttgtatttaatggtttttgtttttgtttttgtttgtttcttgaaaatgagagaagagccggagagatgatttttattaattttttttttttttttttttttactatttatagctttagatagggcctcccttcccctcttctttctttgttctctttcattaaaccccttccccagttttttttttatactttaaaccccgctcctcatggccttggccctttctgaagctgcttcctcttataaaatagcttttgccgaaacatagtttttttttagcagatcccaaaatataatgaaggggatggtgggatatttgtgtctgtgttcttataatatattattattcttccttggttctagaaaaatagataaatatatttttttcaggaaatagtgtggtgtttccagtttgatgttgctgggtggttgagtgagtgaattttcatgtggctgggtgggtttttgcctttttctcttgccctgttcctggtgccttctgatggggctggaatagttgaggtggatggttctaccctttctgccttctgtttgggacccagctggtgttctttggtttgctttcttcaggctctagggctgtgctatccaatacagtaaccacatgcggctgtttaaagttaagccaattaaaatcacataagattaaaaattccttcctcagttgcactaaccacgtttctagaggcgtcactgtatgtagttcatggctactgtactgacagcgagagcatgtccatctgttggacagcactattctagagaactaaactggcttaacgagtcacagcctcagctgtgctgggacgacccttgtctccctgggtaggaggggggggaatgggggagggctgatgaggccccagctggggcctgttgtctgggaccctccctctcctgagaggggaggcctggtggcttagcctgggcaggtcgtgtctcctcctgaccccagtggctgcggtgaggggaaccaccctcccttgctgcaccagtggccattagctcccgtcaccactgcaacccagggtcccagctggctgggtcctcttctgcccccagtgcccttccccttgggctgtgttggagtgagcacctcctctgtaggcacctctcacactgttgtctgttactgattttttttgataaaaagataataaaacctggtacttctaaaaaaaaaaaaacaaaaaacacaaaacaaagaaaaagacactaaacaatagcaacaacacgaaacatcgcaaccacacacaatatatcacgcacacgcagagccgactccaaatgccacaacaatacagcgcggcacgacgatcaagacataaaataagacatcagacaggggggcccaccgaacaatgactgactgcacgcctatgctatatgacaacaggagggcgcctgcctgcgtcttagagacgattacgtataacgacggaagccggacgcgacgacgcgatgttatacgaccagcggagatcgaggggaatgaagacctaggctgcaggagagcgtgtgctagagggaccacacccctatctgaggggccgacagtcagattgagaccaagcgaacagagaagagtaaggacgcggtagataaaccatatagggaggatggcggtgaacagcgctctacttcgggccgaagacagtcgggagggatcgtagtgaaaata

SEQ ID NO: 444663 - DNA, 2488 bp, Homo sapiens
cactcgccgcagcctgcgcgccttctccagtccgcggtgccatggcccccgcccgtctgttcgcgctgctgctgttcttcgtaggcggagtcgccgagtcgatccgagagactgaggtcatcgacccccaggacctcctagaaggccgatacttctccggagccctaccagacgatgaggatgtagtggggcccgggcaggaatctgatgactttgagctgtctggctctggagatctggatgacttggaagactccatgatcggccctgaagttgtccatcccttggtgcctctagataaccatatccctgagagggcagggtctgggagccaagtccccaccgaacccaagaaactagaggagaatgaggttatccccaagagaatctcacccgttgaagagagtgaggatgtgtccaacaaggtgtcaatgtccagcactgtgcagggcagcaacatctttgagagaacggaggtcctggcagctctgattgtgggtggcatcgtgggcatcctctttgccgtcttcctgatcctactgctcatgtaccgtatgaagaagaaggatgaaggcagctatgacctgggcaagaaacccatctacaagaaagcccccaccaatgagttctacgcgtgaagcttgcttgtgggcactggcttggactttagcggggagggaagccaggggattttgaagggtggacattagggtagggtgaggtcaacctaatactgacttgtcagtatctccagctctgattacctttgaagtgttcagaagagacattgtcttctactgttctgccaggttcttcttgagctttgggcctcagttgccctggcagaaaaatggattcaacttggcctttctgaaggcaagactgggattggatcacttcttaaacttccagttaagaatctaggtccgccctcaagcccatactgaccatgcctcatccagagctcctctgaagccagggggctaacggatgttgtgtggagtcctggctggaggtcctcccccagtggccttcctcccttcctttcacagccggtctctctgccaggaaatgggggaaggaactagaaccacctgcaccttgagatgtttctgtaaatgggtacttgtgatcacactacgggaatctctgtggtatatacctggggccattctaggctctttcaagtgacttttggaaatcaaccttttttatttgggggggaggatggggaaaagagctgagagtttatgctgaaatggatttatagaatatttgtaaatctatttttagtgtttgttcgtttttttaactgttcattcctttgtgcagagtgtatatctctgcctgggcaagagtgtggaggtgccgaggtgtcttcattctctcgcacatttccacagcacctgctaagtttgtatttaatggtttttgtttttgtttttgtttgtttcttgaaaatgagagaagagccggagagatgatttttattaattttttttttttttttttttttactatttatagctttagatagggcctcccttcccctcttctttctttgttctctttcattaaaccccttccccagttttttttttatactttaaaccccgctcctcatggccttggccctttctgaagctgcttcctcttataaaatagcttttgccgaaacatagtttttttttagcagatcccaaaatataatgaaggggatggtgggatatttgtgtctgtgttcttataatatattattattcttccttggttctagaaaaatagataaatatatttttttcaggaaatagtgtggtgtttccagtttgatgttgctgggtggttgagtgagtgaattttcatgtggctgggtgggtttttgcctttttctcttgccctgttcctggtgccttctgatggggctggaatagttgaggtggatggttctaccctttctgccttctgtttgggacccagctggtgttctttggtttgctttcttcaggctctagggctgtgctatccaatacagtaaccacatgcggctgtttaaagttaagccaattaaaatcacataagattaaaaattccttcctcagttgcactaaccacgtttctagaggcgtcactgtatgtagttcatggctactgtactgacagcgagagcatgtccatctgttggacagcactattctagagaactaaactggcttaacgagtcacagcctcagctgtgctgggacgacccttgtctccctgggtaggaggggggggaatgggggagggctgatgaggccccagctggggcctgttgtctgggaccctccctctcctgagaggggagaccacggtgcagtaccaagggcacatgctgtcagctcgagactacaggatccgcggtgaggggaagaagcgcgataagacgtgaaccagcgacgcattagagcccgacacgcaacgcaacgcaggatccccagtctgcctaggg

SEQ ID NO: 444664 - DNA, 916 bp, Homo sapiens
cactcgccgcagcctgcgcgccttctccagtccgcggtgccatggcccccgcccgtctgttcgcgctgctgctgttcttcgtaggcggagtcgccgagtcgatccgagagactgaggtcatcgacccccaggacctcctagaaggccgatacttctccggagccctaccagacgatgaggatgtagtggggcccgggcaggaatctgatgactttgagctgtctggctctggagatctggatgacttggaagactccatgatcggccctgaagttgtccatcccttggtgcctctagataaccatatccctgagagggcagggtctgggagccaagtccccaccgaacccaagaaactagaggagaatgaggttatccccaagagaatctcacccgttgaagagagtgaggatgtgtccaacaaggtgtcaatgtccagcactgtgcagggcagcaacatctttgagagaacggaggtcctggcaggttgccccagaacattgaaagactacaccgtccttatggggtggctctgactgtgcagcctggtggagggagaggaaaaagcacctatcaaagtcttctggaaaataggcattgagtcattcttttgccttaagtctttctcatttattttgcaaaggactttcactgtataagtttggcatctgggagttaatcattacaacttaatttcccttgtaagtctggaggctccttcgaattgggttagcttcccctccccctactctatcacttggcagccttgtgaccttggctgagaagctttcgaacttgatgagcctcagtttccttatctgtaaaatgggtacagtgataccttctggggttgatataatgagtccatgaaaaataaaatatgaaataactttgcacactataaagggctattccg

SEQ ID NO: 444665 - DNA, 2612 bp, Homo sapiens
cactcgccgcagcctgcgcgccttctccagtccgcggtgccatggcccccgcccgtctgttcgcgctgctgctgttcttcgtaggcggagtcgccgagtcgatccgagagactgaggtcatcgacccccaggacctcctagaaggccgatacttctccggagccctaccagacgatgaggatgtagtggggcccgggcaggaatctgatgactttgagctgtctggctctggagatctggatgacttggaagactccatgatcggccctgaagttgtccatcccttggtgcctctagataaccatatccctgagagggcagggtctgggagccaagtccccaccgaacccaagaaactagaggagaatgaggttatccccaagagaatctcacccgttgaagagagtgaggatgtgtccaacaaggtgtcaatgtccagcactgtgcagggcagcaacatctttgagagaacggaggtcctggcagctctgattgtgggtggcatcgtgggcatcctctttgccgtcttcctgatcctactgctcatgtaccgtatgaagaagaaggatgaaggcagctatgacctgggcaagaaacccatctacaagaaagcccccaccaatgagttctacgcgtgaagcttgcttgtgggcactggcttggactttagcggggagggaagccaggggattttgaagggtggacattagggtagggtgaggtcaacctaatactgacttgtcagtatctccagctctgattacctttgaagtgttcagaagagacattgtcttctactgttctgccaggttcttcttgagctttgggcctcagttgccctggcagaaaaatggattcaacttggcctttctgaaggcaagactgggattggatcacttcttaaacttccagttaagaatctaggtccgccctcaagcccatactgaccatgcctcatccagagctcctctgaagccagggggctaacggatgttgtgtggagtcctggctggaggtcctcccccagtggccttcctcccttcctttcacagccggtctctctgccaggaaatgggggaaggaactagaaccacctgcaccttgagatgtttctgtaaatgggtacttgtgatcacactacgggaatctctgtggtatatacctggggccattctaggctctttcaagtgacttttggaaatcaaccttttttatttgggggggaggatggggaaaagagctgagagtttatgctgaaatggatttatagaatatttgtaaatctatttttagtgtttgttcgtttttttaactgttcattcctttgtgcagagtgtatatctctgcctgggcaagagtgtggaggtgccgaggtgtcttcattctctcgcacatttccacagcacctgctaagtttgtatttaatggtttttgtttttgtttttgtttgtttcttgaaaatgagagaagagccggagagatgatttttattaattttttttttttttttttttttactatttatagctttagatagggcctcccttcccctcttctttctttgttctctttcattaaaccccttccccagttttttttttatactttaaaccccgctcctcatggccttggccctttctgaagctgcttcctcttataaaatagcttttgccgaaacatagtttttttttagcagatcccaaaatataatgaaggggatggtgggatatttgtgtctgtgttcttataatatattattattcttccttggttctagaaaaatagataaatatatttttttcaggaaatagtgtggtgtttccagtttgatgttgctgggtggttgagtgagtgaattttcatgtggctgggtgggtttttgcctttttctcttgccctgttcctggtgccttctgatggggctggaatagttgaggtggatggttctaccctttctgccttctgtttgggacccagctggtgttctttggtttgctttcttcaggctctagggctgtgctatccaatacagtaaccacatgcggctgtttaaagttaagccaattaaaatcacataagattaaaaattccttcctcagttgcactaaccacgtttctagaggcgtcactgtatgtagttcatggctactgtactgacagcgagagcatgtccatctgttggacagcactattctagagaactaaactggcttaacgagtcacagcctcagctgtgctgggacgacccttgtctccctgggtaggaggggggggaatgggggagggctgatgaggccccagctggggcctgttgtctgggaccctccctctcctgagaggggaggcctggtggcttagcctgggcaggtcgtgtctcctcctgaccccagtggctgcggtgaggggaaccaccctcccttgctgcaccagtggccattagctcccgtcaccactgcaacccagggtcccagctggctgggtcctcttctgcccccagtgcccttccccttgggctgtgttggagtgagcacctcctctgtaggcacctctcacactgttgtctgttactgattttttttgataaaaagataataaaacctggtacttctaaa

SEQ ID NO: 444666 - DNA, 1884 bp, Homo sapiens
cactcgccgcagcctgcgcgccttctccagtccgcggtgccatggcccccgcccgtctgttcgcgctgctgctgttcttcgtaggcggagtcgccgagtcgatccgagagactgaggtcatcgacccccaggacctcctagaaggccgatacttctccggagccctaccagacgatgaggatgtagtggggcccgggcaggaatctgatgactttgagctgtctggctctggagatctggatgacttggaagactccatgatcggccctgaagttgtccatcccttggtgcctctagataaccatatccctgagagggcagggtctgggagccaagtccccaccgaacccaagaaactagaaccacctgcaccttgagatgtttctgtaaatgggtacttgtgatcacactacgggaatctctgtggtatatacctggggccattctaggctctttcaagtgacttttggaaatcaaccttttttatttgggggggaggatggggaaaagagctgagagtttatgctgaaatggatttatagaatatttgtaaatctatttttagtgtttgttcgtttttttaactgttcattcctttgtgcagagtgtatatctctgcctgggcaagagtgtggaggtgccgaggtgtcttcattctctcgcacatttccacagcacctgctaagtttgtatttaatggtttttgtttttgtttttgtttgtttcttgaaaatgagagaagagccggagagatgatttttattaattttttttttttttttttttttactatttatagctttagatagggcctcccttcccctcttctttctttgttctctttcattaaaccccttccccagttttttttttatactttaaaccccgctcctcatggccttggccctttctgaagctgcttcctcttataaaatagcttttgccgaaacatagtttttttttagcagatcccaaaatataatgaaggggatggtgggatatttgtgtctgtgttcttataatatattattattcttccttggttctagaaaaatagataaatatatttttttcaggaaatagtgtggtgtttccagtttgatgttgctgggtggttgagtgagtgaattttcatgtggctgggtgggtttttgcctttttctcttgccctgttcctggtgccttctgatggggctggaatagttgaggtggatggttctaccctttctgccttctgtttgggacccagctggtgttctttggtttgctttcttcaggctctagggctgtgctatccaatacagtaaccacatgcggctgtttaaagttaagccaattaaaatcacataagattaaaaattccttcctcagttgcactaaccacgtttctagaggcgtcactgtatgtagttcatggctactgtactgacagcgagagcatgtccatctgttggacagcactattctagagaactaaactggcttaacgagtcacagcctcagctgtgctgggacgacccttgtctccctgggtaggaggggggggaatgggggagggctgatgaggccccagctggggcctgttgtctgggaccctccctctcctgagaggggaggcctggtggcttagcctgggcaggtcgtgtctcctcctgaccccagtggctgcggtgaggggaaccaccctcccttgctgcaccagtggccattagctcccgtcaccactgcaacccagggtcccagctggctgggtcctcttctgcccccagtgcccttccccttgggctgtgttggagtgagcacctcctctgtaggcacctctcacactgttgtctgttactgattttttttgataaaaagataataaaacctggtacttctaaa

SEQ ID NO: 444667 - DNA, 2542 bp, Homo sapiens
cactcgccgcagcctgcgcgccttctccagtccgcggtgccatggcccccgcccgtctgttcgcgctgctgctgttcttcgtaggcggagtcgccgagtcgatccgagagactgaggtcatcgacccccaggacctcctagaaggccgatacttctccggagccctaccagacgatgaggatgtagtggggcccgggcaggaatctgatgactttgagctgtctggctctggagatctggatgacttggaagactccatgatcggccctgaagttgtccatcccttggtgcctctagataaccatatccctgagagggcagggtctgggagccaagtccccaccgaacccaagaaactagaggagaatgaggttatccccaagagaatctcacccgttgaagagagtgaggatgtgtccaacaaggtgtcaatgtccagcactgtgcagggcagcaacatctttgagagaacggaggtcctggcagctctgattgtgggtggcatcgtgggcatcctctttgccgtcttcctgatcctactgctcatgtaccgtatgaagaagaaggatgaaggcagctatgacctgggcaagaaacccatctacaagaaagcccccaccaatgagttctacgcgtgaagcttgcttgtgggcactggcttggactttagcggggagggaagccaggggattttgaagggtggacattagggtagggtgaggtcaacctaatactgacttgtcagtatctccagctctgattacctttgaagtgttcagaagagacattgtcttctactgttctgccaggttcttcttgagctttgggcctcagttgccctggcagaaaaatggattcaacttggcctttctgaaggcaagactgggattggatcacttcttaaacttccagttaagaatctaggtccgccctcaagcccatactgaccatgcctcatccagagctcctctgaagccagggggctaacggatgttgtgtggagtcctggctggaggtcctcccccagtggccttcctcccttcctttcacagccggtctctctgccaggaaatgggggaaggaactagaaccacctgcaccttgagatgtttctgtaaatgggtacttgtgatcacactacgggaatctctgtggtatatacctggggccattctaggctctttcaagtgacttttggaaatcaaccttttttatttgggggggaggatggggaaaagagctgagagtttatgctgaaatggatttatagaatatttgtaaatctatttttagtgtttgttcgtttttttaactgttcattcctttgtgcagagtgtatatctctgcctgggcaagagtgtggaggtgccgaggtgtcttcattctctcgcacatttccacagcacctgctaagtttgtatttaatggtttttgtttttgtttttgtttgtttcttgaaaatgagagaagagccggagagatgatttttattaattttttttttttttttttttttactatttatagctttagatagggcctcccttcccctcttctttctttgttctctttcattaaaccccttccccagttttttttttatactttaaaccccgctcctcatggccttggccctttctgaagctgcttcctcttataaaatagcttttgccgaaacatagtttttttttagcagatcccaaaatataatgaaggggatggtgggatatttgtgtctgtgttcttataatatattattattcttccttggttctagaaaaatagataaatatatttttttcaggaaatagtgtggtgtttccagtttgatgttgctgggtggttgagtgagtgaattttcatgtggctgggtgggtttttgcctttttctcttgccctgttcctggtgccttctgatggggctggaatagttgaggtggatggttctaccctttctgccttctgtttgggacccagctggtgttctttggtttgctttcttcaggctctagggctgtgctatccaatacagtaaccacatgcggctgtttaaagttaagccaattaaaatcacataagattaaaaattccttcctcagttgcactaaccacgtttctagaggcgtcactgtatgtagttcatggctactgtactgacagcgagagcatgtccatctgttggacagcactattctagagaactaaactggcttaacgagtcacagcctcagctgtgctgggacgacccttgtcctccctctcctgagaggggaggcctggtggcttagcctgggcaggtcgtgtctcctcctgaccccagtggctgcggtgaggggaaccaccctcccttgctgcaccagtggccattagctcccgtcaccactgcaacccagggtcccagctggctgggtcctcttctgcccccagtgcccttccccttgggctgtgttggagtgagcacctcctctgtaggcacctctcacactgttgtctgttactgattttttttgataaaaagataataaaacctggtacttctaaa

SEQ ID NO: 444668 - DNA, 2417 bp, Homo sapiens
cactcgccgcagcctgcgcgccttctccagtccgcggtgccatggcccccgcccgtctgttcgcgctgctgctgttcttcgtaggcggagtcgccgagtcgatccgagagactgaggtcatcgacccccaggacctcctagaaggccgatacttctccggagccctaccagacgatgaggatgtagtggggcccgggcaggaatctgatgactttgagctgtctggctctggagatctggatgacttggaagactccatgatcggccctgaagttgtccatcccttggtgcctctagataaccatatccctgagagggcagggtctgggagccaagtccccaccgaacccaagaaactagaggagaatgaggttatccccaagagaatctcacccgttgaagagagtgaggatgtgtccaacaaggtgtcaatgtccagcactgtgcagggcagcaacatctttgagagaacggaggtcctggcagctctgattgtgggtggcatcgtgggcatcctctttgccgtcttcctgatcctactgctcatgtaccgtatgaagaagaaggatgaaggcagctatgacctgggcaagaaacccatctacaagaaagcccccaccaatgagttctacgcgtgaagcttgcttgtgggcactggcttggactttagcggggagggaagccaggggattttgaagggtggacattagggtagggtgaggtcaacctaatactgacttgtcagtatctccagctctgattacctttgaagtgttcagaagagacattgtcttctactgttctgccaggttcttcttgagctttgggcctcagttgccctggcagaaaaatggattcaacttggcctttctgaaggcaagactgggattggatcacttcttaaacttccagttaagaatctaggtccgccctcaagcccatactgaccatgcctcatccagagctcctctgaagccagggggctaacggatgttgtgtggagtcctggctggaggtcctcccccagtggccttcctcccttcctttcacagccggtctctctgccaggaaatgggggaaggaactagaaccacctgcaccttgagatgtttctgtaaatgggtacttgtgatcacactacgggaatctctgtggtatatacctggggccattctaggctctttcaagtgacttttggaaatcaaccttttttatttgggggggaggatggggaaaagagctgagagtttatgctgaaatggatttatagaatatttgtaaatctatttttagtgtttgttcgtttttttaactgttcattcctttgtgcagagtgtatatctctgcctgggcaagagtgtggaggtgccgaggtgtcttcattctctcgcacatttccacagcacctgctaagtttgtatttaatggtttttgtttttgtttttgtttgtttcttgaaaatgagagaagagccggagagatgatttttattaattttttttttttttttttttttactatttatagctttagatagggcctcccttcccctcttctttctttgttctctttcattaaaccccttccccagttttttttttatactttaaaccccgctcctcatggccttggccctttctgaagctgcttcctcttataaaatagcttttgccgaaacatagtttttttttagcagatcccaaaatataatgaaggggatggtgggatatttgtgtctgtgttcttataatatattattattcttccttggttctagaaaaatagataaatatatttttttcaggaaatagtgtggtgtttccagtttgatgttgctgggtggttgagtgagtgaattttcatgtggctgggtgggtttttgcctttttctcttgccctgttcctggtgccttctgatggggctggaatagttgaggtggatggttctaccctttctgccttctgtttgggacccagctggtgttctttggtttgctttcttcaggctctagggctgtgctatccaatacagtaaccacatgcggctgtttaaagttaagccaattaaaatcacataagattaaaaattccttcctcagttgcactaaccacgtttctagaggcgtcactgtatgtagttcatggctactgtactgacagcgagagcatgtccatctgttggacagcactattctagagaactaaactggcttaacgagtcacagcctcagctgtgctgggacgacccttgtctccctgggtaggacgcagctgctctgagcaactccattcacccctattatgtcctgaagctacgctaagagccacgacaatgaaccgattgagatttcaaactctggcagctacattatgctgcatacggaccattgtatgtctctagataatggacaagttgg

SEQ ID NO: 444669 - DNA, 2123 bp, Homo sapiens
ccctgggtcttcctagccccgagactttcaagtccatatgcctggagtcccccctcctgagacccttaaccctgcatcctccgcaacagaagacctccagatgcacagccacacttccatctcaccctaataaaacccagacctttggattcctctcccttggaatgcccaaatccacaactttggggtgcattctcactctcagaccccaaatccaaagcccaagtgctcccctatgcaaatattccaaactcttcagttctacagtttatcggttgccccctcctaaatccacagccctgcggcacccctcctgaagtaccacagatttagtctggaggccccctctctgttcagctgccctggggtccccttatcctcccttgctggctgtgtcccaagctaggtggcattcatggtggggcgtgtagttgggaggtgaaataaggtgattatgtaattagccaaagtccatccctctttttcaggcagtataaaggcaaaccaccccacccatcaccatctgtcatctcactaccaccatgctggcctcagggctgcttctggtggccttgctggcctgcctgactgtgatggtcttgatgtctgtctggcagcagaggaagagcagggggaagctgcctccgggacccaccccactgcccttcattggaaactacctccagctgaacacagagcacatatgtgactccatcatgaaggtgtcccaaggcgtggcgttcagcaacggggagcgcgccaagcagctcctgcgctttgccatcgccaccctgagggacttcggggtgggcaagcgaggcatcgaggagcgcatccaggaggagtcgggcttcctcatcgaggccatccggagcacgcacggcgccaatatcgatcccaccttcttcctgagccgcacagtctccaatgtcatcagctccattgtctttggggaccgctttgactatgaggacaaagagttcctgtcactgctgagcatgatgctaggaatcttccagttcacgtcaacctccacggggcagctctatgagatgttctcttcggtgatgaaacacctgccaggaccacagcaacaggcctttaagttgctgcaagggctggaggacttcatagccaagaaggtggagcacaaccagcgcacgctggatcccaattccccacaggacttcatcgactcctttctcatccgcatgcaggaggaggagaagaaccccaacacggagttctacttgaagaacctgatgatgagcacgttgaacctcttcattgcaggcaccgagacggtcagcaccaccctgcgctatggcttcttgctgctcatgaagcacccagaggtggaggccaaggtccatgaggagattgacagagtgatcggcaagaaccggcagcccaagtttgaggaccggacgaagatgccctacatggaggcagtgatccacgagatccaaagatttggagacgtgatccccatgagtttggcccgcagggttaaaaaggacaccaagttttgggattttttcctccctaagggcaccgaagtgttccctatgctgggctccgtgctgagagaccccagcttcttctccaaccctcaggacttcaatccccagcatttcctggatgacaaggggcagtttaagaagagtgatgcttttgtgcccttttccatcggaaagcggaactgtttcggagaaggcctggccagaatggagctctttctcttcttcaccaccgtcatgcagaacttccgcctcaagtcctcccagtcacctaaggacattgacgtgtcccccaaacacgtggtctttgccacgatcccacgctacaccatgcttcctgccccgctgagcgagggctgtgccggtgcaggtctggtgggcggggccagggaaaggcggggtcagggcggggttcgcggaagaggcgggtataagaatggggggaagatgcgggaaaggaaggggcgtggtggctagagggaagagaagaaacagaagcggctcagttcaccttgataaggtgcttccgagctgggatgagaggaagggaaaccttacattatgctatgaagagtagtaataatagcagctcttatttcctga

SEQ ID NO: 444670 - DNA, 632 bp, Homo sapiens
ggaggctctggtggaccaggctgaggagttcagcgggcgaggcgagcaagccaccttcgactgggtcttcaaaggctatggcgtggtattcagcaacggggagcgcgccaagcagctccggcgcttctccatcgccaccctgcgggacttcggggtgggcaagcgaggcatcgaggagcgcatccaggaggaggcgggcttcctcatcgacgccctccggggcactggcggcgccaatatcgatcccaccttcttcctgagccgcacagtctccaatgtcatcagctccattgtctttggggaccgctttgactataaggacaaagagttcctgtcactgttgcgcatgatgctaggaatcttccagttcacgtcaacctccacggggcagctctatgagatgttctcttcggtgatgaaacacctgccaggaccacagcaacaggcctttcagttgctgcaagggctggaggacttcatagccaagaaggtggagcacaaccagcgcacgctggatcccaattccccacgggacttcattgactcctttctcatccgcatgcaggaggaggagaagaaccccaacacggagttctactttgaccaccctcggctttggcttctgctgctaa

SEQ ID NO: 444671 - DNA, 2301 bp, Homo sapiens
ccctgggtcttcctagccccgagactttcaagtccatatgcctggagtcccccctcctgagacccttaaccctgcatcctccgcaacagaagacctccagatgcacagccacacttccatctcaccctaataaaacccagacctttggattcctctcccttggaatgcccaaatccacaactttggggtgcattctcactctcagaccccaaatccaaagcccaagtgctcccctatgcaaatattccaaactcttcagttctacagtttatcggttgccccctcctaaatccacagccctgcggcacccctcctgaagtaccacagatttagtctggaggccccctctctgttcagctgccctggggtccccttatcctcccttgctggctgtgtcccaagctaggtggcattcatggtggggcgtgtagttgggaggtgaaataaggtgattatgtaattagccaaagtccatccctctttttcaggcagtataaaggcaaaccaccccacccatcaccatctgtcatctcactaccaccatgctggcctcagggatgcttctggtggccttgctggtctgcctgactgtgatggtcttgatgtctgtttggcagcagaggaagagcaaggggaagctgcctccgggacccaccccattgcccttcattggaaactacctgcagctgaacacagagcagatgtacaactccctcatgaagatcagtgagcgctatggccccgtgttcaccattcacttggggccccggcgggtcgtggtgctgtgtggacatgatgccgtcagggaggctctggtggaccaggctgaggagttcagcgggcgaggcgagcaagccaccttcgactgggtcttcaaaggctatggcgtggtattcagcaacggggagcgcgccaagcagctccggcgcttctccatcgccaccctgcgggacttcggggtgggcaagcgaggcatcgaggagcgcatccaggaggaggcgggcttcctcatcgacgccctccggggcactggcggcgccaatatcgatcccaccttcttcctgagccgcacagtctccaatgtcatcagctccattgtctttggggaccgctttgactataaggacaaagagttcctgtcactgttgcgcatgatgctaggaatcttccagttcacgtcaacctccacggggcagctctatgagatgttctcttcggtgatgaaacacctgccaggaccacagcaacaggcctttcagttgctgcaagggctggaggacttcatagccaagaaggtggagcacaaccagcgcacgctggatcccaattccccacgggacttcattgactcctttctcatccgcatgcaggaggaggagaagaaccccaacacggagttctacttgaaaaacctggtgatgaccacgttgaacctcttcattgggggcaccgagaccgtcagcaccaccctgcgctatggcttcttgctgctcatgaagcacccagaggtggaggccaaggtccatgaggagattgacagagtgatcggcaagaaccggcagcccaagtttgaggaccgggccaagatgccctacatggaggcagtgatccacgagatccaaagatttggagacgtgatccccatgagtttggcccgcagagtcaaaaaggacaccaagtttcgggatttcttcctccctaagggcaccgaagtgttccctatgctgggctctgtgctgagagaccccagtttcttctccaacccccaggacttcaatccccagcacttcctgaatgagaaggggcagtttaagaagagtgatgcttttgtgcccttttccatcggaaagcggaactgtttcggagaaggcctggccagaatggagctctttctcttcttcaccaccgtcatgcagaacttccgcctcaagtcctcccagtcacctaaggacattgacgtgtcccccaaacacgtgggctttgccacgatcccacgaaactacaccatgagcttcctgccccgctgagcgagggctgtgccggtgcaggtctggtgggcggggccagggaaaggcggggtcagggcggggttcgcggaagaggcgggtataagaatggggggaagatgcgggaaaggaaggggcgtggtggctagagggaagagaagaaacagaaggggctcagttcaccttgataaggtgcttccgagctgggatgagaggaaggaaacccttacattatgctatgaagagtagtaataatagcagctcttatttcctcgcaaaaaaaaaaaaggaattc

SEQ ID NO: 444672 - DNA, 2855 bp, Homo sapiens
ccctgggtcttcctagccccgagactttcaagtccatatgcctggagtcccccctcctgagacccttaaccctgcatcctccgcaacagaagacctccagatgcacagccacacttccatctcaccctaataaaacccagacctttggattcctctcccttggaatgcccaaatccacaactttggggtgcattctcactctcagaccccaaatccaaagcccaagtgctcccctatgcaaatattccaaactcttcagttctacagtttatcggttgccccctcctaaatccacagccctgcggcacccctcctgaagtaccacagatttagtctggaggccccctctctgttcagctgccctggggtccccttatcctcccttgctggctgtgtcccaagctaggtggcattcatggtggggcgtgtagttgggaggtgaaataaggtgattatgtaattagccaaagtccatccctctttttcaggcagtataaaggcaaaccaccccacccatcaccatctgtcatctcactaccaccatgctggcctcagggatgcttctggtggccttgctggtctgcctgactgtgatggtcttgatgtctgtttggcagcagaggaagagcaaggggaagctgcctccgggacccaccccattgcccttcattggaaactacctgcagctgaacacagagcagatgtacaactccctcatgaagatcagtgagcgctatggccccgtgttcaccattcacttggggccccggcgggtcgtggtgctgtgtggacatgatgccgtcagggaggctctggtggaccaggctgaggagttcagcgggcgaggcgagcaagccaccttcgactgggtcttcaaaggctatggcgtggtattcagcaacggggagcgcgccaagcagctccggcgcttctccatcgccaccctgcgggacttcggggtgggcaagcgaggcatcgaggagcgcatccaggaggaggcgggcttcctcatcgacgccctccggggcactggcggcgccaatatcgatcccaccttcttcctgagccgcacagtctccaatgtcatcagctccattgtctttggggaccgctttgactataaggacaaagagttcctgtcactgttgcgcatgatgctaggaatcttccagttcacgtcaacctccacggggcagctctatgagatgttctcttcggtgatgaaacacctgccaggaccacagcaacaggcctttcagttgctgcaagggctggaggacttcatagccaagaaggtggagcacaaccagcgcacgctggatcccaattccccacgggacttcattgactcctttctcatccgcatgcaggaggaggagaagaaccccaacacggagttctacttgaaaaacctggtgatgaccacgttgaacctcttcattgggggcaccgagaccgtcagcaccaccctgcgctatggcttcttgctgctcatgaagcacccagaggtggaggccaaggtccatgaggagattgacagagtgatcggcaagaaccggcagcccaagtttgaggaccgggccaagatgccctacatggaggcagtgatccacgagatccaaagatttggagacgtgatccccatgagtttggcccgcagagtcaaaaaggacaccaagtttcgggatttcttcctccctaagatccgcccccaccccccagactacggggacttccagcccctctctgtgtccccagcatcccacccacattagaagctttctagaccctgtcccactccctcaatcagtcaaagtcctgcatctctccagactctttgtgtcaggagaatcaaacacatgttcccaaacttcctatcttaagaaacagaagccccctttccattcggccttttgtcatagggacagaaatctcaggtcccccaaactcctgcctagaaggacatggaccccatgtctcccaaacttcctgtttcagagatgtgaaccttctatcccccaaagctcctccatcagaggaccccaactcctccatgcctgccacttccccttacctggggcacactagttccccctccagcccctgtgtactttcaccaatcccccgaccctcctcatcacacacaacttcctcctcccggcaccgaagtgttccctatgctgggctctgtgctgagagaccccagtttcttctccaacccccaggacttcaatccccagcacttcctgaatgagaaggggcagtttaagaagagtgatgcttttgtgcccttttccatcgcctggtatttctccagcttggaagttcctgttagaatctacccttgagccagcagctgatacttccttaactaccaagcacccagtacctgcgcccaggaaagcggaactgtttcggagaaggcctggccagaatggagctctttctcttcttcaccaccgtcatgcagaacttccgcctcaagtcctcccagtcacctaaggacattgacgtgtcccccaaacacgtgggctttgccacgatcccacgaaactacaccatgagcttcctgccccgctgagcgagggctgtgccggtgcaggtctggtgggcggggccagggaaaggcggggtcagggcggggttcgcggaagaggcgggtataagaatggggggaagatgcgggaaaggaaggggcgtggtggctagagggaagagaagaaacagaaggggctcagttcaccttgataaggtgcttccgagctgggatgagaggaaggaaacccttacattatgctatgaagagtagtaataatagcagctcttatttcctcgcaaaaaaaaaaaaggaattc

SEQ ID NO: 444673 - DNA, 1615 bp, Homo sapiens
aaagatcatcaatcccatggtctaagcatatcgcattagtactatcagtgatcaacataatgtcctgtctctgttcaccgtgggtctctgaatcatccagtgcactctcctacaccagagccgtgacctctatgagatgttctcttcggtgatgaaacacctgccaggaccacagcaacaggcctttaagttgctgcaagggctggaggacttcatagccaagaaggtggagcacaaccagcgcacgctggatcccaattccccacaggacttcatcgactcctttctcatccgcatgcaggaggcaccgagacggtcagcaccaccctgcgctatggcttcttgctgctcatgaagcacccagaggtggaggccaaggtccatgaggagattgacagagtgatcggcaagaaccggcagcccaagtttgaggaccgggccaagatgccctacatggaggcagtgatccacgagatccaaagatttggagacgtgatccccatgagtttggcccgcagagtcaaaaaggacaccaagtttcgggatttcttcctccctaagatccgcccccaccccccagactacggggacttccagcccctctctgtgtccccagcatcccacccacattagaagctttctagaccctgtcccactccctcaatcagtcaaagtcctgcatctctccagactctttgtgtcaggagaatcaaacacatgttcccaaacttcctatcttaagaaacagaagccccctttccattcggccttttgtcatagggacagaaatctcaggtcccccaaactcctgcctagaaggacatggaccccatgtctcccaaacttcctgtttcagagatgtgaaccttctatcccccaaagctcctccatcagaggaccccaactcctccatgcctgccacttccccttacctggggcacactagttccccctccagcccctgtgtactttcaccaatcccccgaccctcctcatcacacacaacttcctcctcccggcaccgaagtgttccctatgctgggctctgtgctgagagaccccagtttcttctccaacccccaggacttcaatccccagcacttcctgaatgagaaggggcagtttaagaagagtgatgcttttgtgcccttttccatcggaaagcggaactgtttcggagaaggcctggccagaatggagctctttctcttcttcaccaccgtcatgcagaacttccgcctcaagtcctcccagtcacctaaggacattgacgtgtcccccaaacacgtgggctttgccacgatcccacgaaactacaccatgagcttcctgccccgctgagcgagggctgtgccggtgcaggtctggtgggcggggccagggaaaggcggggtcagggcggggttcgcggaagaggcgggtataagaatggggggaagatgcgggaaaggaaggggcgtggtggctagagggaagagaagaaacagaaggggctcagttcaccttgataaggtgcttccgagctgggatgagaggaaggaaacccttacattatgctatgaagagtagtaataatagcagctcttatttcctcgcaaaaaaaaaaaaggaattc

SEQ ID NO: 444674 - DNA, 1674 bp, Homo sapiens
aaagatcatcaatcccatggtctaagcatatcgcattagtactatcagtgatcaacataatgtcctgtctctgttcaccgtgggtctctgaatcatccagtgcactctcctacaccagagccgtgacctctatgagatgttctcttcggtgatgaaacacctgccaggaccacagcaacaggcctttaagttgctgcaagggctggaggacttcatagccaagaaggtggagcacaaccagcgcacgctggatcccaattccccacaggacttcatcgactcctttctcatccgcatgcaggaggaggagaagaaccccaacacggagttctacttgaagaacctgatgatgagcacgttgaacctcttcattgcaggcaccgagacggtcagcaccaccctgcgctatggcttcttgctgctcatgaagcacccagaggtggaggccaaggtccatgaggagattgacagagtgatcggcaagaaccggcagcccaagtttgaggaccggacgaagatgccctacatggaggcagtgatccacgagatccaaagatttggagacgtgatccccatgagtttggcccgcagggttaaaaaggacaccaagttttgggattttttcctccctaaggtgctatcctccccaccccctagactacggggacttccagcccttctctgtgtccccagaatcctgcccccattagaagctttctactcactgtcccactccctcaatcagtcaaaaaggacttccccaaccaccacatccattccacctttccacttagacactcctgagtcctgcatctccccagactctttgtgtcgggagaatcaaactcaagttccaaggacacaaatttcaggtcccccaaacaacctgcgtagcaagacatggaccccatgtctcccaaacttcctgtttcagagatgtgaaccttctattccccaaagctcctccttcacaggaccccaactcctccatgcctgccacttccccttatctggggcaccccagttccctctccagcccctgtgtactttcaccaatcccccgaccctcctcatcacacacaacttcctcctccctaccagggcaccgaagtgttccctatgctgggctccgtgctgagagaccccagcttcttctccaaccctcaggacttcaatccccagcatttcctggatgacaaggggcagtttaagaagagtgatgcttttgtgcccttttccatcggaaagcggaactgtttcggagaaggcctggccagaatggagctctttctcttcttcaccaccgtcatgcagaacttccgcctcaagtcctcccagtcacctaaggacattgacgtgtcccccaaacacgtggtctttgccacgatcccacgctacaccatgcttcctgccccgctgagcgagggctgtgccggtgcaggtctggtgggcggggccagggaaaggcggggtcagggcggggttcgcggaagaggcgggtataagaatggggggaagatgcgggaaaggaaggggcgtggtggctagagggaagagaagaaacagaagcggctcagttcaccttgataaggtgcttccgagctgggatgagaggaagggaaaccttacattatgctatgaagagtagtaataatagcagctcttatttcctga

SEQ ID NO: 444675 - DNA, 1577 bp, Homo sapiens
aaagatcatcaatcccatggtctaagcatatcgcattagtactatcagtgatcaacataatgtcctgtctctgttcaccgtgggtctctgaatcatccagtgcactctcctacaccagagccgtgacctctatgagatgttctcttcggtgatgaaacacctgccaggaccacagcaacaggcctttaagttgctgcaagggctggaggacttcatagccaagaaggtggagcacaaccagcgcacgctggatcccaattccccacaggacttcatcgactcctttctcatccgcatgcaggaggcaccgagacggtcagcaccaccctgcgctatggcttcttgctgctcatgaagcacccagaggtggaggccaaggtccatgaggagattgacagagtgatcggcaagaaccggcagcccaagtttgaggaccggacgaagatgccctacatggaggcagtgatccacgagatccaaagatttggagacgtgatccccatgagtttggcccgcagggttaatccgcccccaccccccagactacggggacttccagcccctctctgtgtccccagcatcccacccacattagaagctttctagaccctgtcccactccctcaatcagtcaaagtcctgcatctctccagactctttgtgtcaggagaatcaaacacatgttcccaaacttcctatcttaagaaacagaagccccctttccattcggccttttgtcatagggacagaaatctcaggtcccccaaactcctgcctagaaggacatggaccccatgtctcccaaacttcctgtttcagagatgtgaaccttctatcccccaaagctcctccatcagaggaccccaactcctccatgcctgccacttccccttacctggggcacactagttccccctccagcccctgtgtactttcaccaatcccccgaccctcctcatcacacacaacttcctcctcccggcaccgaagtgttccctatgctgggctctgtgctgagagaccccagtttcttctccaacccccaggacttcaatccccagcacttcctgaatgagaaggggcagtttaagaagagtgatgcttttgtgcccttttccatcggaaagcggaactgtttcggagaaggcctggccagaatggagctctttctcttcttcaccaccgtcatgcagaacttccgcctcaagtcctcccagtcacctaaggacattgacgtgtcccccaaacacgtgggctttgccacgatcccacgaaactacaccatgagcttcctgccccgctgagcgagggctgtgccggtgcaggtctggtgggcggggccagggaaaggcggggtcagggcggggttcgcggaagaggcgggtataagaatggggggaagatgcgggaaaggaaggggcgtggtggctagagggaagagaagaaacagaaggggctcagttcaccttgataaggtgcttccgagctgggatgagaggaaggaaacccttacattatgctatgaagagtagtaataatagcagctcttatttcctcgcaaaaaaaaaaaaggaattc

SEQ ID NO: 444676 - DNA, 478 bp, Homo sapiens
cttttgtgcccttttccatcggtaagagaccactgtttgctgccaggccacggctcacaccagcaggggcctccctcaccctcctcccctctctgcggtgtagcctggtatttctccagcttggaagttcctgttagaatctacccttgagccagcagctgatacttccttaactaccaagcacccagtacctgcgcccaggtaaaatgaaaggaaacatctttccccgtagatgtatttctctagggtcacacagcagattcctcagatccctaaaaaggagatgacggcacagcagtcatatttgcaagtgtacctggcaggaaaggacatctaaacctcccattgctacacctggcatggatcaccccatctatgatggatgtgtgacattatgcctttttcaaaacccatagaactgtataacacagagtaaaccctaatgtaaactatggactttgttagtaataatatatca

SEQ ID NO: 444677 - DNA, 377 bp, Homo sapiens
acggggacttccagcccctctctgtgtccccagcatcccacccacattagaagctttctagaccctgtcccactccctcaatcagtcaaagaagacttccccaaccaccacatccgttccacctttccacttagacactcctgagtcctgcatctctccagactctttgtgtcaggagaatcaaacacatgttcccaaacttcctatcttaagaaacagaagccccctttccattcggccttttgtcatagggacagaaatctcaggtcccccaaactcctgcctagaaggacatggaccccatgtctcccaaacttcctgtttcagagatgtgaaccttctatcccccaaagctcctccatcagaggaccccaact

SEQ ID NO: 444678 - DNA, 324 bp, Homo sapiens
aaggacattgacgtgtcccccaaacacgtgggctttgccacgatcccacgaaactacaccatgagcttcctgccccgctgagcgagggctgtgccggtgcaggtctggtgggcggggccagggaaaggcggggtcagggcggggttcgcggaagaggcgggtataagaatggggggaagatgcgggaaaggaaggggcgtggtggctagagggaagagaagaaacagaaggggctcagttcaccttgataaggtgcttccgagctgggatgagaggaaggaaacccttacattatgctatgaagagtagtaataatagcagctc

SEQ ID NO: 444679 - DNA, 618 bp, Homo sapiens
tctctctctctctctctctctctctctctctctctctctctctctctctctctctctggcaccgaagtgttccctatgctgggctctgtgctgagagaccccagtttcttctccaacccccaggacttcaatccccagcacttcctgaatgagaaggggcagtttaagaagagtgatgcttttgtgcccttttccatcggaaagcggaactgtttcggagaaggcctggccagaatggagctctttctcttcttcaccaccgtcatgcagaacttccgcctcaagtcctcccagtcacctaaggacattgacgtgtcccccaaacacgtgggctttgccacgatcccacgaaactacaccatgagcttcctgccccgctgagcgagggctgtgccggtgcaggtctggtgggcggggccagggaaaggcggggtcagggcggggttcgcggaagaggcgggtataagaatggggggaagatgcgggggaacggcccatgagggtaagggaagacacgacacacaagcgggtaagtaaccttgggggttcccacctgagatcagaggaaggaaccctaccatatgcttgaacaggagaattataccagctttaattctg

SEQ ID NO: 444680 - DNA, 2757 bp, Homo sapiens
ccctgggtcttcctagccccgagactttcaagtccatatgcctggagtcccccctcctgagacccttaaccctgcatcctccgcaacagaagacctccagatgcacagccacacttccatctcaccctaataaaacccagacctttggattcctctcccttggaatgcccaaatccacaactttggggtgcattctcactctcagaccccaaatccaaagcccaagtgctcccctatgcaaatattccaaactcttcagttctacagtttatcggttgccccctcctaaatccacagccctgcggcacccctcctgaagtaccacagatttagtctggaggccccctctctgttcagctgccctggggtccccttatcctcccttgctggctgtgtcccaagctaggtggcattcatggtggggcgtgtagttgggaggtgaaataaggtgattatgtaattagccaaagtccatccctctttttcaggcagtataaaggcaaaccaccccacccatcaccatctgtcatctcactaccaccatgctggcctcagggatgcttctggtggccttgctggtctgcctgactgtgatggtcttgatgtctgtttggcagcagaggaagagcaaggggaagctgcctccgggacccaccccattgcccttcattggaaactacctgcagctgaacacagagcagatgtacaactccctcatgaagatcagtgagcgctatggccccgtgttcaccattcacttggggccccggcgggtcgtggtgctgtgtggacatgatgccgtcagggaggctctggtggaccaggctgaggagttcagcgggcgaggcgagcaagccaccttcgactgggtcttcaaaggctatggcgtggtattcagcaacggggagcgcgccaagcagctccggcgcttctccatcgccaccctgcgggacttcggggtgggcaagcgaggcatcgaggagcgcatccaggaggaggcgggcttcctcatcgacgccctccggggcactggcggcgccaatatcgatcccaccttcttcctgagccgcacagtctccaatgtcatcagctccattgtctttggggaccgctttgactataaggacaaagagttcctgtcactgttgcgcatgatgctaggaatcttccagttcacgtcaacctccacggggcagctctatgagatgttctcttcggtgatgaaacacctgccaggaccacagcaacaggcctttcagttgctgcaagggctggaggacttcatagccaagaaggtggagcacaaccagcgcacgctggatcccaattccccacgggacttcattgactcctttctcatccgcatgcaggaggaggagaagaaccccaacacggagttctacttgaaaaacctggtgatgaccacgttgaacctcttcattgggggcaccgagaccgtcagcaccaccctgcgctatggcttcttgctgctcatgaagcacccagaggtggaggccaaggtccatgaggagattgacagagtgatcggcaagaaccggcagcccaagtttgaggaccgggccaagatgccctacatggaggcagtgatccacgagatccaaagatttggagacgtgatccccatgagtttggcccgcagagtcaaaaaggacaccaagtttcgggatttcttcctccctaagatccgcccccaccccccagactacggggacttccagcccctctctgtgtccccagcatcccacccacattagaagctttctagaccctgtcccactccctcaatcagtcaaagtcctgcatctctccagactctttgtgtcaggagaatcaaacacatgttcccaaacttcctatcttaagaaacagaagccccctttccattcggccttttgtcatagggacagaaatctcaggtcccccaaactcctgcctagaaggacatggaccccatgtctcccaaacttcctgtttcagagatgtgaaccttctatcccccaaagctcctccatcagaggaccccaactcctccatgcctgccacttccccttacctggggcacactagttccccctccagcccctgtgtactttcaccaatcccccgaccctcctcatcacacacaacttcctcctcccggcaccgaagtgttccctatgctgggctctgtgctgagagaccccagtttcttctccaacccccaggacttcaatccccagcacttcctgaatgagaaggggcagtttaagaagagtgatgcttttgtgcccttttccatcggaaagcggaactgtttcggagaaggcctggccagaatggagctctttctcttcttcaccaccgtcatgcagaacttccgcctcaagtcctcccagtcacctaaggacattgacgtgtcccccaaacacgtgggctttgccacgatcccacgaaactacaccatgagcttcctgccccgctgagcgagggctgtgccggtgcaggtctggtgggcggggccagggaaaggcggggtcagggcggggttcgcggaagaggcgggtataagaatggggggaagatgcgggaaaggaaggggcgtggtggctagagggaagagaagaaacagaaggggctcagttcaccttgataaggtgcttccgagctgggatgagaggaaggaaacccttacattatgctatgaagagtagtaataatagcagctcttatttcctcgcaaaaaaaaaaaaggaattc

SEQ ID NO: 444681 - DNA, 992 bp, Homo sapiens
gaattccggaatttccccagtgccccggaggctcgatgactcctttctcatccgcatgcaggaggaggagaagaaccccaacacggagttctacttgaaaaacctggtgatgaccacgttgaacctcttcattgggggcaccgagaccgtcagcaccaccctgcgctatggcttcttgctgctcatgaagcacccagaggtggaggccaaggtccatgaggagattgacagagtgatcggcaagaaccggcagcccaagtttgaggaccgggccaagatgccctacatggaggcagtgatccacgagatccaaagatttggagacgtgatccccatgagtttggcccgcagagtcaaaaaggacaccaagtttcgggatttcttcctccctaagggcaccgaagtgttccctatgctgggctctgtgctgagagaccccagtttcttctccaacccccaggacttcaatccccagcacttcctgaatgagaaggggcagtttaagaagagtgatgcttttgtgcccttttccatcggaaagcggaactgtttcggagaaggcctggccagaatggagctctttctcttcttcaccaccgtcatgcagaacttccgcctcaagtcctcccagtcacctaaggacattgacgtgtcccccaaacacgtgggctttgccacgatcccacgaaactacaccatgagcttcctgccccgctgagcgagggctgtgccggtgcaggtctggtgggcggggccagggaaaggcggggtcagggcggggttcgcggaagaggcgggtataagaatggggggaagatgcgggaaaggaaggggcgtggtggctagagggaagagaagaaacagaaggggctcagttcaccttgataaggtgcttccgagctgggatgagaggaaggaaacccttacattatgctatgaagagtagtaataatagcagctcttatttcctcgcaaaaaaaaaaaaggaattc

SEQ ID NO: 444682 - DNA, 2590 bp, Homo sapiens
ccctgggtcttcctagccccgagactttcaagtccatatgcctggagtcccccctcctgagacccttaaccctgcatcctccgcaacagaagacctccagatgcacagccacacttccatctcaccctaataaaacccagacctttggattcctctcccttggaatgcccaaatccacaactttggggtgcattctcactctcagaccccaaatccaaagcccaagtgctcccctatgcaaatattccaaactcttcagttctacagtttatcggttgccccctcctaaatccacagccctgcggcacccctcctgaagtaccacagatttagtctggaggccccctctctgttcagctgccctggggtccccttatcctcccttgctggctgtgtcccaagctaggtggcattcatggtggggcgtgtagttgggaggtgaaataaggtgattatgtaattagccaaagtccatccctctttttcaggcagtataaaggcaaaccaccccacccatcaccatctgtcatctcactaccaccatgctggcctcagggctgcttctggtggccttgctggcctgcctgactgtgatggtcttgatgtctgtctggcagcagaggaagagcagggggaagctgcctccgggacccaccccactgcccttcattggaaactacctccagctgaacacagagcacatatgtgactccatcatgaaggtgtcccaaggcgtggcgttcagcaacggggagcgcgccaagcagctcctgcgctttgccatcgccaccctgagggacttcggggtgggcaagcgaggcatcgaggagcgcatccaggaggagtcgggcttcctcatcgaggccatccggagcacgcacggcgccaatatcgatcccaccttcttcctgagccgcacagtctccaatgtcatcagctccattgtctttggggaccgctttgactatgaggacaaagagttcctgtcactgctgagcatgatgctaggaatcttccagttcacgtcaacctccacggggcagctctatgagatgttctcttcggtgatgaaacacctgccaggaccacagcaacaggcctttaagttgctgcaagggctggaggacttcatagccaagaaggtggagcacaaccagcgcacgctggatcccaattccccacaggacttcatcgactcctttctcatccgcatgcaggaggaggagaagaaccccaacacggagttctacttgaagaacctgatgatgagcacgttgaacctcttcattgcaggcaccgagacggtcagcaccaccctgcgctatggcttcttgctgctcatgaagcacccagaggtggaggccaaggtccatgaggagattgacagagtgatcggcaagaaccggcagcccaagtttgaggaccggacgaagatgccctacatggaggcagtgatccacgagatccaaagatttggagacgtgatccccatgagtttggcccgcagggttaaaaaggacaccaagttttgggattttttcctccctaaggtgctatcctccccaccccctagactacggggacttccagcccttctctgtgtccccagaatcctgcccccattagaagctttctactcactgtcccactccctcaatcagtcaaaaaggacttccccaaccaccacatccattccacctttccacttagacactcctgagtcctgcatctccccagactctttgtgtcgggagaatcaaactcaagttccaaggacacaaatttcaggtcccccaaacaacctgcgtagcaagacatggaccccatgtctcccaaacttcctgtttcagagatgtgaaccttctattccccaaagctcctccttcacaggaccccaactcctccatgcctgccacttccccttatctggggcaccccagttccctctccagcccctgtgtactttcaccaatcccccgaccctcctcatcacacacaacttcctcctccctaccagggcaccgaagtgttccctatgctgggctccgtgctgagagaccccagcttcttctccaaccctcaggacttcaatccccagcatttcctggatgacaaggggcagtttaagaagagtgatgcttttgtgcccttttccatcggaaagcggaactgtttcggagaaggcctggccagaatggagctctttctcttcttcaccaccgtcatgcagaacttccgcctcaagtcctcccagtcacctaaggacattgacgtgtcccccaaacacgtggtctttgccacgatcccacgctacaccatgcttcctgccccgctgagcgagggctgtgccggtgcaggtctggtgggcggggccagggaaaggcggggtcagggcggggttcgcggaagaggcgggtataagaatggggggaagatgcgggaaaggaaggggcgtggtggctagagggaagagaagaaacagaagcggctcagttcaccttgataaggtgcttccgagctgggatgagaggaagggaaaccttacattatgctatgaagagtagtaataatagcagctcttatttcctga

SEQ ID NO: 444683 - DNA, 1437 bp, Homo sapiens
ccctgggtcttcctagccccgagactttcaagtccatatgcctggagtcccccctcctgagacccttaaccctgcatcctccgcaacagaagacctccagatgcacagccacacttccatctcaccctaataaaacccagacctttggattcctctcccttggaatgcccaaatccacaactttggggtgcattctcactctcagaccccaaatccaaagcccaagtgctcccctatgcaaatattccaaactcttcagttctacagtttatcggttgccccctcctaaatccacagccctgcggcacccctcctgaagtaccacagatttagtctggaggccccctctctgttcagctgccctggggtccccttatcctcccttgctggctgtgtcccaagctaggtggcattcatggtggggcgtgtagttgggaggtgaaataaggtgattatgtaattagccaaagtccatccctctttttcaggcagtataaaggcaaaccaccccacccatcaccatctgtcatctcactaccaccatgctggcctcagggatgcttctggtggccttgctggtctgcctgactgtgatggtcttgatgtctgtttggcagcagaggaagagcaaggggaagctgcctccgggacccaccccattgcccttcattggaaactacctgcagctgaacacagagcagatgtacaactccctcatgaagatcagtgagcgctatggccccgtgttcaccattcacttggggccccggcgggtcgtggtgctgtgtggacatgatgccgtcagggaggctctggtggaccaggctgaggagttcagcgggcgaggcgagcaagccaccttcgactgggtcttcaaaggctatggcgtggtattcagcaacggggagcgcgccaagcagctccggcgcttctccatcgccaccctgcgggacttcggggtgggcaagcgaggcatcgaggagcgcatccaggaggaggcgggcttcctcatcgacgccctccggggcactggcggcgccaatatcgatcccaccttcttcctgagccgcacagtctccaatgtcatcagctccattgtctttggggaccgctttgactataaggacaaagagttcctgtcactgttgcgcatgatgctaggaatcttccagttcacgtcaacctccacggggcagctctatgagatgttctcttcggtgatgaaacacctgccaggaccacagcaacaggcctttcagttgctgcaagggctggaggacttcatagccaagaaggtggagcacaaccagcgcacgctggatcccaattccccacgggacttcattgactcctttctcatccgcatgcaggaggaggagaagaaccccaacacggagttctactttgaccaccctcggctttggcttctgctgctaa

SEQ ID NO: 444684 - DNA, 2409 bp, Homo sapiens
gctcagcacagaggtaggaaggacagcagagctgacagtcacagcagccctgacaagagagttcctggagcccaagctcttctccacagaggacaagcaggcagcagagaccatgggttccccttcagcctgtccatacagagtgtgcattccctggcaggggctcctgctcacagcctcgcttttaaccttctggaacctgccaaacagtgcccagaccaatattgatgtcgtgccgttcaatgtcgcagaagggaaggaggtccttctagtagtccataatgagtcccagaatctttatggctacaactggtacaaaggggaaagggtgcatgccaactatcgaattataggatatgtaaaaaatataagtcaagaaaatgccccagggcccgcacacaacggtcgagagacaatataccccaatggaaccctgctgatccagaacgtcacccacaatgacgcaggattctataccctacacgttataaaagaaaatcttgtgaatgaagaagtaaccagacaattctacgtattctcggagccacccaagccctccatcaccagcaacaacttcaatccggtggagaacaaagatattgtggttttaacctgtcaacctgagactcagaacacaacctacctgtggtgggtaaacaatcagagcctcctggtcagtcccaggctgctgctctccactgacaacaggaccctcgttctactcagcgccacaaagaatgacataggaccctatgaatgtgaaatacagaacccagtgggtgccagccgcagtgacccagtcaccctgaatgtccgctatgagtcagtacaagcaagttcacctgacctctcagctgggaccgctgtcagcatcatgattggagtactggctgggatggctctgatatagcagccttggtgtagtttctgcatttcgggaagagtgtttttattatccacctgcagactggactggattcttctagctccttcaatcccattttctcctgtggcatcactaagtataagacctgctctcttcctgaagacctataagctggaggtggacaactcaatgtaaatttcaaggaaaaaccctcatgcctgagatgtgggccactcagagctaaccaaaatgttcaacaccataactagagacactcaaattgccaaccaggacaagaagttgatgacttcatgctgtggacagtttttcccaagatgtcccaagcctcatcgtgacgaggctcttatcccactccatttttccctgctcatgcctgcctctttaatttggtaagataatgctgtaactagaatttcacaatcagcgccttgtgcaggtaatttgacagagtgttggatgtgtcatgtcatcatgtcaaacccaaatatttgacctaagggatcctttattctgcccagtggctaactttaacaacatccctaatacaactgtttattcaaatgcacggtggtccctgttagagttagacctctagactcacctgttctcacgccctgttttaatttaacccagctatgggatgccagataacagaattgctgcctactagctgaacagggaggagtttgtgcagttgctgacacttcttgttgcacataaataaatacagtgggtactatagagactcagttgcaaaaattaacaaatatgctgcttgattaaaatgggtaggcttctcatgtggctcattctttaatctattctcttttatttggtttggttcatggggtctctgcctatggatcatacttcaaactcttggtgtgatcctcctgattgtcacaatattagttaccctggtgtgctgtattctctaaaacctttaaatgtttgcatgcagccattcgtcaaatgtcaaatattctctctttggctggaatgacaaaaactcaaataaatgtatgattaggaggacatcataacctatgaatgatggaagtccaaaatgatggtaactgacagtagtgttaatgccttatgtttagtcaaactctcatttaggtgacagcctggtgactccagaatggagccagtcatgctaaatgccatatactcacactgaaacatgaggaagcaggtagatcccagaacagacaaaattttcctaaaaacatgagagtccaggctgtctgagtcagcacagtaagaaagtcctttctgctttaactcttagaaaaaagtaatatgaagtattctgaaattaaccaatcagtttatttaaatcaatttatttatattcttctgttcctggattcccattttacaaaacccactgttctactgttgtattgcccagtaggagctatcactatattttgcagaatggaaactgccctgactcatgaatcacaaataaaagccaattgtatctataaaaaaaa

SEQ ID NO: 444685 - DNA, 601 bp, Homo sapiens
gggcggtattttttttaaaaacccttaaaaatgttgggcaaggccacccaattttgttcaaaaattttcaaaaaatttttttttttggggtggggatgaaccaaaaaactcaaataaatgtatgattaggaggacatcataacctatgaatgatggaagtccaaaatgatggtaactgacagtagtgttaatgccttatgtttagtcaaactctcatttaggtgacagcctggtgactccagaatggagccagtcatgctaaatgccatatactcacactgaaacatgaggaagcaggtagatcccagaacagacaaaattttcctaaaaacatgagagtccaggctgtctgagtcagcacagtaagaaagtcctttctgctttaactcttagaaaaaagtaatatgaagtattctgaaattaaccaatcagtttatttaaatcaatttatttatattcttctgttcctggattcccattttacaaaacccactgttctactgttgtattgcccagtaggagctatcactatattttgcagaatggaaactgccctgactcatgaatcacaaataaaagccaattgtatctataaaaaaaa

SEQ ID NO: 444686 - DNA, 2130 bp, Homo sapiens
gctcagcacagaggtaggaaggacagcagagctgacagtcacagcagccctgacaagagagttcctggagcccaagctcttctccacagaggacaagcaggcagcagagaccatgggttccccttcagcctgtccatacagagtgtgcattccctggcaggggctcctgctcacagcctcgcttttaaccttctggaacctgccaaacagtgcccagaccaatattgatgtcgtgccgttcaatgtcgcagaagggaaggaggtccttctagtagtccataatgagtcccagaatctttatggctacaactggtacaaaggggaaagggtgcatgccaactatcgaattataggatatgtaaaaaatataagtcaagaaaatgccccagggcccgcacacaacggtcgagagacaatataccccaatggaaccctgctgatccagaacgtcacccacaatgacgcaggattctataccctacacgttataaaagaaaatcttgtgaatgaagaagtaaccagacaattctacgtattctatgagtcagtacaagcaagttcacctgacctctcagctgggaccgctgtcagcatcatgattggagtactggctgggatggctctgatatagcagccttggtgtagtttctgcatttcgggaagagtgtttttattatccacctgcagactggactggattcttctagctccttcaatcccattttctcctgtggcatcactaagtataagacctgctctcttcctgaagacctataagctggaggtggacaactcaatgtaaatttcaaggaaaaaccctcatgcctgagatgtgggccactcagagctaaccaaaatgttcaacaccataactagagacactcaaattgccaaccaggacaagaagttgatgacttcatgctgtggacagtttttcccaagatgtcccaagcctcatcgtgacgaggctcttatcccactccatttttccctgctcatgcctgcctctttaatttggtaagataatgctgtaactagaatttcacaatcagcgccttgtgcaggtaatttgacagagtgttggatgtgtcatgtcatcatgtcaaacccaaatatttgacctaagggatcctttattctgcccagtggctaactttaacaacatccctaatacaactgtttattcaaatgcacggtggtccctgttagagttagacctctagactcacctgttctcacgccctgttttaatttaacccagctatgggatgccagataacagaattgctgcctactagctgaacagggaggagtttgtgcagttgctgacacttcttgttgcacataaataaatacagtgggtactatagagactcagttgcaaaaattaacaaatatgctgcttgattaaaatgggtaggcttctcatgtggctcattctttaatctattctcttttatttggtttggttcatggggtctctgcctatggatcatacttcaaactcttggtgtgatcctcctgattgtcacaatattagttaccctggtgtgctgtattctctaaaacctttaaatgtttgcatgcagccattcgtcaaatgtcaaatattctctctttggctggaatgacaaaaactcaaataaatgtatgattaggaggacatcataacctatgaatgatggaagtccaaaatgatggtaactgacagtagtgttaatgccttatgtttagtcaaactctcatttaggtgacagcctggtgactccagaatggagccagtcatgctaaatgccatatactcacactgaaacatgaggaagcaggtagatcccagaacagacaaaattttcctaaaaacatgagagtccaggctgtctgagtcagcacagtaagaaagtcctttctgctttaactcttagaaaaaagtaatatgaagtattctgaaattaaccaatcagtttatttaaatcaatttatttatattcttctgttcctggattcccattttacaaaacccactgttctactgttgtattgcccagtaggagctatcactatattttgcagaatggaaactgccctgactcatgaatcacaaataaaagccaattgtatctataaaaaaaa

SEQ ID NO: 444687 - DNA, 2374 bp, Homo sapiens
agtccgtgtgaggagctcggaggggcgaggaggacgtgggccgaggtatctgccctggagaagtgggcagtaatttgacttccagaagttcttgacatctgcagatccgggcgacagccaagtgttcaaggttccagtgcccactggtgtgagggcacaagcctcgcttttaaccttctggaacctgccaaacagtgcccagaccaatattgatgtcgtgccgttcaatgtcgcagaagggaaggaggtccttctagtagtccataatgagtcccagaatctttatggctacaactggtacaaaggggaaagggtgcatgccaactatcgaattataggatatgtaaaaaatataagtcaagaaaatgccccagggcccgcacacaacggtcgagagacaatataccccaatggaaccctgctgatccagaacgtcacccacaatgacgcaggattctataccctacacgttataaaagaaaatcttgtgaatgaagaagtaaccagacaattctacgtattctcggagccacccaagccctccatcaccagcaacaacttcaatccggtggagaacaaagatattgtggttttaacctgtcaacctgagactcagaacacaacctacctgtggtgggtaaacaatcagagcctcctggtcagtcccaggctgctgctctccactgacaacaggaccctcgttctactcagcgccacaaagaatgacataggaccctatgaatgtgaaatacagaacccagtgggtgccagccgcagtgacccagtcaccctgaatgtccgctatgagtcagtacaagcaagttcacctgacctctcagctgggaccgctgtcagcatcatgattggagtactggctgggatggctctgatatagcagccttggtgtagtttctgcatttcgggaagagtgactggactggattcttctagctccttcaatcccattttctcctgtggcatcactaagtataagacctgctctcttcctgaagacctataagctggaggtggacaactcaatgtaaatttcaaggaaaaaccctcatgcctgagatgtgggccactcagagctaaccaaaatgttcaacaccataactagagacactcaaattgccaaccaggacaagaagttgatgacttcatgctgtggacagtttttcccaagatgtcccaagcctcatcgtgacgaggctcttatcccactccatttttccctgctcatgcctgcctctttaatttggtaagataatgctgtaactagaatttcacaatcagcgccttgtgcaggtaatttgacagagtgttggatgtgtcatgtcatcatgtcaaacccaaatatttgacctaagggatcctttattctgcccagtggctaactttaacaacatccctaatacaactgtttattcaaatgcacggtggtccctgttagagttagacctctagactcacctgttctcacgccctgttttaatttaacccagctatgggatgccagataacagaattgctgcctactagctgaacagggaggagtttgtgcagttgctgacacttcttgttgcacataaataaatacagtgggtactatagagactcagttgcaaaaattaacaaatatgctgcttgattaaaatgggtaggcttctcatgtggctcattctttaatctattctcttttatttggtttggttcatggggtctctgcctatggatcatacttcaaactcttggtgtgatcctcctgattgtcacaatattagttaccctggtgtgctgtattctctaaaacctttaaatgtttgcatgcagccattcgtcaaatgtcaaatattctctctttggctggaatgacaaaaactcaaataaatgtatgattaggaggacatcataacctatgaatgatggaagtccaaaatgatggtaactgacagtagtgttaatgccttatgtttagtcaaactctcatttaggtgacagcctggtgactccagaatggagccagtcatgctaaatgccatatactcacactgaaacatgaggaagcaggtagatcccagaacagacaaaattttcctaaaaacatgagagtccaggctgtctgagtcagcacagtaagaaagtcctttctgctttaactcttagaaaaaagtaatatgaagtattctgaaattaaccaatcagtttatttaaatcaatttatttatattcttctgttcctggattcccattttacaaaacccactgttctactgttgtattgcccagtaggagctatcactatattttgcagaatggaaactgccctgactcatgaatcacaaataaaagccaattgtatctataaaaaaaa

SEQ ID NO: 444688 - DNA, 2389 bp, Homo sapiens
gctcagcacagaggtaggaaggacagcagagctgacagtcacagcagccctgacaagagagttcctggagcccaagctcttctccacagaggacaagcaggcagcagagaccatgggttccccttcagcctgtccatacagagtgtgcattccctggcaggggctcctgctcacagcctcgcttttaaccttctggaacctgccaaacagtgcccagaccaatattgatgtcgtgccgttcaatgtcgcagaagggaaggaggtccttctagtagtccataatgagtcccagaatctttatggctacaactggtacaaaggggaaagggtgcatgccaactatcgaattataggatatgtaaaaaatataagtcaagaaaatgccccagggcccgcacacaacggtcgagagacaatataccccaatggaaccctgctgatccagaacgtcacccacaatgacgcaggattctataccctacacgttataaaagaaaatcttgtgaatgaagaagtaaccagacaattctacgtattctcggagccacccaagccctccatcaccagcaacaacttcaatccggtggagaacaaagatattgtggttttaacctgtcaacctgagactcagaacacaacctacctgtggtgggtaaacaatcagagcctcctggtcagtcccaggctgctgctctccactgacaacaggaccctcgttctactcagcgccacaaagaatgacataggaccctatgaatgtgaaatacagaacccagtgggtgccagccgcagtgacccagtcaccctgaatgtccgctatgagtcagtacaagcaagttcacctgacctctcagctgggaccgctgtcagcatcatgattggagtactggctgggatggctctgatatagcagccttggtgtagtttctgcatttcgggaagagtgactggactggattcttctagctccttcaatcccattttctcctgtggcatcactaagtataagacctgctctcttcctgaagacctataagctggaggtggacaactcaatgtaaatttcaaggaaaaaccctcatgcctgagatgtgggccactcagagctaaccaaaatgttcaacaccataactagagacactcaaattgccaaccaggacaagaagttgatgacttcatgctgtggacagtttttcccaagatgtcccaagcctcatcgtgacgaggctcttatcccactccatttttccctgctcatgcctgcctctttaatttggtaagataatgctgtaactagaatttcacaatcagcgccttgtgcaggtaatttgacagagtgttggatgtgtcatgtcatcatgtcaaacccaaatatttgacctaagggatcctttattctgcccagtggctaactttaacaacatccctaatacaactgtttattcaaatgcacggtggtccctgttagagttagacctctagactcacctgttctcacgccctgttttaatttaacccagctatgggatgccagataacagaattgctgcctactagctgaacagggaggagtttgtgcagttgctgacacttcttgttgcacataaataaatacagtgggtactatagagactcagttgcaaaaattaacaaatatgctgcttgattaaaatgggtaggcttctcatgtggctcattctttaatctattctcttttatttggtttggttcatggggtctctgcctatggatcatacttcaaactcttggtgtgatcctcctgattgtcacaatattagttaccctggtgtgctgtattctctaaaacctttaaatgtttgcatgcagccattcgtcaaatgtcaaatattctctctttggctggaatgacaaaaactcaaataaatgtatgattaggaggacatcataacctatgaatgatggaagtccaaaatgatggtaactgacagtagtgttaatgccttatgtttagtcaaactctcatttaggtgacagcctggtgactccagaatggagccagtcatgctaaatgccatatactcacactgaaacatgaggaagcaggtagatcccagaacagacaaaattttcctaaaaacatgagagtccaggctgtctgagtcagcacagtaagaaagtcctttctgctttaactcttagaaaaaagtaatatgaagtattctgaaattaaccaatcagtttatttaaatcaatttatttatattcttctgttcctggattcccattttacaaaacccactgttctactgttgtattgcccagtaggagctatcactatattttgcagaatggaaactgccctgactcatgaatcacaaataaaagccaattgtatctataaaaaaaa

SEQ ID NO: 444689 - DNA, 1699 bp, Homo sapiens
ggtggcggcggcggcagcgggttcggttgcgcgtggcgcacggggtgggagcggagcccaggccgggagcaggcgccgccgccacaggcgaccatggggaacgtgttggctgccagctcgccgcccgcagggccgccaccgccgcctgcgccggccctcgtggggctgccgccacctccgccctcgccgccgggcttcacgctgccgccgctgggaggcagcctgggcgccggcaccagtacgagtcgaagttcggaacggacccccggggctgcaaccgccagcgcctcaggggccgccgaggatggggcctgcggctgcctgcccaacccgggcacattcgaggagtgccaccggaagtgcaaggagctgtttcccattcagatggagggtgtcaagctcacagtcaacaaagggttgagtaaccattttcaggtcaaccacacagtagccctcagcacaatcggggagtccaactaccacttcggggtcacatatgtggggacaaagcagctgagtcccacagaggcgttccctgtactggtgggtgacatggacaacagtggcagtctcaacgctcaggtcattcaccagctgggccccggtctcaggtccaagatggccatccagacccagcagtcgaagtttgtgaactggcaggtggacggggagtatcggggctctgacttcacagcagccgtcaccctggggaacccagacgtcctcgtgggttcaggaatcctcgtagcccactacctccagagcatcacgccttgcctggccctgggtggagagctggtctaccaccggcggcctggagaggagggcactgtcatgtctctagctgggaaatacacattgaacaactggttggcaacggtaacgttgggccaggcgggcatgcacgcaacatactaccacaaagccagtgaccagctgcaggtgggtgtggagtttgaggccagcacaaggatgcaggacaccagcgtctccttcgggtaccagctggacctgcccaaggccaacctcctcttcaaaggctctgtggatagcaactggatcgtgggtgccacgctggagaagaagctcccacccctgcccctgacactggcccttggggccttcctgaatcaccgcaagaacaagtttcagtgtggctttggcctcaccatcggctgagccctcctggcccccgccttccacgcccttccgattccacctccacctccacctccccctgccacagaggggagacctgagcccccctcccttccctccccccttgggggtcggggggggacattggaaaggagggaccccgccaccccagcagctgaggaggggattctggaactgaatggcgcttcgggattctgagtagcaggggcagcatgcccagtgggcctggggtcccgggagggattccggaattgaggggcacgcaggattctgagcaccaggggcagaggcggccagacaacctcagggaggagtgtcctggcgtccccatcctccaaagggcctgggcccgccccgagggggcagcgagaggagcttccccatccccggtcagtccaccctgccccgtccactttcccatctcctcggtataaatcatgtttataagttatggaagaaccgggacattttacagaaaaaaaacaaaaaccaacaaaaaatatacgtgggaaaaaaaacg

SEQ ID NO: 444690 - DNA, 1791 bp, Homo sapiens
ggtggcggcggcggcagcgggttcggttgcgcgtggcgcacggggtgggagcggagcccaggccgggagcaggcgccgccgccagtgagaaccggggccggagccgggtgcggatttgctggggctgagtcgggggcgcgcgggccctgacctctgccctctgacctctcccctagcaggcgaccatggggaacgtgttggctgccagctcgccgcccgcagggccgccaccgccgcctgcgccggccctcgtggggctgccgccacctccgccctcgccgccgggcttcacgctgccgccgctgggaggcagcctgggcgccggcaccagtacgagtcgaagttcggaacggacccccggggctgcaaccgccagcgcctcaggggccgccgaggatggggcctgcggctgcctgcccaacccgggcacattcgaggagtgccaccggaagtgcaaggagctgtttcccattcagatggagggtgtcaagctcacagtcaacaaagggttgagtaaccattttcaggtcaaccacacagtagccctcagcacaatcggggagtccaactaccacttcggggtcacatatgtggggacaaagcagctgagtcccacagaggcgttccctgtactggtgggtgacatggacaacagtggcagtctcaacgctcaggtcattcaccagctgggccccggtctcaggtccaagatggccatccagacccagcagtcgaagtttgtgaactggcaggtggacggggagtatcggggctctgacttcacagcagccgtcaccctggggaacccagacgtcctcgtgggttcaggaatcctcgtagcccactacctccagagcatcacgccttgcctggccctgggtggagagctggtctaccaccggcggcctggagaggagggcactgtcatgtctctagctgggaaatacacattgaacaactggttggcaacggtaacgttgggccaggcgggcatgcacgcaacatactaccacaaagccagtgaccagctgcaggtgggtgtggagtttgaggccagcacaaggatgcaggacaccagcgtctccttcgggtaccagctggacctgcccaaggccaacctcctcttcaaaggctctgtggatagcaactggatcgtgggtgccacgctggagaagaagctcccacccctgcccctgacactggcccttggggccttcctgaatcaccgcaagaacaagtttcagtgtggctttggcctcaccatcggctgagccctcctggcccccgccttccacgcccttccgattccacctccacctccacctccccctgccacagaggggagacctgagcccccctcccttccctccccccttgggggtcggggggggacattggaaaggagggaccccgccaccccagcagctgaggaggggattctggaactgaatggcgcttcgggattctgagtagcaggggcagcatgcccagtgggcctggggtcccgggagggattccggaattgaggggcacgcaggattctgagcaccaggggcagaggcggccagacaacctcagggaggagtgtcctggcgtccccatcctccaaagggcctgggcccgccccgagggggcagcgagaggagcttccccatccccggtcagtccaccctgccccgtccactttcccatctcctcggtataaatcatgtttataagttatggaagaaccgggacattttacagaaaaaaaacaaaaaccaacaaaaaatatacgtgggaaaaaaaacg

SEQ ID NO: 444691 - DNA, 1590 bp, Homo sapiens
ggtggcggcggcggcagcgggttcggttgcgcgtggcgcacggggtgggagcggagcccaggccgggagcaggcgccgccgccacaggcgaccatggggaacgtgttggctgccagctcgccgcccgcagggccgccaccgccgcctgcgccggccctcgtggggctgccgccacctccgccctcgccgccgggcttcacgctgccgccgctgggaggcagcctgggcgccggcaccagtacgagtcgaagttcggaacggacccccggggctgcaaccgccagcgcctcaggggccgccgaggatggggcctgcggctgcctgcccaacccgggcacattcgaggagtgccaccggaagtgcaaggagctgtttcccattcagatggagggtgtcaagctcacagtcaacaaagggttgagtaaccattttcaggtcaaccacacagtagccctcagcacaatcggggagtccaactaccacttcggggtcacatatgtggggacaaagcagctgagtcccacagaggcgttccctgtactggtgggtgacatggacaacagtggcagtctcaacgctcaggtcattcaccagctgggccccggtctcaggtccaagatggccatccagacccagcagtcgaagtttgtgaactggcaggtggacggggagtatcggggctctgacttcacagcagccgtcaccctggggaacccagacgtcctcgtgggttcaggaatcctcgtagcccactacctccagagcatcacgccttgcctggccctgggtggagagctggtctaccaccggcggcctggagaggagggcactgtcatgtctctagctgggaaatacacattgaacaactggttggcaacggtaacgttgggccaggcgggcatgcacgcaacatactaccacaaagccagtgaccagctgcaggtgggtgtggagtttgaggccagcacaaggatgcaggacaccagcgtctccttcgggtaccagctggacctgcccaaggccaacctcctcttcaaaggctctgtggatagcaactggatcgtgggtgccacgctggagaagaagctcccacccctgcccctgacactggcccttggggccttcctgaatcaccgcaagaacaagtttcagtgtggctttggcctcaccatcggctgagccctcctggcccccgccttccacgcccttccgattccacctccacctccacctccccctgccacagaggggagacctgagcccccctcccttccctccccccttgggggtcggggggggacattggaaaggagggaccccgccaccccagcagctgaggagggagcaccaggggcagaggcggccagacaacctcagggaggagtgtcctggcgtccccatcctccaaagggcctgggcccgccccgagggggcagcgagaggagcttccccatccccggtcagtccaccctgccccgtccactttcccatctcctcggtataaatcatgtttataagttatggaagaaccgggacattttacagaaaaaaaacaaaaaccaacaaaaaatatacgtgggaaaaaaaacg

SEQ ID NO: 444692 - DNA, 1703 bp, Homo sapiens
gtgggtaacgaggagcagcgcagggttcgcagaacagattagaattctcccgaggcactctgggaagggccagcacttccggttttagcaggcgaccatggggaacgtgttggctgccagctcgccgcccgcagggccgccaccgccgcctgcgccggccctcgtggggctgccgccacctccgccctcgccgccgggcttcacgctgccgccgctgggaggcagcctgggcgccggcaccagtacgagtcgaagttcggaacggacccccggggctgcaaccgccagcgcctcaggggccgccgaggatggggcctgcggctgcctgcccaacccgggcacattcgaggagtgccaccggaagtgcaaggagctgtttcccattcagatggagggtgtcaagctcacagtcaacaaagggttgagtaaccattttcaggtcaaccacacagtagccctcagcacaatcggggagtccaactaccacttcggggtcacatatgtggggacaaagcagctgagtcccacagaggcgttccctgtactggtgggtgacatggacaacagtggcagtctcaacgctcaggtcattcaccagctgggccccggtctcaggtccaagatggccatccagacccagcagtcgaagtttgtgaactggcaggtggacggggagtatcggggctctgacttcacagcagccgtcaccctggggaacccagacgtcctcgtgggttcaggaatcctcgtagcccactacctccagagcatcacgccttgcctggccctgggtggagagctggtctaccaccggcggcctggagaggagggcactgtcatgtctctagctgggaaatacacattgaacaactggttggcaacggtaacgttgggccaggcgggcatgcacgcaacatactaccacaaagccagtgaccagctgcaggtgggtgtggagtttgaggccagcacaaggatgcaggacaccagcgtctccttcgggtaccagctggacctgcccaaggccaacctcctcttcaaaggctctgtggatagcaactggatcgtgggtgccacgctggagaagaagctcccacccctgcccctgacactggcccttggggccttcctgaatcaccgcaagaacaagtttcagtgtggctttggcctcaccatcggctgagccctcctggcccccgccttccacgcccttccgattccacctccacctccacctccccctgccacagaggggagacctgagcccccctcccttccctccccccttgggggtcggggggggacattggaaaggagggaccccgccaccccagcagctgaggaggggattctggaactgaatggcgcttcgggattctgagtagcaggggcagcatgcccagtgggcctggggtcccgggagggattccggaattgaggggcacgcaggattctgagcaccaggggcagaggcggccagacaacctcagggaggagtgtcctggcgtccccatcctccaaagggcctgggcccgccccgagggggcagcgagaggagcttccccatccccggtcagtccaccctgccccgtccactttcccatctcctcggtataaatcatgtttataagttatggaagaaccgggacattttacagaaaaaaaacaaaaaccaacaaaaaatatacgtgggaaaaaaaacg

SEQ ID NO: 444693 - DNA, 1104 bp, Homo sapiens
ggtggcggcggcggcagcgggttcggttgcgcgtggcgcacggggtgggagcggagcccaggccgggagcaggcgccgccgccacaggcgaccatggggaacgtgttggctgccagctcgccgcccgcagggccgccaccgccgcctgcgccggccctcgtggggctgccgccacctccgccctcgccgccgggcttcacgctgccgccgctgggaggcagcctgggcgccggcaccagtacgagtcgaagttcggaacggacccccggggctgcaaccgccagcgcctcaggggccgccgaggatggggcctgcggctgcctgcccaacccgggcacattcgaggagtgccaccggaagtgcaaggagctgtttcccattcagatggagggtgtcaagctcacagtcaacaaagggttgagtaaccattttcaggtcaaccacacagtagccctcagcacaatcggggagtccaactaccacttcggggtcacatatgtggggacaaagcagctgagtcccacagaggcgttccctgtactggtgggtgacatggacaacagtggcagtctcaacgctcaggtcattcaccagctgggccccggtctcaggtccaagatggccatccagacccagcagtcgaagtttgtgaactggcaggtggacggggagtatcggggctctgacttcacagcagccgtcaccctggggaacccagacgtcctcgtgggttcaggaatcctcgtagcccactacctccagagcatcacgccttgcctggccctgggtggagagctggtctaccaccggcggcctggagaggagggcactgtcatgtctctagctgggaaatacacattgaacaactggttggcaacggtaacgttgggccaggcgggcatgcacgcaacatactaccacaaagccagtgaccagctgcaggtgggtgtggagtttgaggccagcacaaggatgcaggacaccagcgtctccttcgggtaccagctggacctgcccaaggccaacctcctcttcaaaggctctgttggatagcaactggatcgcgggttagggtgagggttacgcgggttagggtgagggtta

SEQ ID NO: 444694 - DNA, 1366 bp, Homo sapiens
ggtggcggcggcggcagcgggttcggttgcgcgtggcgcacggggtgggagcggagcccaggccgggagcaggcgccgccgccagtgagaaccggggccggagccgggtgcggatttgctggggctgagtcgggggcgcgcgggccctgacctctgccctctgacctctcccctagcaggcgaccatggggaacgtgttggctgccagctcgccgcccgcagggccgccaccgccgcctgcgccggccctcgtggggctgccgccacctccgccctcgccgccgggcttcacgctgccgccgctgggaggcagcctgggcgccggcaccagtacgagtcgaagttcggaacggacccccggggctgcaaccgccagcgcctcaggggccgccgaggatggggcctgcggctgcctgcccaacccgggcacattcgaggagtgccaccggaagtgcaaggagctgtttcccattcagatggagggtgtcaagctcacatgtcatgtctctagctgggaaatacacattgaacaactggttggcaacggtaacgttgggccaggcgggcatgcacgcaacatactaccacaaagccagtgaccagctgcaggtgggtgtggagtttgaggccagcacaaggatgcaggacaccagcgtctccttcgggtaccagctggacctgcccaaggccaacctcctcttcaaaggctctgtggatagcaactggatcgtgggtgccacgctggagaagaagctcccacccctgcccctgacactggcccttggggccttcctgaatcaccgcaagaacaagtttcagtgtggctttggcctcaccatcggctgagccctcctggcccccgccttccacgcccttccgattccacctccacctccacctccccctgccacagaggggagacctgagcccccctcccttccctccccccttgggggtcggggggggacattggaaaggagggaccccgccaccccagcagctgaggaggggattctggaactgaatggcgcttcgggattctgagtagcaggggcagcatgcccagtgggcctggggtcccgggagggattccggaattgaggggcacgcaggattctgagcaccaggggcagaggcggccagacaacctcagggaggagtgtcctggcgtccccatcctccaaagggcctgggcccgccccgagggggcagcgagaggagcttccccatccccggtcagtccaccctgccccgtccactttcccatctcctcggtataaatcatgtttataagttatggaagaaccgggacattttacagaaaaaaaacaaaaaccaacaaaaaatatacgtgggaaaaaaaacg

SEQ ID NO: 444695 - DNA, 946 bp, Homo sapiens
ggtggcggcggcggcagcgggttcggttgcgcgtggcgcacggggtgggagcggagcccaggccgggagcaggcgccgccgccacaggcgaccatggggaacgtgttggctgccagctcgccgcccgcagggccgccaccgccgcctgcgccggccctcgtggggctgccgccacctccgccctcgccgccgggcttcacgctgccgccgctgggaggcagcctgggcgccggcaccagtacgagtcgaagttcggaacggacccccggggctgcaaccgccagcgcctcaggggccgccgaggatggggcctgcggctgcctgcccaacccgggcacattcgaggagtgccaccggaagtgcaaggagctgtttcccattcagatggagggtgtcaagctcacagtcaacaaagggttgagtaaccattttcaggtcaaccacacagtagccctcagcacaatcggggagtccaactaccacttcggggtcacatatgtggggacaaagcagctgagtcccacagaggcgttccctgtactggtgggtgacatggacaacagtggcagtctcaacgctcaggtcattcaccagctgggccccggtctcaggtccaagatggccatccagacccagcagtcgaagtttgtgaactggcaggtggacggggagtatcggggctctgacttcacagcagccagcaccaggggcagaggcggccagacaacctcagggaggagtgtcctggcgtccccatcctccaaagggcctgggcccgccccgagggggcagcgagaggagcttccccatccccggtcagtccaccctgccccgtccactttcccatctcctcggtataaatcatgtttataagttatggaagaaccgggacattttacagaaaaaaaacaaaaaccaacaaaaaatatacgtgggaaaaaaaacg

SEQ ID NO: 444696 - DNA, 736 bp, Homo sapiens
gggctggtacggtcggagatgtatggaatcctcgtagcccactacctccagagcatcacgccttgcctggccctgggtggagagctggtctaccaccggcggcctggagaggagggcactgtcatgtctctagctgggaaatacacattgaacaactggttggcaacggtaacgttgggccaggcgggcatgcacgcaacatactaccacaaagccagtgaccagctgcaggtgggtgtggagtttgaggccagcacaaggatgcaggacaccagcgtctccttcgggtaccagctggacctgcccaaggccaacctcctcttcaaaggtaaaggtctcggttcccctacgcgggaaacaggcaggaggtgactcaactctgagtggatgtgtgggccaccacaggtgctggaggacagtgtgctgccaccctgtgggcctccacattaccagggaacacttgttaaaaggtaggtggggccgggtgcggtggctcacgcctgtaatcccaaagtgctgggattacaggcgtgagctaccggacccggccaccagccagacttagcaacaaggtgtgcctccgggatacactgctggcgatggcttcacacggggttgtgccagggaacacacggtagttcgtatggaacgtggtgcgttgggacatatcaagatttcttcacaagggacggtgaggaggtaaaggaaagggttccagatatttagtaacgaattg

SEQ ID NO: 444697 - DNA, 1676 bp, Homo sapiens
ggactgtgtggtgtggatgctgtgagcccagtgcctggtgagcatgtgctgcctgccgccacaggcgaccatggggaacgtgttggctgccagctcgccgcccgcagggccgccaccgccgcctgcgccggccctcgtggggctgccgccacctccgccctcgccgccgggcttcacgctgccgccgctgggaggcagcctgggcgccggcaccagtacgagtcgaagttcggaacggacccccggggctgcaaccgccagcgcctcaggggccgccgaggatggggcctgcggctgcctgcccaacccgggcacattcgaggagtgccaccggaagtgcaaggagctgtttcccattcagatggagggtgtcaagctcacagtcaacaaagggttgagtaaccattttcaggtcaaccacacagtagccctcagcacaatcggggagtccaactaccacttcggggtcacatatgtggggacaaagcagctgagtcccacagaggcgttccctgtactggtgggtgacatggacaacagtggcagtctcaacgctcaggtcattcaccagctgggccccggtctcaggtccaagatggccatccagacccagcagtcgaagtttgtgaactggcaggtggacggggagtatcggggctctgacttcacagcagccgtcaccctggggaacccagacgtcctcgtgggttcaggaatcctcgtagcccactacctccagagcatcacgccttgcctggccctgggtggagagctggtctaccaccggcggcctggagaggagggcactgtcatgtctctagctgggaaatacacattgaacaactggttggcaacggtaacgttgggccaggcgggcatgcacgcaacatactaccacaaagccagtgaccagctgcaggtgggtgtggagtttgaggccagcacaaggatgcaggacaccagcgtctccttcgggtaccagctggacctgcccaaggccaacctcctcttcaaaggctctgtggatagcaactggatcgtgggtgccacgctggagaagaagctcccacccctgcccctgacactggcccttggggccttcctgaatcaccgcaagaacaagtttcagtgtggctttggcctcaccatcggctgagccctcctggcccccgccttccacgcccttccgattccacctccacctccacctccccctgccacagaggggagacctgagcccccctcccttccctccccccttgggggtcggggggggacattggaaaggagggaccccgccaccccagcagctgaggaggggattctggaactgaatggcgcttcgggattctgagtagcaggggcagcatgcccagtgggcctggggtcccgggagggattccggaattgaggggcacgcaggattctgagcaccaggggcagaggcggccagacaacctcagggaggagtgtcctggcgtccccatcctccaaagggcctgggcccgccccgagggggcagcgagaggagcttccccatccccggtcagtccaccctgccccgtccactttcccatctcctcggtataaatcatgtttataagttatggaagaaccgggacattttacagaaaaaaaacaaaaaccaacaaaaaatatacgtgggaaaaaaaacg

SEQ ID NO: 444698 - DNA, 1464 bp, Homo sapiens
aggcgccgcgcacaggcgacatggggaacgtgttggctgcaaccgccagcgcctcaggggccgccgaggatggggcctgcggctgcctgcccaacccgggcacattcgaggagtgccaccggaagtgcaaggagctgtttcccattcagatggagggtgtcaagctcacagtcaacaaagggttgagtaaccattttcaggtcaaccacacagtagccctcagcacaatcggggagtccaactaccacttcggggtcacatatgtggggacaaagcagctgagtcccacagaggcgttccctgtactggtgggtgacatggacaacagtggcagtctcaacgctcaggtcattcaccagctgggccccggtctcaggtccaagatggccatccagacccagcagtcgaagtttgtgaactggcaggtggacggggagtatcggggctctgacttcacagcagccgtcaccctggggaacccagacgtcctcgtgggttcaggaatcctcgtagcccactacctccagagcatcacgccttgcctggccctgggtggagagctggtctaccaccggcggcctggagaggagggcactgtcatgtctctagctgggaaatacacattgaacaactggttggcaacggtaacgttgggccaggcgggcatgcacgcaacatactaccacaaagccagtgaccagctgcaggtgggtgtggagtttgaggccagcacaaggatgcaggacaccagcgtctccttcgggtaccagctggacctgcccaaggccaacctcctcttcaaaggctctgtggatagcaactggatcgtgggtgccacgctggagaagaagctcccacccctgcccctgacactggcccttggggccttcctgaatcaccgcaagaacaagtttcagtgtggctttggcctcaccatcggctgagccctcctggcccccgccttccacgcccttccgattccacctccacctccacctccccctgccacagaggggagacctgagcccccctcccttccctccccccttgggggtcggggggggacattggaaaggagggaccccgccaccccagcagctgaggaggggattctggaactgaatggcgcttcgggattctgagtagcaggggcagcatgcccagtgggcctggggtcccgggagggattccggaattgaggggcacgcaggattctgagcaccaggggcagaggcggccagacaacctcagggaggagtgtcctggcgtccccatcctccaaagggcctgggcccgccccgagggggcagcgagaggagcttccccatccccggtcagtccaccctgccccgtccactttcccatctcctcggtataaatcatgtttataagttatggaagaaccgggacattttacagaaaaaaaacaaaaaccaacaaaaaatatacgtgggaaaaaaaacg

SEQ ID NO: 444699 - DNA, 895 bp, Homo sapiens
ggtggcggcggcggcagcgggttcggttgcgcgtggcgcacggggtgggagcggagcccaggccgggagcaggcgccgccgccacaggcgaccatggggaacgtgttggctgccagctcgccgcccgcagggccgccaccgccgcctgcgccggccctcgtggggctgccgccacctccgccctcgccgccgggcttcacgctgccgccgctgggaggcagcctgggcgccggcaccagtacgagtcgaagttcggaacggacccccggggctgcaaccgccagcgcctcaggggccgccgaggatggggcctgcggctgcctgcccaacccgggcacattcgaggagtgccaccggaagtgcaaggagctgtttcccattcagatggagggtgtcaagctcacagtcaacaaagggttgagtaaccattttcaggtcaaccacacagtagccctcagcacaatcggggagtccaactaccacttcggggtcacatatgtggggacaaagcagctgagtcccacagaggcgttccctgtactggtgggtgacatggacaacagtggcagtctcaacgctcaggtcattcaccagctgggccccggtctcaggtccaagatggccatccagacccagcagtcgaagtttgtgaactggcaggtggacggggagtatcggggctctgacttcacagcagccgtcaccctggggaacccagacgtcctcgtgggttcaggtaagaggcggagggcttggagggtggtcacaaaactgcagttctgagctcttcgccacgcaaatccaccccatttgtgaacctcctttctgccactggagaagtggctcagcaggagtgatttgaacatcaggcaacatactacagtggtagcgcaca

SEQ ID NO: 444700 - DNA, 589 bp, Homo sapiens
ggtggcggcggcggcagcgggttcggttgcgcgtggcgcacggggtgggagcggagcccaggccgggagcaggcgccgccgccacaggcgaccatggggaacgtgttggctgccagctcgccgcccgcagggccgccaccgccgcctgcgccggccctcgtggggctgccgccacctccgccctcgccgccgggcttcacgctgccgccgctgggaggcagcctgggcgccggcaccagtacgagtcgaagttcggaacggacccccggggctgcaaccgccagcgcctcaggggccgccgaggatggggcctgcggctgcctgcccaacccgggcacattcgaggagtgccaccggaagtgcaaggagctgtttcccattcagatggagggtgtcaagctcacagtcaacaaagggttgagtaaccattttcaggtcaaccacacagtagccctcagcacaatcggggagtccaactaccatttcccatctcctcggtataaatcatgtttataagttatggaagaaccgggacattttacagaaaaaaaacaaaaaccaacaaaaaatatacgtgggaaaaaaaacg

SEQ ID NO: 444701 - DNA, 426 bp, Homo sapiens
tgcccccttgggctccatacaagggtaatttagtttgggaaagtaactgctaggtgagagtcatcagccatactttgcagtggcagggagcagtcaggtgttgagctcatttactagagtgaataccctgcttggatgctgtgcttttccggtttgtctctaagcccctttctccagggcatgttggtttccctggcctctcagtgtcctaactggagcccagagtgccttgttctgagccaggagacggctgagcactggccctccacacctaagcgtcctttacattaacttattggtcttgtataacacctggtgccattgccaagtggctgtgtcctcagctacagagctggaattgtgtggggtttagtgctaaatacttcaataaagtctgttttttgtgattggctgaaaaaaaaaaaa

SEQ ID NO: 444702 - DNA, 3760 bp, Homo sapiens
tgactagcaggatccggcgcttgtgtggctcttcgcgtggcccctggaggacgctgacgtacgacctctgccttcgggacacgcggagctgacgggcaccttgccagcggagtatcccctcaaaccaggggaaaaggcccccaaggttcgccgcaggatcggagcggcttacaaactggatgactgggccttgcacagagaggaccccctaagcagcctggagcgccagctggccctgcagctgcagatcacagaggcagcccgtcggctgtgcctggaggagaacctcagcaggcaggctcggcggcagcggaagcactccatgctgcaggaggagaagaagctgcaggagctccagcgctgcctggtcgagcggcggcgcaatagcgagccacctccggctgctgctctccccctgggccgagagctcagtgcctctgatgacagctccctgtcagatgggctcctcctggaggaagaggaatcccaagtgccaaaacctcctccagagtctccagccccaccttctcggcctctcccaccccaaacccttgagggtctgcagccaacaggacctgaggctgggagcccagaacgggctccagtccagaacagcccctggaaggaaaccagcctggaccacccctatgagaagcccaggaagtcttctgagccctggagcgagtccagcagcccagccaccacaccacaggatgggcccagtgcctccagcctgtggcttctggagcctgcctcctaccacgtggttcccatccgtggtgttcctggccagtggcagggccgcaccagtgccccagccacccctgagatacaggggaggaggggccagtcgcagtctctgagggtggattccttccgggcgggtcctgagggccgaggtcgcagcgcctttccccgccgccgccccactcactacacggtgacagtgccagattcctgctttcccgcgaccaagcccccgctgccccacgccgcctgccactcctgctcagaagacagtggctctgacgtctccagcatctcccaccccacttcgccgggcagcagcagccccgacatctcctttctgcagcctctctcccctcccaagacccatcgtcaccgcggggcctgggtcccagccggcagcagagagctggtcgcccaccaccccaagctactgctgccgcctggctatttcccggcggggcggtacgtggtggtggctgagagccccctgccgcctggcgagtgggagctgtgccgcgcagccccgggccctgcttacgaggaggagggcactcccctgcgctaccagcgtctggtgccctcccgcagccgcatcgtgcggacgccctccctgaaggacagcccggcaggccgggggctcagcaaggccgccgtgtccgaggagctcaagtggtggcacgagcgtgcacgcctccggagcacccgaccccactcactggaccgccaaggagctttccgggtcaggagcctgccccttgggagagagggcttcggacgagccctgggaccccgggcacaggtgcccacagtttgtgtgctgcggagatcgcctgatggggcccctgtgcaagtctttgtacctgaaaaaggagagatcatcagccaggtgtaactctgcgccccacgctggaaaaaactgtttcatagaggggctgggctgagacccccccacccctgagtgcctctttcagctcccccatccccatcgcaggccgatgacctggagctgagaccttttattattttttttttacacgacttttttcagaagccctgacctaaggatttatatatgtggattgtcctcaatacccctgtgatatgattatgttttatcccccagagtttggcctactggacttaaggccttgcctgtctgactgacagcctctatctccttatataagacaagtggcaggggacgagtgaagcagagtgagccaccttgggagttctccaacgctctgtgctctggttctaagaaattccctggggaactgcccctggccctcctgtcccactattgctggaggctggacatggtacatactcatgcacatgactctcccccatttcccaggtctctgggtaccccagcctgggctgggggagaatctcttcccccttttctaatgtgctctgtgatgcacacaccaagtggtaggtcaaaggtcagtatatcccggtggtgtattgtcttgctagaccctgctattttcctgaccccctaaatcctctttagggacccagtcactataccctgtctatgccctgtgggctcccagacccctgagctttgagtcagtggcatcacagtttgtagcctcagggggtctggctgggggctggtccatgcttgtggttagtggacagcagccaccctttgacagctacctctggacatctcaagggcttgcagccccactgctccttctaacattttgtttgtttttgagatggagtctcgctctgtcgcccaggctggaatgctgtagcaagatttcggctcactgcaacccccgtctcccgggttcaagcgaatctcctgcctcagccttctgagtagctgggattacaggcaagcaccaccatgcctgctaattttttatttttagtagagatggggtttcatcatgttggccaggctggtctcgaactcctgacctcaagtgatccacctgccttggcctttcaaagtgctgggattacaggcatgagccaccgcacctggcccttctaacgttttttcatcatagtcccaaaaaccaatactttacaagtggtttttgaaaggcaccacttttgtggcatgttctggttgggagagggagtcacagttcctactccccccaccagctatgcttctgctctgagaaggtggttatttatacaaacatggacatactcactcccaagggctgatgagatgctgaattttctttgggggcattcattaattgtcccagctgcagcgactggagcaagtctggaagctgcctgtgctaagaccacccagctgtccctgggttctcatcctagggccttctttgcttccaggtcaggggacctgcttcaatgagaaagcaactgaattgaggctaggagaggtagggagagctgagttctgacttcacctgtgcagaactctctgcccccatgttacctggactggaacagactgtgaatatagcagaaggttccaagaactctggtgtctgacctagaagaggcacagttctctctactggaaagaaaacgatgtagccgattgcacaagggtgccaagggaagacccaggatggcccatcaaaggaacctgggggaggatgcaggaggctgaagggatgcacctggcatttctctcactgtgctcttaccgcatcagcaacccccaacttttgggcctactctgccccccatgcgtgaataccctgcttggatgctgtgcttttccggtttgtctctaagcccctttctccagggcatgttggtttccctggcctctcagtgtcctaactggagcccagagtgccttgttctgagccaggagacggctgagcactggccctccacacctaagcgtcctttacattaacttattggtcttgtataacacctggtgccattgccaagtggctgtgtcctcagctacagagctggaattgtgtggggtttagtgctaaatacttcaataaagtctgttttttgtgattggctgaaaaaaaaaaaa

SEQ ID NO: 444703 - DNA, 2980 bp, Homo sapiens
atgctgcaaatgccgaagttaaatgaaatacctccggggagggcaggccgcagggaggctcggggggagggaagatggcctggacaaacaggtcctgaagctgcgaggctggagtggagggcgcaggggcaggcgggcggcgccagagctccatgggacagctggggaagctccaggctacctacacaacctggcccaggctggtcacggtgtcccccctccctgctctgtgccctctccttccagaaatccaccatggagagtaaggatgaggtcagcgacaccgacagtggcatcatcctgcagtctggccccgacagcccggtctccccaatgaaggagctgacccatgcagtgcacaagcagcagagggccctggaagcgaggctggaggcctgcctggaggagctgaggagactctgccttcgggaagcggagctgacgggcaccttgccagcggagtatcccctcaaaccaggggaaaaggcccccaaggttcgccgcaggatcggagcggcttacaaactggatgactgggccttgcacagagaggaccccctaagcagcctggagcgccagctggccctgcagctgcagatcacagaggcagcccgtcggctgtgcctggaggagaacctcagcaggcaggctcggcggcagcggaagcactccatgctgcaggaggagaagaagctgcaggagctccagcgctgcctggtcgagcggcggcgcaatagcgagccacctccggctgctgctctccccctgggccgagagctcagtgcctctgatgacagctccctgtcagatgggctcctcctggaggaagaggaatcccaagtgccaaaacctcctccagagtctccagccccaccttctcggcctctcccaccccaaacccttgagggtctgcagccaacaggacctgaggctgggagcccagaacgggctccagtccagaacagcccctggaaggaaaccagcctggaccacccctatgagaagcccaggaagtcttctgagccctggagcgagtccagcagcccagccaccacaccacaggatgggcccagtgcctccagcctgtggcttctggagcctgcctcctaccacgtggttcccatccgtggtgttcctggccagtggcagggccgcaccagtgccccagccacccctgagatacaggggaggaggggccagtcgcagtctctgagggtggattccttccgggcgggtcctgagggccgaggtcgcagcgcctttccccgccgccgccccactcactacacggtgacagtgccagattcctgctttcccgcgaccaagcccccgctgccccacgccgcctgccactcctgctcagaagacagtggctctgacgtctccagcatctcccaccccacttcgccgggcagcagcagccccgacatctcctttctgcagcctctctcccctcccaagacccatcgtcaccgcggggcctgggtcccagccggcagcagagagctggtcgcccaccaccccaagctactgctgccgcctggctatttcccggcggggcggtacgtggtggtggctgagagccccctgccgcctggcgagtgggagctgtgccgcgcagccccgggccctgcttacgaggaggagggcactcccctgcgctaccagcgtctggtgccctcccgcagccgcatcgtgcggacgccctccctgaaggacagcccggcaggccgggggctcagcaaggccgccgtgtccgaggagctcaagtggtggcacgagcgtgcacgcctccggagcacccgaccccactcactggaccgccaaggagctttccgggtcaggagcctgccccttgggagagagggcttcggacgagccctgggaccccgggcacaggtgcccacagtttgtgtgctgcggagatcgcctgatggggcccctgtgcaagtctttgtacctgaaaaaggagagatcatcagccagagtttggcctactggacttaaggccttgcctgtctgactgacagcctctatctccttatataagacaagtggcaggggacgagtgaagcagagtgagccaccttgggagttctccaacgctctgtgctctggttctaagaaattccctggggaactgcccctggccctcctgtcccactattgctggaggctggacatgatggagtctcgctctgtcgcccaggctggaatgctgtagcaagatttcggctcactgcaacccccgtctcccgggttcaagcgaatctcctgcctcagccttctgagtagctgggattacaggtcaggggacctgcttcaatgagaaagcaactgaattgaggctaggagaggtagggagagctgagttctgacttcacctgtgcagaactctctgcccccatgttacctggactggaacagactgtgaatatagcagaaggttccaagaactctggtgtctgacctagaagaggcacagttctctctactggaaagaaaacgatgtagccgattgcacaagggtgccaagggaagacccaggatggcccatcaaaggaacctgggggaggatgcaggaggctgaagggatgcacctggcatttctctcactgtgctcttaccgcatcagcaacccccaacttttgggcctactctgccccccatgcgtgaataccctgcttggatgctgtgcttttccggtttgtctctaagcccctttctccagggcatgttggtttccctggcctctcagtgtcctaactggagcccagagtgccttgttctgagccaggagacggctgagcactggccctccacacctaagcgtcctttacattaacttattggtcttgtataacacctggtgccattgccaagtggctgtgtcctcagctacagagctggaattgtgtggggtttagtgctaaatacttcaataaagtctgttttttgtgattggctgaaaaaaaaaaaa

SEQ ID NO: 444704 - DNA, 4110 bp, Homo sapiens
atgctgcaaatgccgaagttaaatgaaatacctccggggagggcaggccgcagggaggctcggggggagggaagatggcctggacaaacaggtcctgaagctgcgaggctggagtggagggcgcaggggcaggcgggcggcgccagagctccatgggacagctggggaagctccaggctacctacacaacctggcccaggctggtcacggtgtcccccctccctgctctgtgccctctccttccagaaatccaccatggagagtaaggatgaggtcagcgacaccgacagtggcatcatcctgcagtctggccccgacagcccggtctccccaatgaaggagctgacccatgcagtgcacaagcagcagagggccctggaagcgaggctggaggcctgcctggaggagctgaggagactctgccttcgggaagcggagctgacgggcaccttgccagcggagtatcccctcaaaccaggggaaaaggcccccaaggttcgccgcaggatcggagcggcttacaaactggatgactgggccttgcacagagaggaccccctaagcagcctggagcgccagctggccctgcagctgcagatcacagaggcagcccgtcggctgtgcctggaggagaacctcagcaggcaggctcggcggcagcggaagcactccatgctgcaggaggagaagaagctgcaggagctccagcgctgcctggtcgagcggcggcgcaatagcgagccacctccggctgctgctctccccctgggccgagagctcagtgcctctgatgacagctccctgtcagatgggctcctcctggaggaagaggaatcccaagtgccaaaacctcctccagagtctccagccccaccttctcggcctctcccaccccaaacccttgagggtctgcagccaacaggacctgaggctgggagcccagaacgggctccagtccagaacagcccctggaaggaaaccagcctggaccacccctatgagaagcccaggaagtcttctgagccctggagcgagtccagcagcccagccaccacaccacaggatgggcccagtgcctccagcctgtggcttctggagcctgcctcctaccacgtggttcccatccgtggtgttcctggccagtggcagggccgcaccagtgccccagccacccctgagatacaggggaggaggggccagtcgcagtctctgagggtggattccttccgggcgggtcctgagggccgaggtcgcagcgcctttccccgccgccgccccactcactacacggtgacagtgccagattcctgctttcccgcgaccaagcccccgctgccccacgccgcctgccactcctgctcagaagacagtggctctgacgtctccagcatctcccaccccacttcgccgggcagcagcagccccgacatctcctttctgcagcctctctcccctcccaagacccatcgtcaccgcggggcctgggtcccagccggcagcagagagctggtcgcccaccaccccaagctactgctgccgcctggctatttcccggcggggcggtacgtggtggtggctgagagccccctgccgcctggcgagtgggagctgtgccgcgcagccccgggccctgcttacgaggaggagggcactcccctgcgctaccagcgtctggtgccctcccgcagccgcatcgtgcggacgccctccctgaaggacagcccggcaggccgggggctcagcaaggccgccgtgtccgaggagctcaagtggtggcacgagcgtgcacgcctccggagcacccgaccccactcactggaccgccaaggagctttccgggtcaggagcctgccccttgggagagagggcttcggacgagccctgggaccccgggcacaggtgcccacagtttgtgtgctgcggagatcgcctgatggggcccctgtgcaagtctttgtacctgaaaaaggagagatcatcagccaggtgtaactctgcgccccacgctggaaaaaactgtttcatagaggggctgggctgagacccccccacccctgagtgcctctttcagctcccccatccccatcgcaggccgatgacctggagctgagaccttttattattttttttttacacgacttttttcagaagccctgacctaaggatttatatatgtggattgtcctcaatacccctgtgatatgattatgttttatcccccagagtttggcctactggacttaaggccttgcctgtctgactgacagcctctatctccttatataagacaagtggcaggggacgagtgaagcagagtgagccaccttgggagttctccaacgctctgtgctctggttctaagaaattccctggggaactgcccctggccctcctgtcccactattgctggaggctggacatggtacatactcatgcacatgactctcccccatttcccaggtctctgggtaccccagcctgggctgggggagaatctcttcccccttttctaatgtgctctgtgatgcacacaccaagtggtaggtcaaaggtcagtatatcccggtggtgtattgtcttgctagaccctgctattttcctgaccccctaaatcctctttagggacccagtcactataccctgtctatgccctgtgggctcccagacccctgagctttgagtcagtggcatcacagtttgtagcctcagggggtctggctgggggctggtccatgcttgtggttagtggacagcagccaccctttgacagctacctctggacatctcaagggcttgcagccccactgctccttctaacattttgtttgtttttgagatggagtctcgctctgtcgcccaggctggaatgctgtagcaagatttcggctcactgcaacccccgtctcccgggttcaagcgaatctcctgcctcagccttctgagtagctgggattacaggcaagcaccaccatgcctgctaattttttatttttagtagagatggggtttcatcatgttggccaggctggtctcgaactcctgacctcaagtgatccacctgccttggcctttcaaagtgctgggattacaggcatgagccaccgcacctggcccttctaacgttttttcatcatagtcccaaaaaccaatactttacaagtggtttttgaaaggcaccacttttgtggcatgttctggttgggagagggagtcacagttcctactccccccaccagctatgcttctgctctgagaaggtggttatttatacaaacatggacatactcactcccaagggctgatgagatgctgaattttctttgggggcattcattaattgtcccagctgcagcgactggagcaagtctggaagctgcctgtgctaagaccacccagctgtccctgggttctcatcctagggccttctttgcttccaggtcaggggacctgcttcaatgagaaagcaactgaattgaggctaggagaggtagggagagctgagttctgacttcacctgtgcagaactctctgcccccatgttacctggactggaacagactgtgaatatagcagaaggttccaagaactctggtgtctgacctagaagaggcacagttctctctactggaaagaaaacgatgtagccgattgcacaagggtgccaagggaagacccaggatggcccatcaaaggaacctgggggaggatgcaggaggctgaagggatgcacctggcatttctctcactgtgctcttaccgcatcagcaacccccaacttttgggcctactctgccccccatgcgtgaataccctgcttggatgctgtgcttttccggtttgtctctaagcccctttctccagggcatgttggtttccctggcctctcagtgtcctaactggagcccagagtgccttgttctgagccaggagacggctgagcactggccctccacacctaagcgtcctttacattaacttattggtcttgtataacacctggtgccattgccaagtggctgtgtcctcagctacagagctggaattgtgtggggtttagtgctaaatacttcaataaagtctgttttttgtgattggctgaaaaaaaaaaaa

SEQ ID NO: 444705 - DNA, 3631 bp, Homo sapiens
atgctgcaaatgccgaagttaaatgaaatacctccggggagggcaggccgcagggaggctcggggggagggaagatggcctggacaaacaggtcctgaagctgcgaggctggagtggagggcgcaggggcaggcgggcggcgccagagctccatgggacagctggggaagctccaggctacctacacaacctggcccaggctggtcacggtgtcccccctccctgctctgtgccctctccttccagaaatccaccatggagagtaaggatgaggtcagcgacaccgacagtggcatcatcctgcagtctggccccgacagcccggtctccccaatgaaggagctgacccatgcagtgcacaagcagcagagggccctggaagcgaggctggaggcctgcctggaggagctgaggagactctgccttcgggaagcggagctgacgggcaccttgccagcggagtatcccctcaaaccaggggaaaaggcccccaaggttcgccgcaggatcggagcggcttacaaactggatgactgggccttgcacagagaggaccccctaagcagcctggagcgccagctggccctgcagctgcagatcacagaggcagcccgtcggctgtgcctggaggagaacctcagcaggcaggctcggcggcagcggaagcactccatgctgcaggaggagaagaagctgcaggagctccagcgctgcctggtcgagcggcggcgcaatagcgagccacctccggctgctgctctccccctgggccgagagctcagtgcctctgatgacagctccctgtcagatgggctcctcctggaggaagaggaatcccaagtgccaaaacctcctccagagtctccagccccaccttctcggcctctcccaccccaaacccttgagggtctgcagccaacaggacctgaggctgggagcccagaacgggctccagtccagaacagcccctggaaggaaaccagcctggaccacccctatgagaagcccaggaagtcttctgagccctggagcgagtccagcagcccagccaccacaccacaggatgggcccagtgcctccagcctgtggcttctggagcctgcctcctaccacgtggttcccatccgtggtgttcctggccagtggcagggccgcaccagtgccccagccacccctgagatacaggggaggaggggccagtcgcagtctctgagggtggattccttccgggcgggtcctgagggccgaggtcgcagcgcctttccccgccgccgccccactcactacacggtgacagtgccagattcctgctttcccgcgaccaagcccccgctgccccacgccgcctgccactcctgctcagaagacagtggctctgacgtctccagcatctcccaccccacttcgccgggcagcagcagccccgacatctcctttctgcagcctctctcccctcccaagacccatcgtcaccgcggggcctgggtcccagccggcagcagagagctggtcgcccaccaccccaagctactgctgccgcctggctatttcccggcggggcggtacgtggtggtggctgagagccccctgccgcctggcgagtgggagctgtgccgcgcagccccgggccctgcttacgaggaggagggcactcccctgcgctaccagcgtctggtgccctcccgcagccgcatcgtgcggacgccctccctgaaggacagcccggcaggccgggggctcagcaaggccgccgtgtccgaggagctcaagtggtggcacgagcgtgcacgcctccggagcacccgaccccactcactggaccgccaaggagctttccgggtcaggagcctgccccttgggagagagggcttcggacgagccctgggaccccgggcacaggtgcccacagtttgtgtgctgcggagatcgcctgatggggcccctgtgcaagtctttgtacctgaaaaaggagagatcatcagccaggtgtaactctgcgccccacgctggaaaaaactgtttcatagaggggctgggctgagacccccccacccctgagtgcctctttcagctcccccatccccatcgcaggccgatgacctggagctgagaccttttattattttttttttacacgacttttttcagaagccctgacctaaggatttatatatgtggattgtcctcaatacccctgtgatatgattatgttttatcccccagagtttggcctactggacttaaggccttgcctgtctgactgacagcctctatctccttatataagacaagtggcaggggacgagtgaagcagagtgagccaccttgggagttctccaacgctctgtgctctggttctaagaaattccctggggaactgcccctggccctcctgtcccactattgctggaggctggacatggtacatactcatgcacatgactctcccccatttcccaggtctctgggtaccccagcctgggctgggggagaatctcttcccccttttctaatgtgctctgtgatgcacacaccaagtggtaggtcaaaggtcagtatatcccggtggtgtattgtcttgctagaccctgctattttcctgaccccctaaatcctctttagggacccagtcactataccctgtctatgccctgtgggctcccagacccctgagctttgagtcagtggcatcacagtttgtagcctcagggggtctggctgggggctggtccatgcttgtggttagtggacagcagccaccctttgacagctacctctggacatctcaagggcttgcagccccactgctccttctaacattttgtttgtttttgagatggagtctcgctctgtcgcccaggctggaatgctgtagcaagatttcggctcactgcaacccccgtctcccgggttcaagcgaatctcctgcctcagccttctgagtagctgggattacaggtcaggggacctgcttcaatgagaaagcaactgaattgaggctaggagaggtagggagagctgagttctgacttcacctgtgcagaactctctgcccccatgttacctggactggaacagactgtgaatatagcagaaggttccaagaactctggtgtctgacctagaagaggcacagttctctctactggaaagaaaacgatgtagccgattgcacaagggtgccaagggaagacccaggatggcccatcaaaggaacctgggggaggatgcaggaggctgaagggatgcacctggcatttctctcactgtgctcttaccgcatcagcaacccccaacttttgggcctactctgccccccatgcgtgaataccctgcttggatgctgtgcttttccggtttgtctctaagcccctttctccagggcatgttggtttccctggcctctcagtgtcctaactggagcccagagtgccttgttctgagccaggagacggctgagcactggccctccacacctaagcgtcctttacattaacttattggtcttgtataacacctggtgccattgccaagtggctgtgtcctcagctacagagctggaattgtgtggggtttagtgctaaatacttcaataaagtctgttttttgtgattggctgaaaaaaaaaaaa

SEQ ID NO: 444706 - DNA, 2832 bp, Homo sapiens
atgctgcaaatgccgaagttaaatgaaatacctccggggagggcaggccgcagggaggctcggggggagggaagatggcctggacaaacaggtcctgaagctgcgaggctggagtggagggcgcaggggcaggcgggcggcgccagagctccatgggacagctggggaagctccaggctacctacacaacctggcccaggctggtcacggtgtcccccctccctgctctgtgccctctccttccagaaatccaccatggagagtaaggatgaggtcagcgacaccgacagtggcatcatcctgcagtctggccccgacagcccggtctccccaatgaaggagctgacccatgcagtgcacaagcagcagagggccctggaagcgaggctggaggcctgcctggaggagctgaggagactctgccttcgggaagcggagctgacgggcaccttgccagcggagtatcccctcaaaccaggggaaaaggcccccaaggttcgccgcaggatcggagcggcttacaaactggatgactgggccttgcacagagaggaccccctaagcagcctggagcgccagctggccctgcagctgcagatcacagaggcagcccgtcggctgtgcctggaggagaacctcagcaggcaggctcggcggcagcggaagcactccatgctgcaggaggagaagaagctgcaggagctccagcgctgcctggtcgagcggcggcgcaatagcgagccacctccggctgctgctctccccctgggccgagagctcagtgcctctgatgacagctccctgtcagatgggctcctcctggaggaagaggaatcccaagtgccaaaacctcctccagagtctccagccccaccttctcggcctctcccaccccaaacccttgagggtctgcagccaacaggacctgaggctgggagcccagaacgggctccagtccagaacagcccctggaaggaaaccagcctggaccacccctatgagaagcccaggaagtcttctgagccctggagcgagtccagcagcccagccaccacaccacaggatgggcccagtgcctccagcctgtggcttctggagcctgcctcctaccacgtggttcccatccgtggtgttcctggccagtggcagggccgcaccagtgccccagccacccctgagatacaggggaggaggggccagtcgcagtctctgagggtggattccttccgggcgggtcctgagggccgaggtcgcagcgcctttccccgccgccgccccactcactacacggtgacagtgccagattcctgctttcccgcgaccaagcccccgctgccccacgccgcctgccactcctgctcagaagacagtggctctgacgtctccagcatctcccaccccacttcgccgggcagcagcagccccgacatctcctttctgcagcctctctcccctcccaagacccatcgtcaccgcggggcctgggtcccagccggcagcagagagctggtcgcccaccaccccaagctactgctgccgcctggctatttcccggcggggcggtacgtggtggtggctgagagccccctgccgcctggcgagtgggagctgtgccgcgcagccccgggccctgcttacgaggaggagggcactcccctgcgctaccagcgtctggtgccctcccgcagccgcatcgtgcggacgccctccctgaaggacagcccggcaggccgggggctcagcaaggccgccgtgtccgaggagctcaagtggtggcacgagcgtgcacgcctccggagcacccgaccccactcactggaccgccaaggagctttccgggtcaggagcctgccccttgggagagagggcttcggacgagccctgggaccccgggcacaggtgcccacagtttgtgtgctgcggagatcgcctgatggggcccctgtgcaagtctttgtacctgaaaaaggagagatcatcagccaggtgtaactctgcgccccacgctggaaaaaactgtttcatagaggggctgggctgagacccccccacccctgagtgcctctttcagctcccccatccccatcgcaggccgatgacctggagctgagaccttttattattttttttttacacgacttttttcagaagccctgacctaaggatttatatatgtggattgtcctcaatacccctgtgatatgattatgttttatcccccagagtttggcctactggacttaaggccttgcctgtctgactgacagcctctatctccttatataagacaagtggcaggggacgagtgaagcagagtgagccaccttgggagttctccaacgctctgtgctctggttctaagaaattccctggggaactgcccctggccctcctgtcccactattgctggaggctggacatggtacatactcatgcacatgactctcccccatttcccaggtctctgggtaccccagcctgggctgggggagaatctcttcccccttttctaatgtgctctgtgatgcacacaccaagtggtaggtcaaaggtcagtatatcccggtggtgtattgtcttgctagaccctgctattttcctgaccccctaaatcctctttagggacccaagtgccttgttctgagccaggagacggctgagcactggccctccacacctaagcgtcctttacattaacttattggtcttgtataacacctggtgccattgccaagtggctgtgtcctcagctacagagctggaattgtgtggggtttagtgctaaatacttcaataaagtctgttttttgtgattggctgaaaaaaaaaaaa

SEQ ID NO: 444707 - DNA, 2914 bp, Homo sapiens
acattgaatcattgattcctaaaggattatcagagtttacaaaacagcaaatacgctacattctgcagatgaggggtatgtctgataagtcactccgactagtgctgtccacatttagcaacatacgggaggagcttggacatcttcaaaatgatttgacatcactggaaaatgacaagatgagacttgagaaagatttatcattcaaagacactcaattaaaagagtacgaagaactcttggcatcagtgagagcaaataatcaccagcagcagcaaggacttcaagactcaagttcaaaatgccaggcattggaagaaaacaatctctctcttcgacatacactatcagacatggaatacagactaaaagaactggaatattgtaaacgtaatttagagcaagagaatcaaaaccttagaatgcaggtttctgagacttgcacaggcccaatgttgcaggctaaaatggatgagattggcaaccactacacggagatggtaaaaaacttgagaatggagaaagatagagagatctgcagactgaggtcccaattaaaccagtaccataaagatgtttcaaagagagaaggaagttgtagtgacttccaatttaagcttcatgaactgacaagcttgctggaagagaaggattccctcataaagcgtcagtcagaggaactctccaagttgcggcaagaaatatattcctctcataaccaaccctccactggtggaaggactactattaccactaaaaagtacaggacacaatatccaatcctaggcctcctatatgatgactacgaatatataccaccaggtagtgaaacacagactattgtgattgagaaaacagaagacaaatacacttgtccatgaatggatccactttaaagtattacaactcaaagccgttttttttgtgtgtgtgtgtctctgcattagtactttgttatttttccatcactaaaggccaatcagaatttggaaccatgctgctacccaagaaatctaatggaatgaattagttctgtagatgacaatttcttcacccatttatgagacctaaatcttttccataacactcatgtattcagtataacaacatactaactgaaagagggacctgattgtttaaagtttgattgcagacactgtagaacataactcattatgtttcagataaggtaactcctagatatcaaactaatttgttggggtagagattttacaagtcatgccattagaagattttctctgatattatatgtgcagttcagttacaagatgaaatcatgtttttttaacaaaagagataaaatacaattgaagcaaaaaataacagctagtatataatatatacagtctgtatttgcttttcacagtaggcctgatgactaaaagatatgctttattacacgctattttcacctcttgaaagtcaaaggtgatgattaatttcatttagcagggaagtggaataatatcttttgaaataactaagtccactaaattatacagtatgctattctggttctaagtacatattagtcccttggcaaatctgttctttcaaagcataccttccccaaatgagcctacctacttcttaaaaaacatataacacaatgtggtagtagtaggtgtaaggaaggtaagttttttcatagtggtatgcaaacatatcattgaaatattacatagatataaagacttagggaataaaaatagcagcaacaaatacttgatagatttatcctacttgggagaaatattttgtagcagagtatttagtatacttagaagttgatttagcaattaggctttaatgaccttacaaagtgaacataactgaacacaagtattttttcaatgcaagatgaggatgaaaattttacatttcaacccatctggctaaagttaagacttagcaaaaattaaaatgttgcctttgtccaagtatagattaaggcaacaaacatatttgggtgtgtaatttgaagttttggactgaaatatctttgcaagtatccacataaaattctgtaatgccttataattatattctaataattatgcattatactaagacaccattaagaacagttgaggcactacactaaatcaaaccataaatgaggaaaaaacttttaatgttcttttctagaagtgttcaaataggtcttgatatgaagctaaaagccttatttatattatcttaatatttcggctaaaatgttaagctccataacatgaattgatacaattccaattttatcaatattttgtgatagaaaaatgttaatattattcatgagctatacagtccttacattttttcccttggtgtaggaacaacggaggagtttctcctctgctaactattcatatatgtaactgtaacaaaagtgtactatgttatgcacacattacaaataatataaggggaagttttattagcttagtaggaaattgttattattaaggtttaaaaatgagaacaggtgtgagttttccaaaatacttaaaaataatagtgtcaaaaattcaggggcagttaaggagtcatggatggaactagaggtcactatattaagtgacataagccagaaacagacaaacattgcatgttctcaattatttgcgggatctaaaagtcaaaacaattgaactcatggatatagagagtagaaggatggttactagtggctgggaaaaggggtgtgcgaggggaactggggatgcttaatgtgtacaaaaactatgtagttagaaagtataaataagacctagtatttgatagcacaaccgggtgagtatagtcaataatagcttaattgtacaaataactaagagtataattggattgtttgtaacacaaataaatacttgagtggatggatacccaattc

SEQ ID NO: 444708 - DNA, 2824 bp, Homo sapiens
gtaggctgcctgaggatcccaggcaaagctcctaccgggaggagcttggacatcttcaaaatgatatgacatcactggaaaatgacaagatgagacttgagaaagatttatcattcaaagacactcaattaaaagagtacgaagaactcttggcatcagtgagagcaaataatcaccagcagcagcaaggacttcaagactcaagttcaaaatgccaggcattggaagaaaacaatctctctcttcgacatacactatcagacatggaatacagactaaaagaactggaatattgtaaacgtaatttagagcaagagaatcaaaaccttagaatgcaggtttctgagacttgcacaggcccaatgttgcaggctaaaatggatgagattggcaaccactacacggagatggtaaaaaacttgagaatggagaaagatagagagatctgcagactgaggtcccaattaaaccagtaccataaagatgtttcaaagagagaaggaagttgtagtgacttccaatttaagcttcatgaactgacaagcttgctggaagagaaggattccctcataaagcgtcagtcagaggaactctccaagttgcggcaagaaatatattcctctcataaccaaccctccactggtggaaggactactattaccactaaaaagtacaggacacaatatccaatcctaggcctcctatatgatgactacgaatatataccaccaggtagtgaaacacagactattgtgattgagaaaacagaagacaaatacacttgtccatgaatggatccactttaaagtattacaactcaaagccgttttttttgtgtgtgtgtgtctctgcattagtactttgttatttttccatcactaaaggccaatcagaatttggaaccatgctgctacccaagaaatctaatggaatgaattagttctgtagatgacaatttcttcacccatttatgagacctaaatcttttccataacactcatgtattcagtataacaacatactaactgaaagagggacctgattgtttaaagtttgattgcagacactgtagaacataactcattatgtttcagataaggtaactcctagatatcaaactaatttgttggggtagagattttacaagtcatgccattagaagattttctctgatattatatgtgcagttcagttacaagatgaaatcatgtttttttaacaaaagagataaaatacaattgaagcaaaaaataacagctagtatataatatatacagtctgtatttgcttttcacagtaggcctgatgactaaaagatatgctttattacacgctattttcacctcttgaaagtcaaaggtgatgattaatttcatttagcagggaagtggaataatatcttttgaaataactaagtccactaaattatacagtatgctattctggttctaagtacatattagtcccttggcaaatctgttctttcaaagcataccttccccaaatgagcctacctacttcttaaaaaacatataacacaatgtggtagtagtaggtgtaaggaaggtaagttttttcatagtggtatgcaaacatatcattgaaatattacatagatataaagacttagggaataaaaatagcagcaacaaatacttgatagatttatcctacttgggagaaatattttgtagcagagtatttagtatacttagaagttgatttagcaattaggctttaatgaccttacaaagtgaacataactgaacacaagtattttttcaatgcaagatgaggatgaaaattttacatttcaacccatctggctaaagttaagacttagcaaaaattaaaatgttgcctttgtccaagtatagattaaggcaacaaacatatttgggtgtgtaatttgaagttttggactgaaatatctttgcaagtatccacataaaattctgtaatgccttataattatattctaataattatgcattatactaagacaccattaagaacagttgaggcactacactaaatcaaaccataaatgaggaaaaaacttttaatgttcttttctagaagtgttcaaataggtcttgatatgaagctaaaagccttatttatattatcttaatatttcggctaaaatgttaagctccataacatgaattgatacaattccaattttatcaatattttgtgatagaaaaatgttaatattattcatgagctatacagtccttacattttttcccttggtgtaggaacaacggaggagtttctcctctgctaactattcatatatgtaactgtaacaaaagtgtactatgttatgcacacattacaaataatataaggggaagttttattagcttagtaggaaattgttattattaaggtttaaaaatgagaacaggtgtgagttttccaaaatacttaaaaataatagtgtcaaaaattcaggggcagttaaggagtcatggatggaactagaggtcactatattaagtgacataagccagaaacagacaaacattgcatgttctcaattatttgcgggatctaaaagtcaaaacaattgaactcatggatatagagagtagaaggatggttactagtggctgggaaaaggggtgtgcgaggggaactggggatgcttaatgtgtacaaaaactatgtagttagaaagtataaataagacctagtatttgatagcacaaccgggtgagtatagtcaataatagcttaattgtacaaataactaagagtataattggattgtttgtaacacaaataaatacttgagtggatggatacccaattc

SEQ ID NO: 444709 - DNA, 1418 bp, Homo sapiens
acattgaatcattgattcctaaaggattatcagagtttacaaaacagcaaatacgctacattctgcagatgaggggtatgtctgataagtcactccgactagtgctgtccacatttagcaacatacgggaggagcttggacatcttcaaaatgatttgacatcactggaaaatgacaagatgagacttgagaaagatttatcattcaaagacactcaattaaaagagtacgaagaactcttggcatcagtgagagcaaataatcaccagcagcagcaaggacttcaagactcaagttcaaaatgccaggcattggaagaaaacaatctctctcttcgacatacactatcagacatggaatacagactaaaagaactggaatattgtaaacgtaatttagagcaagagaatcaaaaccttagaatgcaggtttctgagacttgcacaggcccaatgttgcaggctaaaatggatgagattggcaaccactacacggagatggtaaaaaacttgagaatggagaaagatagagagatctgcagactgaggtcccaattaaaccagtaccataaagatgtttcaaagagagaaggaagttgtagtgacttccaatttaagcttcatgaactgacaagcttgctggaagagaaggattccctcataaagcgtcagtcagaggaactctccaagttgcggcaagaaatatattcctctcataaccaaccctccactggtggaaggactactattaccactaaaaagtacaggacacaatatccaatcctaggcctcctatatgatgactacgaatatataccaccaggtagtgaaacacagactattgtgattgagaaaacagaagacaaatacacttgtccatgaatggatccactttaaagtattacaactcaaagccgttttttttgtgtgtgtgtgtctctgcattagtactttgttatttttccatcactaaaggccaatcagaatttggaaccatgctgctacccaagaaatctaatggaatgaattagttctgtagatgacaatttcttcacccatttatgagacctaaatcttttccataacactcatgtattcagtataacaacatactaactgaaagagggacctgattgtttaaagtttgattgcagacactgtagaacataactcattatgtttcagataaggtaactcctagatatcaaactaatttgttggggtagagattttacaagtcatgccattagaagattttctctgatattatatgtgcagttcagttacaagatgaaatcatgtttttttaacaaaagagataaaatacaattgaagcaaaaaataacagctagtatataatatatacagtctgtatttgcttttcacagtaggagctttgcctgggaacctctagggcga

SEQ ID NO: 444710 - DNA, 3568 bp, Homo sapiens
ggtggctccattttccatttgagctcaaatattttgctgcttcctctgtagctgccagacctgctcttgctgctgctcaggtagaacatctgggaggtcccttgctgaccactggaagaagatgagctcgagctattggagtgagacgagcagcagcagctgtggaacccagcagctcccagaggtgctgcagtgccagccccagcattaccactgctaccatcagtcaagccaagcccagcagcctccagaaaaaaatgtagtgtatgagcgagtgaggacctacagtgggcccatgaacaaggtggtgcaggccttggaccccttcaactcacgggaagtgctctcccctctcaaaaccacctcctcctaccaaaatttggtttggagcgaccattctcaggaactccattctccaactttaaaaatatctacatgtgccccaagtactctacatataacccaaaatactgaacaggaacttcattctccaacagtgaaacttactacatatccacagaccactattaggaaatatgtagtacaaaatcctgaacaggaaccactgtctcaattcctaagaggaagccatttcttcccaggaaacaatgttatttatgaaaaaacaataagaaaagtggagaagctaaatactgatcaggggtgccatcctcaggctcaatgccatcatcacattatccaacagccccaggtcatccactctgcacactggcaacaacctgattctagccagcaaatccaagccatcacaggaaataatccaatttctacacatattggaaatgaactgtgccatagtggatcaagccagatttgtgagcaggtgataattcaggatgatggccctgaaaaattggaccccagatattttggagagttgcttgctgatctgagccgtaagaatacggatctatatcactgcttattagaacatttgcagagaattggaagaaaacaatctctctcttcgacatacactatcagacatggaatacagactaaaagaactggaatattgtaaacgtaatttagagcaagagaatcaaaaccttagaatgcaggtttctgagacttgcacaggcccaatgttgcaggctaaaatggatgagattggcaaccactacacggagatggtaaaaaacttgagaatggagaaagatagagagatctgcagactgaggtcccaattaaaccagtaccataaagatgtttcaaagagagaaggaagttgtagtgacttccaatttaagcttcatgaactgacaagcttgctggaagagaaggattccctcataaagcgtcagtcagaggaactctccaagttgcggcaagaaatatattcctctcataaccaaccctccactggtggaaggactactattaccactaaaaagtacaggacacaatatccaatcctaggcctcctatatgatgactacgaatatataccaccaggtagtgaaacacagactattgtgattgagaaaacagaagacaaatacacttgtccatgaatggatccactttaaagtattacaactcaaagccgttttttttgtgtgtgtgtgtctctgcattagtactttgttatttttccatcactaaaggccaatcagaatttggaaccatgctgctacccaagaaatctaatggaatgaattagttctgtagatgacaatttcttcacccatttatgagacctaaatcttttccataacactcatgtattcagtataacaacatactaactgaaagagggacctgattgtttaaagtttgattgcagacactgtagaacataactcattatgtttcagataaggtaactcctagatatcaaactaatttgttggggtagagattttacaagtcatgccattagaagattttctctgatattatatgtgcagttcagttacaagatgaaatcatgtttttttaacaaaagagataaaatacaattgaagcaaaaaataacagctagtatataatatatacagtctgtatttgcttttcacagtaggcctgatgactaaaagatatgctttattacacgctattttcacctcttgaaagtcaaaggtgatgattaatttcatttagcagggaagtggaataatatcttttgaaataactaagtccactaaattatacagtatgctattctggttctaagtacatattagtcccttggcaaatctgttctttcaaagcataccttccccaaatgagcctacctacttcttaaaaaacatataacacaatgtggtagtagtaggtgtaaggaaggtaagttttttcatagtggtatgcaaacatatcattgaaatattacatagatataaagacttagggaataaaaatagcagcaacaaatacttgatagatttatcctacttgggagaaatattttgtagcagagtatttagtatacttagaagttgatttagcaattaggctttaatgaccttacaaagtgaacataactgaacacaagtattttttcaatgcaagatgaggatgaaaattttacatttcaacccatctggctaaagttaagacttagcaaaaattaaaatgttgcctttgtccaagtatagattaaggcaacaaacatatttgggtgtgtaatttgaagttttggactgaaatatctttgcaagtatccacataaaattctgtaatgccttataattatattctaataattatgcattatactaagacaccattaagaacagttgaggcactacactaaatcaaaccataaatgaggaaaaaacttttaatgttcttttctagaagtgttcaaataggtcttgatatgaagctaaaagccttatttatattatcttaatatttcggctaaaatgttaagctccataacatgaattgatacaattccaattttatcaatattttgtgatagaaaaatgttaatattattcatgagctatacagtccttacattttttcccttggtgtaggaacaacggaggagtttctcctctgctaactattcatatatgtaactgtaacaaaagtgtactatgttatgcacacattacaaataatataaggggaagttttattagcttagtaggaaattgttattattaaggtttaaaaatgagaacaggtgtgagttttccaaaatacttaaaaataatagtgtcaaaaattcaggggcagttaaggagtcatggatggaactagaggtcactatattaagtgacataagccagaaacagacaaacattgcatgttctcaattatttgcgggatctaaaagtcaaaacaattgaactcatggatatagagagtagaaggatggttactagtggctgggaaaaggggtgtgcgaggggaactggggatgcttaatgtgtacaaaaactatgtagttagaaagtataaataagacctagtatttgatagcacaaccgggtgagtatagtcaataatagcttaattgtacaaataactaagagtataattggattgtttgtaacacaaataaatacttgagtggatggatacccaattc

SEQ ID NO: 444711 - DNA, 5928 bp, Homo sapiens
ccaggcggcgttgcggccccggccccggctccctgcgccgccgccgccgccgccgccgccgccgccgccgccgccgccagcgctagcgccagcagccgggcccgatcacccgccgcccggtgcccgccgccgcccgcgccagcaaccgggcccgatcacccgccgcccggtgcccgccgccgcccgcgccaccggcatggcgctccggggcttctgcagcgccgatggctccgacccgctctgggactggaatgtcacgtggaataccagcaaccccgacttcaccaagtgctttcagaacacggtcctcgtgtgggtgccttgtttttacctctgggcctgtttccccttctacttcctctatctctcccgacatgaccgaggctacattcagatgacacctctcaacaaaaccaaaactgccttgggatttttgctgtggatcgtctgctgggcagacctcttctactctttctgggaaagaagtcggggcatattcctggccccagtgtttctggtcagcccaactctcttgggcatcaccacgctgcttgctacctttttaattcagctggagaggaggaagggagttcagtcttcagggatcatgctcactttctggctggtagccctagtgtgtgccctagccatcctgagatccaaaattatgacagccttaaaagaggatgcccaggtggacctgtttcgtgacatcactttctacgtctacttttccctcttactcattcagctcgtcttgtcctgtttctcagatcgctcacccctgttctcggaaaccatccacgaccctaatccctgcccagagtccagcgcttccttcctgtcgaggatcaccttctggtggatcacagggttgattgtccggggctaccgccagcccctggagggcagtgacctctggtccttaaacaaggaggacacgtcggaacaagtcgtgcctgttttggtaaagaactggaagaaggaatgcgccaagactaggaagcagccggtgaaggttgtgtactcctccaaggatcctgcccagccgaaagagagttccaaggtggatgcgaatgaggaggtggaggctttgatcgtcaagtccccacagaaggagtggaacccctctctgtttaaggtgttatacaagacctttgggccctacttcctcatgagcttcttcttcaaggccatccacgacctgatgatgttttccgggccgcagatcttaaagttgctcatcaagttcgtgaatgacacgaaggccccagactggcagggctacttctacaccgtgctgctgtttgtcactgcctgcctgcagaccctcgtgctgcaccagtacttccacatctgcttcgtcagtggcatgaggatcaagaccgctgtcattggggctgtctatcggaaggccctggtgatcaccaattcagccagaaaatcctccacggtcggggagattgtcaacctcatgtctgtggacgctcagaggttcatggacttggccacgtacattaacatgatctggtcagcccccctgcaagtcatccttgctctctacctcctgtggctgaatctgggcccttccgtcctggctggagtggcggtgatggtcctcatggtgcccgtcaatgctgtgatggcgatgaagaccaagacgtatcaggtggcccacatgaagagcaaagacaatcggatcaagctgatgaacgaaattctcaatgggatcaaagtgctaaagctttatgcctgggagctggcattcaaggacaaggtgctggccatcaggcaggaggagctgaaggtgctgaagaagtctgcctacctgtcagccgtgggcaccttcacctgggtctgcacgccctttctggtggccttgtgcacatttgccgtctacgtgaccattgacgagaacaacatcctggatgcccagacagccttcgtgtctttggccttgttcaacatcctccggtttcccctgaacattctccccatggtcatcagcagcatcgtgcaggcgagtgtctccctcaaacgcctgaggatctttctctcccatgaggagctggaacctgacagcatcgagcgacggcctgtcaaagacggcgggggcacgaacagcatcaccgtgaggaatgccacattcacctgggccaggagcgaccctcccacactgaatggcatcaccttctccatccccgaaggtgctttggtggccgtggtgggccaggtgggctgcggaaagtcgtccctgctctcagccctcttggctgagatggacaaagtggaggggcacgtggctatcaagggctccgtggcctatgtgccacagcaggcctggattcagaatgattctctccgagaaaacatcctttttggatgtcagctggaggaaccatattacaggtccgtgatacaggcctgtgccctcctcccagacctggaaatcctgcccagtggggatcggacagagattggcgagaagggcgtgaacctgtctgggggccagaagcagcgcgtgagcctggcccgggccgtgtactccaacgctgacatttacctcttcgatgatcccctctcagcagtggatgcccatgtgggaaaacacatctttgaaaatgtgattggccccaaggggatgctgaagaacaagacgcggatcttggtcacgcacagcatgagctacttgccgcaggtggacgtcatcatcgtcatgagtggcggcaagatctctgagatgggctcctaccaggagctgctggctcgagacggcgccttcgctgagttcctgcgtacctatgccagcacagagcaggagcaggatgcagaggagaacggggtcacgggcgtcagcggtccagggaaggaagcaaagcaaatggagaatggcatgctggtgacggacagtgcagggaagcaactgcagagacagctcagcagctcctcctcctatagtggggacatcagcaggcaccacaacagcaccgcagaactgcagaaagctgaggccaagaaggaggagacctggaagctgatggaggctgacaaggcgcagacagggcaggtcaagctttccgtgtactgggactacatgaaggccatcggactcttcatctccttcctcagcatcttccttttcatgtgtaaccatgtgtccgcgctggcttccaactattggctcagcctctggactgatgaccccatcgtcaacgggactcaggagcacacgaaagtccggctgagcgtctatggagccctgggcatttcacaagggatcgccgtgtttggctactccatggccgtgtccatcggggggatcttggcttcccgctgtctgcacgtggacctgctgcacagcatcctgcggtcacccatgagcttctttgagcggacccccagtgggaacctggtgaaccgcttctccaaggagctggacacagtggactccatgatcccggaggtcatcaagatgttcatgggctccctgttcaacgtcattggtgcctgcatcgttatcctgctggccacgcccatcgccgccatcatcatcccgccccttggcctcatctacttcttcgtccagaggttctacgtggcttcctcccggcagctgaagcgcctcgagtcggtcagccgctccccggtctattcccatttcaacgagaccttgctgggggtcagcgtcattcgagccttcgaggagcaggagcgcttcatccaccagagtgacctgaaggtggacgagaaccagaaggcctattaccccagcatcgtggccaacaggtggctggccgtgcggctggagtgtgtgggcaactgcatcgttctgtttgctgccctgtttgcggtgatctccaggcacagcctcagtgctggcttggtgggcctctcagtgtcttactcattgcaggtcaccacgtacttgaactggctggttcggatgtcatctgaaatggaaaccaacatcgtggccgtggagaggctcaaggagtattcagagactgagaaggaggcgccctggcaaatccaggagacagctccgcccagcagctggccccaggtgggccgagtggaattccggaactactgcctgcgctaccgagaggacctggacttcgttctcaggcacatcaatgtcacgatcaatgggggagaaaaggtcggcatcgtggggcggacgggagctgggaagtcgtccctgaccctgggcttatttcggatcaacgagtctgccgaaggagagatcatcatcgatggcatcaacatcgccaagatcggcctgcacgacctccgcttcaagatcaccatcatcccccaggaccctgttttgttttcgggttccctccgaatgaacctggacccattcagccagtactcggatgaagaagtctggacgtccctggagctggcccacctgaaggacttcgtgtcagcccttcctgacaagctagaccatgaatgtgcagaaggcggggagaacctcagtgtcgggcagcgccagcttgtgtgcctagcccgggccctgctgaggaagacgaagatccttgtgttggatgaggccacggcagccgtggacctggaaacggacgacctcatccagtccaccatccggacacagttcgaggactgcaccgtcctcaccatcgcccaccggctcaacaccatcatggactacacaagggtgatcgtcttggacaaaggagaaatccaggagtacggcgccccatcggacctcctgcagcagagaggtcttttctacagcatggccaaagacgccggcttggtgtgagccccagagctggcatatctggtcagaactgcagggcctatatgccagcgcccagggaggagtcagtacccctggtaaaccaagcctcccacactgaaaccaaaacataaaaaccaaacccagacaaccaaaacatattcaaagcagcagccaccgccatccggtcccctgcctggaactggctgtgaagacccaggagagacagagatgcgaaccacccaaaacacgcacaccctgcccctggtgccctgagacagacacacagcctcacgcccccaggaatgcaagtggtttcctggtgcttcccacggaggagttttggcagccagacttctggaggaattggttgtatagaagatcctagtgaccaaattcagcctactgcctcggatctctccagccgaagtctgtggactgcaagtctttgagatgcttctggctcccatcacctctaacatccttgtctgggtctaccaggaacgcttcatttccttggggctgcagttttgtggttgaggggcctggagaaaatcattttctccccttggcagtgtcccagggccctggatggtcctcttaccaacatctggtcttccaggcactcaaaagctgggaaccagcatctcagcgccagctctaccagttctcgttttgggccagaggcagcctctgcactcccacgcctgtcctcctggaagggacctggttggactaacggctaacctggacctggaactgtagggccaggggattgtctcagggccgacgttccacctggggcttccctccccacccaccccgactccaggctttcccttttttcttttgttcaacattgtaagaacaatcaatgctgttattactgatcccaccatgattgatgtggggtaaatattaaggagatggcctcatgggaatttgaccttgactagaaatagagactgagagtgagcaaccagctggaaggtactatgccagtcctagcagaaaaatgtgttaggggcctggcccaaagcagtgttggttgcttacagtgttgattgattttgttcttttttcttaccacctcttttctttccctctcatggtacctgctcatggttatgaagctttcaaagtaaagaacacgaaatacc

SEQ ID NO: 444712 - DNA, 5802 bp, Homo sapiens
ccaggcggcgttgcggccccggccccggctccctgcgccgccgccgccgccgccgccgccgccgccgccgccgccgccagcgctagcgccagcagccgggcccgatcacccgccgcccggtgcccgccgccgcccgcgccagcaaccgggcccgatcacccgccgcccggtgcccgccgccgcccgcgccaccggcatggcgctccggggcttctgcagcgccgatggctccgacccgctctgggactggaatgtcacgtggaataccagcaaccccgacttcaccaagtgctttcagaacacggtcctcgtgtgggtgccttgtttttacctctgggcctgtttccccttctacttcctctatctctcccgacatgaccgaggctacattcagatgacacctctcaacaaaaccaaaactgccttgggatttttgctgtggatcgtctgctgggcagacctcttctactctttctgggaaagaagtcggggcatattcctggccccagtgtttctggtcagcccaactctcttgggcatcaccacgctgcttgctacctttttaattcagctggagaggaggaagggagttcagtcttcagggatcatgctcactttctggctggtagccctagtgtgtgccctagccatcctgagatccaaaattatgacagccttaaaagagaatccctgcccagagtccagcgcttccttcctgtcgaggatcaccttctggtggatcacagggttgattgtccggggctaccgccagcccctggagggcagtgacctctggtccttaaacaaggaggacacgtcggaacaagtcgtgcctgttttggtaaagaactggaagaaggaatgcgccaagactaggaagcagccggtgaaggttgtgtactcctccaaggatcctgcccagccgaaagagagttccaaggtggatgcgaatgaggaggtggaggctttgatcgtcaagtccccacagaaggagtggaacccctctctgtttaaggtgttatacaagacctttgggccctacttcctcatgagcttcttcttcaaggccatccacgacctgatgatgttttccgggccgcagatcttaaagttgctcatcaagttcgtgaatgacacgaaggccccagactggcagggctacttctacaccgtgctgctgtttgtcactgcctgcctgcagaccctcgtgctgcaccagtacttccacatctgcttcgtcagtggcatgaggatcaagaccgctgtcattggggctgtctatcggaaggccctggtgatcaccaattcagccagaaaatcctccacggtcggggagattgtcaacctcatgtctgtggacgctcagaggttcatggacttggccacgtacattaacatgatctggtcagcccccctgcaagtcatccttgctctctacctcctgtggctgaatctgggcccttccgtcctggctggagtggcggtgatggtcctcatggtgcccgtcaatgctgtgatggcgatgaagaccaagacgtatcaggtggcccacatgaagagcaaagacaatcggatcaagctgatgaacgaaattctcaatgggatcaaagtgctaaagctttatgcctgggagctggcattcaaggacaaggtgctggccatcaggcaggaggagctgaaggtgctgaagaagtctgcctacctgtcagccgtgggcaccttcacctgggtctgcacgccctttctggtggccttgtgcacatttgccgtctacgtgaccattgacgagaacaacatcctggatgcccagacagccttcgtgtctttggccttgttcaacatcctccggtttcccctgaacattctccccatggtcatcagcagcatcgtgcaggcgagtgtctccctcaaacgcctgaggatctttctctcccatgaggagctggaacctgacagcatcgagcgacggcctgtcaaagacggcgggggcacgaacagcatcaccgtgaggaatgccacattcacctgggccaggagcgaccctcccacactgaatggcatcaccttctccatccccgaaggtgctttggtggccgtggtgggccaggtgggctgcggaaagtcgtccctgctctcagccctcttggctgagatggacaaagtggaggggcacgtggctatcaagggctccgtggcctatgtgccacagcaggcctggattcagaatgattctctccgagaaaacatcctttttggatgtcagctggaggaaccatattacaggtccgtgatacaggcctgtgccctcctcccagacctggaaatcctgcccagtggggatcggacagagattggcgagaagggcgtgaacctgtctgggggccagaagcagcgcgtgagcctggcccgggccgtgtactccaacgctgacatttacctcttcgatgatcccctctcagcagtggatgcccatgtgggaaaacacatctttgaaaatgtgattggccccaaggggatgctgaagaacaagacgcggatcttggtcacgcacagcatgagctacttgccgcaggtggacgtcatcatcgtcatgagtggcggcaagatctctgagatgggctcctaccaggagctgctggctcgagacggcgccttcgctgagttcctgcgtacctatgccagcacagagcaggagcaggatgcagaggagaacggggtcacgggcgtcagcggtccagggaaggaagcaaagcaaatggagaatggcatgctggtgacggacagtgcagggaagcaactgcagagacagctcagcagctcctcctcctatagtggggacatcagcaggcaccacaacagcaccgcagaactgcagaaagctgaggccaagaaggaggagacctggaagctgatggaggctgacaaggcgcagacagggcaggtcaagctttccgtgtactgggactacatgaaggccatcggactcttcatctccttcctcagcatcttccttttcatgtgtaaccatgtgtccgcgctggcttccaactattggctcagcctctggactgatgaccccatcgtcaacgggactcaggagcacacgaaagtccggctgagcgtctatggagccctgggcatttcacaagggatcgccgtgtttggctactccatggccgtgtccatcggggggatcttggcttcccgctgtctgcacgtggacctgctgcacagcatcctgcggtcacccatgagcttctttgagcggacccccagtgggaacctggtgaaccgcttctccaaggagctggacacagtggactccatgatcccggaggtcatcaagatgttcatgggctccctgttcaacgtcattggtgcctgcatcgttatcctgctggccacgcccatcgccgccatcatcatcccgccccttggcctcatctacttcttcgtccagaggttctacgtggcttcctcccggcagctgaagcgcctcgagtcggtcagccgctccccggtctattcccatttcaacgagaccttgctgggggtcagcgtcattcgagccttcgaggagcaggagcgcttcatccaccagagtgacctgaaggtggacgagaaccagaaggcctattaccccagcatcgtggccaacaggtggctggccgtgcggctggagtgtgtgggcaactgcatcgttctgtttgctgccctgtttgcggtgatctccaggcacagcctcagtgctggcttggtgggcctctcagtgtcttactcattgcaggtcaccacgtacttgaactggctggttcggatgtcatctgaaatggaaaccaacatcgtggccgtggagaggctcaaggagtattcagagactgagaaggaggcgccctggcaaatccaggagacagctccgcccagcagctggccccaggtgggccgagtggaattccggaactactgcctgcgctaccgagaggacctggacttcgttctcaggcacatcaatgtcacgatcaatgggggagaaaaggtcggcatcgtggggcggacgggagctgggaagtcgtccctgaccctgggcttatttcggatcaacgagtctgccgaaggagagatcatcatcgatggcatcaacatcgccaagatcggcctgcacgacctccgcttcaagatcaccatcatcccccaggaccctgttttgttttcgggttccctccgaatgaacctggacccattcagccagtactcggatgaagaagtctggacgtccctggagctggcccacctgaaggacttcgtgtcagcccttcctgacaagctagaccatgaatgtgcagaaggcggggagaacctcagtgtcgggcagcgccagcttgtgtgcctagcccgggccctgctgaggaagacgaagatccttgtgttggatgaggccacggcagccgtggacctggaaacggacgacctcatccagtccaccatccggacacagttcgaggactgcaccgtcctcaccatcgcccaccggctcaacaccatcatggactacacaagggtgatcgtcttggacaaaggagaaatccaggagtacggcgccccatcggacctcctgcagcagagaggtcttttctacagcatggccaaagacgccggcttggtgtgagccccagagctggcatatctggtcagaactgcagggcctatatgccagcgcccagggaggagtcagtacccctggtaaaccaagcctcccacactgaaaccaaaacataaaaaccaaacccagacaaccaaaacatattcaaagcagcagccaccgccatccggtcccctgcctggaactggctgtgaagacccaggagagacagagatgcgaaccacccaaaacacgcacaccctgcccctggtgccctgagacagacacacagcctcacgcccccaggaatgcaagtggtttcctggtgcttcccacggaggagttttggcagccagacttctggaggaattggttgtatagaagatcctagtgaccaaattcagcctactgcctcggatctctccagccgaagtctgtggactgcaagtctttgagatgcttctggctcccatcacctctaacatccttgtctgggtctaccaggaacgcttcatttccttggggctgcagttttgtggttgaggggcctggagaaaatcattttctccccttggcagtgtcccagggccctggatggtcctcttaccaacatctggtcttccaggcactcaaaagctgggaaccagcatctcagcgccagctctaccagttctcgttttgggccagaggcagcctctgcactcccacgcctgtcctcctggaagggacctggttggactaacggctaacctggacctggaactgtagggccaggggattgtctcagggccgacgttccacctggggcttccctccccacccaccccgactccaggctttcccttttttcttttgttcaacattgtaagaacaatcaatgctgttattactgatcccaccatgattgatgtggggtaaatattaaggagatggcctcatgggaatttgaccttgactagaaatagagactgagagtgagcaaccagctggaaggtactatgccagtcctagcagaaaaatgtgttaggggcctggcccaaagcagtgttggttgcttacagtgttgattgattttgttcttttttcttaccacctcttttctttccctctcatggtacctgctcatggttatgaagctttcaaagtaaagaacacgaaatacc

SEQ ID NO: 444713 - DNA, 5751 bp, Homo sapiens
ccaggcggcgttgcggccccggccccggctccctgcgccgccgccgccgccgccgccgccgccgccgccgccgccgccagcgctagcgccagcagccgggcccgatcacccgccgcccggtgcccgccgccgcccgcgccagcaaccgggcccgatcacccgccgcccggtgcccgccgccgcccgcgccaccggcatggcgctccggggcttctgcagcgccgatggctccgacccgctctgggactggaatgtcacgtggaataccagcaaccccgacttcaccaagtgctttcagaacacggtcctcgtgtgggtgccttgtttttacctctgggcctgtttccccttctacttcctctatctctcccgacatgaccgaggctacattcagatgacacctctcaacaaaaccaaaactgccttgggatttttgctgtggatcgtctgctgggcagacctcttctactctttctgggaaagaagtcggggcatattcctggccccagtgtttctggtcagcccaactctcttgggcatcaccacgctgcttgctacctttttaattcagctggagaggaggaagggagttcagtcttcagggatcatgctcactttctggctggtagccctagtgtgtgccctagccatcctgagatccaaaattatgacagccttaaaagaggatgcccaggtggacctgtttcgtgacatcactttctacgtctacttttccctcttactcattcagctcgtcttgtcctgtttctcagatcgctcacccctgttctcggaaaccatccacgaccctaatccctgcccagagtccagcgcttccttcctgtcgaggatcaccttctggtggatcacagggttgattgtccggggctaccgccagcccctggagggcagtgacctctggtccttaaacaaggaggacacgtcggaacaagtcgtgcctgttttggtaaagaactggaagaaggaatgcgccaagactaggaagcagccggtgaaggttgtgtactcctccaaggatcctgcccagccgaaagagagttccaaggtggatgcgaatgaggaggtggaggctttgatcgtcaagtccccacagaaggagtggaacccctctctgtttaaggtgttatacaagacctttgggccctacttcctcatgagcttcttcttcaaggccatccacgacctgatgatgttttccgggccgcagatcttaaagttgctcatcaagttcgtgaatgacacgaaggccccagactggcagggctacttctacaccgtgctgctgtttgtcactgcctgcctgcagaccctcgtgctgcaccagtacttccacatctgcttcgtcagtggcatgaggatcaagaccgctgtcattggggctgtctatcggaaggccctggtgatcaccaattcagccagaaaatcctccacggtcggggagattgtcaacctcatgtctgtggacgctcagaggttcatggacttggccacgtacattaacatgatctggtcagcccccctgcaagtcatccttgctctctacctcctgtggctgaatctgggcccttccgtcctggctggagtggcggtgatggtcctcatggtgcccgtcaatgctgtgatggcgatgaagaccaagacgtatcaggtggcccacatgaagagcaaagacaatcggatcaagctgatgaacgaaattctcaatgggatcaaagtgctaaagctttatgcctgggagctggcattcaaggacaaggtgctggccatcaggcaggaggagctgaaggtgctgaagaagtctgcctacctgtcagccgtgggcaccttcacctgggtctgcacgccctttctggtggccttgtgcacatttgccgtctacgtgaccattgacgagaacaacatcctggatgcccagacagccttcgtgtctttggccttgttcaacatcctccggtttcccctgaacattctccccatggtcatcagcagcatcgtgcaggcgagtgtctccctcaaacgcctgaggatctttctctcccatgaggagctggaacctgacagcatcgagcgacggcctgtcaaagacggcgggggcacgaacagcatcaccgtgaggaatgccacattcacctgggccaggagcgaccctcccacactgaatggcatcaccttctccatccccgaaggtgctttggtggccgtggtgggccaggtgggctgcggaaagtcgtccctgctctcagccctcttggctgagatggacaaagtggaggggcacgtggctatcaagggcgtgaacctgtctgggggccagaagcagcgcgtgagcctggcccgggccgtgtactccaacgctgacatttacctcttcgatgatcccctctcagcagtggatgcccatgtgggaaaacacatctttgaaaatgtgattggccccaaggggatgctgaagaacaagacgcggatcttggtcacgcacagcatgagctacttgccgcaggtggacgtcatcatcgtcatgagtggcggcaagatctctgagatgggctcctaccaggagctgctggctcgagacggcgccttcgctgagttcctgcgtacctatgccagcacagagcaggagcaggatgcagaggagaacggggtcacgggcgtcagcggtccagggaaggaagcaaagcaaatggagaatggcatgctggtgacggacagtgcagggaagcaactgcagagacagctcagcagctcctcctcctatagtggggacatcagcaggcaccacaacagcaccgcagaactgcagaaagctgaggccaagaaggaggagacctggaagctgatggaggctgacaaggcgcagacagggcaggtcaagctttccgtgtactgggactacatgaaggccatcggactcttcatctccttcctcagcatcttccttttcatgtgtaaccatgtgtccgcgctggcttccaactattggctcagcctctggactgatgaccccatcgtcaacgggactcaggagcacacgaaagtccggctgagcgtctatggagccctgggcatttcacaagggatcgccgtgtttggctactccatggccgtgtccatcggggggatcttggcttcccgctgtctgcacgtggacctgctgcacagcatcctgcggtcacccatgagcttctttgagcggacccccagtgggaacctggtgaaccgcttctccaaggagctggacacagtggactccatgatcccggaggtcatcaagatgttcatgggctccctgttcaacgtcattggtgcctgcatcgttatcctgctggccacgcccatcgccgccatcatcatcccgccccttggcctcatctacttcttcgtccagaggttctacgtggcttcctcccggcagctgaagcgcctcgagtcggtcagccgctccccggtctattcccatttcaacgagaccttgctgggggtcagcgtcattcgagccttcgaggagcaggagcgcttcatccaccagagtgacctgaaggtggacgagaaccagaaggcctattaccccagcatcgtggccaacaggtggctggccgtgcggctggagtgtgtgggcaactgcatcgttctgtttgctgccctgtttgcggtgatctccaggcacagcctcagtgctggcttggtgggcctctcagtgtcttactcattgcaggtcaccacgtacttgaactggctggttcggatgtcatctgaaatggaaaccaacatcgtggccgtggagaggctcaaggagtattcagagactgagaaggaggcgccctggcaaatccaggagacagctccgcccagcagctggccccaggtgggccgagtggaattccggaactactgcctgcgctaccgagaggacctggacttcgttctcaggcacatcaatgtcacgatcaatgggggagaaaaggtcggcatcgtggggcggacgggagctgggaagtcgtccctgaccctgggcttatttcggatcaacgagtctgccgaaggagagatcatcatcgatggcatcaacatcgccaagatcggcctgcacgacctccgcttcaagatcaccatcatcccccaggaccctgttttgttttcgggttccctccgaatgaacctggacccattcagccagtactcggatgaagaagtctggacgtccctggagctggcccacctgaaggacttcgtgtcagcccttcctgacaagctagaccatgaatgtgcagaaggcggggagaacctcagtgtcgggcagcgccagcttgtgtgcctagcccgggccctgctgaggaagacgaagatccttgtgttggatgaggccacggcagccgtggacctggaaacggacgacctcatccagtccaccatccggacacagttcgaggactgcaccgtcctcaccatcgcccaccggctcaacaccatcatggactacacaagggtgatcgtcttggacaaaggagaaatccaggagtacggcgccccatcggacctcctgcagcagagaggtcttttctacagcatggccaaagacgccggcttggtgtgagccccagagctggcatatctggtcagaactgcagggcctatatgccagcgcccagggaggagtcagtacccctggtaaaccaagcctcccacactgaaaccaaaacataaaaaccaaacccagacaaccaaaacatattcaaagcagcagccaccgccatccggtcccctgcctggaactggctgtgaagacccaggagagacagagatgcgaaccacccaaaacacgcacaccctgcccctggtgccctgagacagacacacagcctcacgcccccaggaatgcaagtggtttcctggtgcttcccacggaggagttttggcagccagacttctggaggaattggttgtatagaagatcctagtgaccaaattcagcctactgcctcggatctctccagccgaagtctgtggactgcaagtctttgagatgcttctggctcccatcacctctaacatccttgtctgggtctaccaggaacgcttcatttccttggggctgcagttttgtggttgaggggcctggagaaaatcattttctccccttggcagtgtcccagggccctggatggtcctcttaccaacatctggtcttccaggcactcaaaagctgggaaccagcatctcagcgccagctctaccagttctcgttttgggccagaggcagcctctgcactcccacgcctgtcctcctggaagggacctggttggactaacggctaacctggacctggaactgtagggccaggggattgtctcagggccgacgttccacctggggcttccctccccacccaccccgactccaggctttcccttttttcttttgttcaacattgtaagaacaatcaatgctgttattactgatcccaccatgattgatgtggggtaaatattaaggagatggcctcatgggaatttgaccttgactagaaatagagactgagagtgagcaaccagctggaaggtactatgccagtcctagcagaaaaatgtgttaggggcctggcccaaagcagtgttggttgcttacagtgttgattgattttgttcttttttcttaccacctcttttctttccctctcatggtacctgctcatggttatgaagctttcaaagtaaagaacacgaaatacc

SEQ ID NO: 444714 - DNA, 5583 bp, Homo sapiens
ccaggcggcgttgcggccccggccccggctccctgcgccgccgccgccgccgccgccgccgccgccgccgccgccgccagcgctagcgccagcagccgggcccgatcacccgccgcccggtgcccgccgccgcccgcgccagcaaccgggcccgatcacccgccgcccggtgcccgccgccgcccgcgccaccggcatggcgctccggggcttctgcagcgccgatggctccgacccgctctgggactggaatgtcacgtggaataccagcaaccccgacttcaccaagtgctttcagaacacggtcctcgtgtgggtgccttgtttttacctctgggcctgtttccccttctacttcctctatctctcccgacatgaccgaggctacattcagatgacacctctcaacaaaaccaaaactgccttgggatttttgctgtggatcgtctgctgggcagacctcttctactctttctgggaaagaagtcggggcatattcctggccccagtgtttctggtcagcccaactctcttgggcatcaccacgctgcttgctacctttttaattcagctggagaggaggaagggagttcagtcttcagggatcatgctcactttctggctggtagccctagtgtgtgccctagccatcctgagatccaaaattatgacagccttaaaagaggatgcccaggtggacctgtttcgtgacatcactttctacgtctacttttccctcttactcattcagctcgtcttgtcctgtttctcagatcgctcacccctgttctcggaaaccatccacgaccctaatccctgcccagagtccagcgcttccttcctgtcgaggatcaccttctggtggatcacagggttgattgtccggggctaccgccagcccctggagggcagtgacctctggtccttaaacaaggaggacacgtcggaacaagtcgtgcctgttttggtaaagaactggaagaaggaatgcgccaagactaggaagcagccggtgaaggttgtgtactcctccaaggatcctgcccagccgaaagagagttccaaggtggatgcgaatgaggaggtggaggctttgatcgtcaagtccccacagaaggagtggaacccctctctgtttaaggtgttatacaagacctttgggccctacttcctcatgagcttcttcttcaaggccatccacgacctgatgatgttttccgggccgcagatcttaaagttgctcatcaagttcgtgaatgacacgaaggccccagactggcagggctacttctacaccgtgctgctgtttgtcactgcctgcctgcagaccctcgtgctgcaccagtacttccacatctgcttcgtcagtggcatgaggatcaagaccgctgtcattggggctgtctatcggaaggccctggtgatcaccaattcagccagaaaatcctccacggtcggggagattgtcaacctcatgtctgtggacgctcagaggttcatggacttggccacgtacattaacatgatctggtcagcccccctgcaagtcatccttgctctctacctcctgtggctgaatctgggcccttccgtcctggctggagtggcggtgatggtcctcatggtgcccgtcaatgctgtgatggcgatgaagaccaagacgtatcaggtggcccacatgaagagcaaagacaatcggatcaagctgatgaacgaaattctcaatgggatcaaagtgctaaagctttatgcctgggagctggcattcaaggacaaggtgctggccatcaggcaggaggagctgaaggtgctgaagaagtctgcctacctgtcagccgtgggcaccttcacctgggtctgcacgccctttctggtggccttgtgcacatttgccgtctacgtgaccattgacgagaacaacatcctggatgcccagacagccttcgtgtctttggccttgttcaacatcctccggtttcccctgaacattctccccatggtcatcagcagcatcgtgcaggcgagtgtctccctcaaacgcctgaggatctttctctcccatgaggagctggaacctgacagcatcgagcgacggcctgtcaaagacggcgggggcacgaacagcatcaccgtgaggaatgccacattcacctgggccaggagcgaccctcccacactgaatggcatcaccttctccatccccgaaggtgctttggtggccgtggtgggccaggtgggctgcggaaagtcgtccctgctctcagccctcttggctgagatggacaaagtggaggggcacgtggctatcaagacgcggatcttggtcacgcacagcatgagctacttgccgcaggtggacgtcatcatcgtcatgagtggcggcaagatctctgagatgggctcctaccaggagctgctggctcgagacggcgccttcgctgagttcctgcgtacctatgccagcacagagcaggagcaggatgcagaggagaacggggtcacgggcgtcagcggtccagggaaggaagcaaagcaaatggagaatggcatgctggtgacggacagtgcagggaagcaactgcagagacagctcagcagctcctcctcctatagtggggacatcagcaggcaccacaacagcaccgcagaactgcagaaagctgaggccaagaaggaggagacctggaagctgatggaggctgacaaggcgcagacagggcaggtcaagctttccgtgtactgggactacatgaaggccatcggactcttcatctccttcctcagcatcttccttttcatgtgtaaccatgtgtccgcgctggcttccaactattggctcagcctctggactgatgaccccatcgtcaacgggactcaggagcacacgaaagtccggctgagcgtctatggagccctgggcatttcacaagggatcgccgtgtttggctactccatggccgtgtccatcggggggatcttggcttcccgctgtctgcacgtggacctgctgcacagcatcctgcggtcacccatgagcttctttgagcggacccccagtgggaacctggtgaaccgcttctccaaggagctggacacagtggactccatgatcccggaggtcatcaagatgttcatgggctccctgttcaacgtcattggtgcctgcatcgttatcctgctggccacgcccatcgccgccatcatcatcccgccccttggcctcatctacttcttcgtccagaggttctacgtggcttcctcccggcagctgaagcgcctcgagtcggtcagccgctccccggtctattcccatttcaacgagaccttgctgggggtcagcgtcattcgagccttcgaggagcaggagcgcttcatccaccagagtgacctgaaggtggacgagaaccagaaggcctattaccccagcatcgtggccaacaggtggctggccgtgcggctggagtgtgtgggcaactgcatcgttctgtttgctgccctgtttgcggtgatctccaggcacagcctcagtgctggcttggtgggcctctcagtgtcttactcattgcaggtcaccacgtacttgaactggctggttcggatgtcatctgaaatggaaaccaacatcgtggccgtggagaggctcaaggagtattcagagactgagaaggaggcgccctggcaaatccaggagacagctccgcccagcagctggccccaggtgggccgagtggaattccggaactactgcctgcgctaccgagaggacctggacttcgttctcaggcacatcaatgtcacgatcaatgggggagaaaaggtcggcatcgtggggcggacgggagctgggaagtcgtccctgaccctgggcttatttcggatcaacgagtctgccgaaggagagatcatcatcgatggcatcaacatcgccaagatcggcctgcacgacctccgcttcaagatcaccatcatcccccaggaccctgttttgttttcgggttccctccgaatgaacctggacccattcagccagtactcggatgaagaagtctggacgtccctggagctggcccacctgaaggacttcgtgtcagcccttcctgacaagctagaccatgaatgtgcagaaggcggggagaacctcagtgtcgggcagcgccagcttgtgtgcctagcccgggccctgctgaggaagacgaagatccttgtgttggatgaggccacggcagccgtggacctggaaacggacgacctcatccagtccaccatccggacacagttcgaggactgcaccgtcctcaccatcgcccaccggctcaacaccatcatggactacacaagggtgatcgtcttggacaaaggagaaatccaggagtacggcgccccatcggacctcctgcagcagagaggtcttttctacagcatggccaaagacgccggcttggtgtgagccccagagctggcatatctggtcagaactgcagggcctatatgccagcgcccagggaggagtcagtacccctggtaaaccaagcctcccacactgaaaccaaaacataaaaaccaaacccagacaaccaaaacatattcaaagcagcagccaccgccatccggtcccctgcctggaactggctgtgaagacccaggagagacagagatgcgaaccacccaaaacacgcacaccctgcccctggtgccctgagacagacacacagcctcacgcccccaggaatgcaagtggtttcctggtgcttcccacggaggagttttggcagccagacttctggaggaattggttgtatagaagatcctagtgaccaaattcagcctactgcctcggatctctccagccgaagtctgtggactgcaagtctttgagatgcttctggctcccatcacctctaacatccttgtctgggtctaccaggaacgcttcatttccttggggctgcagttttgtggttgaggggcctggagaaaatcattttctccccttggcagtgtcccagggccctggatggtcctcttaccaacatctggtcttccaggcactcaaaagctgggaaccagcatctcagcgccagctctaccagttctcgttttgggccagaggcagcctctgcactcccacgcctgtcctcctggaagggacctggttggactaacggctaacctggacctggaactgtagggccaggggattgtctcagggccgacgttccacctggggcttccctccccacccaccccgactccaggctttcccttttttcttttgttcaacattgtaagaacaatcaatgctgttattactgatcccaccatgattgatgtggggtaaatattaaggagatggcctcatgggaatttgaccttgactagaaatagagactgagagtgagcaaccagctggaaggtactatgccagtcctagcagaaaaatgtgttaggggcctggcccaaagcagtgttggttgcttacagtgttgattgattttgttcttttttcttaccacctcttttctttccctctcatggtacctgctcatggttatgaagctttcaaagtaaagaacacgaaatacc

SEQ ID NO: 444715 - DNA, 600 bp, Homo sapiens
tcccctgttgaccaggggtcaaagtataaaatagtagaacaagaatagggacccaggtgtgtcggatttcagaacccgtggctgatgtcaccagataataatgcctagcgccattcgtgccaagcgtctggggttgaaccattcaagcagagaaagagagtgttctgtgcatgtggagtcgcacagctcagcctgtccctgacatgtctctgtgctttgtaggcgggggcacgaacagcatcaccgtgaggaatgccacattcacctgggccaggagcgaccctcccacactgaatgggtaagccgggacgtggacacacgtgatggtgtggagagagccacagggcttttgttaaacgtggattcgaattcccaccgtgctccctctctgtgaccttgaacaactcactttgcctttctaagacttagcttacccatctggacaatgggtgcagatacacctgcttaggctgtcgtgagaagcagacacacatgcctagcacagagggttccctgggattgtaagttacagcagccttggacagctagacttagacaatacaggagattcttggcttgcgtaactgggaagttctactt

SEQ ID NO: 444716 - DNA, 6589 bp, Homo sapiens
ccaggcggcgttgcggccccggccccggctccctgcgccgccgccgccgccgccgccgccgccgccgccgccgccgccagcgctagcgccagcagccgggcccgatcacccgccgcccggtgcccgccgccgcccgcgccagcaaccgggcccgatcacccgccgcccggtgcccgccgccgcccgcgccaccggcatggcgctccggggcttctgcagcgccgatggctccgacccgctctgggactggaatgtcacgtggaataccagcaaccccgacttcaccaagtgctttcagaacacggtcctcgtgtgggtgccttgtttttacctctgggcctgtttccccttctacttcctctatctctcccgacatgaccgaggctacattcagatgacacctctcaacaaaaccaaaactgccttgggatttttgctgtggatcgtctgctgggcagacctcttctactctttctgggaaagaagtcggggcatattcctggccccagtgtttctggtcagcccaactctcttgggcatcaccacgctgcttgctacctttttaattcagctggagaggaggaagggagttcagtcttcagggatcatgctcactttctggctggtagccctagtgtgtgccctagccatcctgagatccaaaattatgacagccttaaaagaggatgcccaggtggacctgtttcgtgacatcactttctacgtctacttttccctcttactcattcagctcgtcttgtcctgtttctcagatcgctcacccctgttctcggaaaccatccacgaccctaatccctgcccagagtccagcgcttccttcctgtcgaggatcaccttctggtggatcacagggttgattgtccggggctaccgccagcccctggagggcagtgacctctggtccttaaacaaggaggacacgtcggaacaagtcgtgcctgttttggtaaagaactggaagaaggaatgcgccaagactaggaagcagccggtgaaggttgtgtactcctccaaggatcctgcccagccgaaagagagttccaaggtggatgcgaatgaggaggtggaggctttgatcgtcaagtccccacagaaggagtggaacccctctctgtttaaggtgttatacaagacctttgggccctacttcctcatgagcttcttcttcaaggccatccacgacctgatgatgttttccgggccgcagatcttaaagttgctcatcaagttcgtgaatgacacgaaggccccagactggcagggctacttctacaccgtgctgctgtttgtcactgcctgcctgcagaccctcgtgctgcaccagtacttccacatctgcttcgtcagtggcatgaggatcaagaccgctgtcattggggctgtctatcggaaggccctggtgatcaccaattcagccagaaaatcctccacggtcggggagattgtcaacctcatgtctgtggacgctcagaggttcatggacttggccacgtacattaacatgatctggtcagcccccctgcaagtcatccttgctctctacctcctgtggctgaatctgggcccttccgtcctggctggagtggcggtgatggtcctcatggtgcccgtcaatgctgtgatggcgatgaagaccaagacgtatcaggtggcccacatgaagagcaaagacaatcggatcaagctgatgaacgaaattctcaatgggatcaaagtgctaaagctttatgcctgggagctggcattcaaggacaaggtgctggccatcaggcaggaggagctgaaggtgctgaagaagtctgcctacctgtcagccgtgggcaccttcacctgggtctgcacgccctttctggtggccttgtgcacatttgccgtctacgtgaccattgacgagaacaacatcctggatgcccagacagccttcgtgtctttggccttgttcaacatcctccggtttcccctgaacattctccccatggtcatcagcagcatcgtgcaggcgagtgtctccctcaaacgcctgaggatctttctctcccatgaggagctggaacctgacagcatcgagcgacggcctgtcaaagacggcgggggcacgaacagcatcaccgtgaggaatgccacattcacctgggccaggagcgaccctcccacactgaatggcatcaccttctccatccccgaaggtgctttggtggccgtggtgggccaggtgggctgcggaaagtcgtccctgctctcagccctcttggctgagatggacaaagtggaggggcacgtggctatcaagggctccgtggcctatgtgccacagcaggcctggattcagaatgattctctccgagaaaacatcctttttggatgtcagctggaggaaccatattacaggtccgtgatacaggcctgtgccctcctcccagacctggaaatcctgcccagtggggatcggacagagattggcgagaagggcgtgaacctgtctgggggccagaagcagcgcgtgagcctggcccgggccgtgtactccaacgctgacatttacctcttcgatgatcccctctcagcagtggatgcccatgtgggaaaacacatctttgaaaatgtgattggccccaaggggatgctgaagaacaagacgcggatcttggtcacgcacagcatgagctacttgccgcaggtggacgtcatcatcgtcatgagtggcggcaagatctctgagatgggctcctaccaggagctgctggctcgagacggcgccttcgctgagttcctgcgtacctatgccagcacagagcaggagcaggatgcagaggagaacggggtcacgggcgtcagcggtccagggaaggaagcaaagcaaatggagaatggcatgctggtgacggacagtgcagggaagcaactgcagagacagctcagcagctcctcctcctatagtggggacatcagcaggcaccacaacagcaccgcagaactgcagaaagctgaggccaagaaggaggagacctggaagctgatggaggctgacaaggcgcagacagggcaggtcaagctttccgtgtactgggactacatgaaggccatcggactcttcatctccttcctcagcatcttccttttcatgtgtaaccatgtgtccgcgctggcttccaactattggctcagcctctggactgatgaccccatcgtcaacgggactcaggagcacacgaaagtccggctgagcgtctatggagccctgggcatttcacaagggatcgccgtgtttggctactccatggccgtgtccatcggggggatcttggcttcccgctgtctgcacgtggacctgctgcacagcatcctgcggtcacccatgagcttctttgagcggacccccagtgggaacctggtgaaccgcttctccaaggagctggacacagtggactccatgatcccggaggtcatcaagatgttcatgggctccctgttcaacgtcattggtgcctgcatcgttatcctgctggccacgcccatcgccgccatcatcatcccgccccttggcctcatctacttcttcgtccagaggttctacgtggcttcctcccggcagctgaagcgcctcgagtcggtcagccgctccccggtctattcccatttcaacgagaccttgctgggggtcagcgtcattcgagccttcgaggagcaggagcgcttcatccaccagagtgacctgaaggtggacgagaaccagaaggcctattaccccagcatcgtggccaacaggtggctggccgtgcggctggagtgtgtgggcaactgcatcgttctgtttgctgccctgtttgcggtgatctccaggcacagcctcagtgctggcttggtgggcctctcagtgtcttactcattgcaggtcaccacgtacttgaactggctggttcggatgtcatctgaaatggaaaccaacatcgtggccgtggagaggctcaaggagtattcagagactgagaaggaggcgccctggcaaatccaggagacagctccgcccagcagctggccccaggtgggccgagtggaattccggaactactgcctgcgctaccgagaggacctggacttcgttctcaggcacatcaatgtcacgatcaatgggggagaaaaggtcggcatcgtggggcggacgggagctgggaagtcgtccctgaccctgggcttatttcggatcaacgagtctgccgaaggagagatcatcatcgatggcatcaacatcgccaagatcggcctgcacgacctccgcttcaagatcaccatcatcccccaggaccctgttttgttttcgggttccctccgaatgaacctggacccattcagccagtactcggatgaagaagtctggacgtccctggagctggcccacctgaaggacttcgtgtcagcccttcctgacaagctagaccatgaatgtgcagaaggcggggagaacctcagtgtcgggcagcgccagcttgtgtgcctagcccgggccctgctgaggaagacgaagatccttgtgttggatgaggccacggcagccgtggacctggaaacggacgacctcatccagtccaccatccggacacagttcgaggactgcaccgtcctcaccatcgcccaccggctcaacaccatcatggactacacaagggtgatcgtcttggacaaaggagaaatccaggagtacggcgccccatcggacctcctgcagcagagaggtcttttctacagcatggccaaagacgccggcttggtgtgagccccagagctggcatatctggtcagaactgcagggcctatatgccagcgcccagggaggagtcagtacccctggtaaaccaagcctcccacactgaaaccaaaacataaaaaccaaacccagacaaccaaaacatattcaaagcagcagccaccgccatccggtcccctgcctggaactggctgtgaagacccaggagagacagagatgcgaaccacccaaaacacgcacaccctgcccctggtgccctgagacagacacacagcctcacgcccccaggaatgcaagtggtttcctggtgcttcccacggaggagttttggcagccagacttctggaggaattggttgtatagaagatcctagtgaccaaattcagcctactgcctcggatctctccagccgaagtctgtggactgcaagtctttgagatgcttctggctcccatcacctctaacatccttgtctgggtctaccaggaacgcttcatttccttggggctgcagttttgtggttgaggggcctggagaaaatcattttctccccttggcagtgtcccagggccctggatggtcctcttaccaacatctggtcttccaggcactcaaaagctgggaaccagcatctcagcgccagctctaccagttctcgttttgggccagaggcagcctctgcactcccacgcctgtcctcctggaagggacctggttggactaacggctaacctggacctggaactgtagggccaggggattgtctcagggccgacgttccacctggggcttccctccccacccaccccgactccaggctttcccttttttcttttgttcaacattgtaagaacaatcaatgctgttattactgatcccaccatgattgatgtggggtaaatattaaggagatggcctcatgggaatttgaccttgactagaaatagagactgagagtgagcaaccagctggaaggtactatgccagtcctagcagaaaaatgtgttaggggcctggcccaaagcagtgttggttgcttacagtgttgattgattttgttcttttttcttaccacctcttttctttccctctcatggtacctgctcatggttatgaagctttcaaagtaaagaacacgaaatacctcccaagtattaccagtgggtaccaaaaaaatgtccccttgagtcttttccttgtttttagatgttaattctctcccttggcatccggttagccccccagggggggcagcattgtggagaacttgatatttagttactgatgctcttccaggacacgaaaagaacccatctttgaatatcaatgatttttttttttttaagtactgttccggggagaaaaacagtctcaaaacttgaacttcttgggaagagaagtgttgggctgagaagtaacattcccaggaaatagtgagaagctcgccctgtgtttgaaaccgtgttggtctctgtgttcctggaagaaaacagggaagcagcatcttttaaagcctgttctttaaggtgtctcgttagagcccaaagtggaatccggaaggcagccagagctgaggctgccccaagactcagacttgctaagaattacgccgccgacttcaaacccagagagcatctttcttttaggcgaaaacgcatatatttattttttgtaagttataccattctttcacattagataaactaagttttgggggatccttttgtaatgacttacactggaaatgcgaacatttgcagtaaaaaaatatatatatatctatatattttatttctttctaaagaa

SEQ ID NO: 444717 - DNA, 5552 bp, Homo sapiens
tttgctgcggccatgcgctttgtggtgtgaatagggctcggggggcttgggagcctcgccaggccagtcgccacgctcctgctcattggaaaggtgcagggtgttgttcagggagccagccaggagggcgtctcgttcatggggctcgggatggcagaaggagcgggtggaggtgccgatgaatagcgagctattcatcgttgctcatcaagttcgtgaatgacacgaaggccccagactggcagggctacttctacaccgtgctgctgtttgtcactgcctgcctgcagaccctcgtgctgcaccagtacttccacatctgcttcgtcagtggcatgaggatcaagaccgctgtcattggggctgtctatcggaaggccctggtgatcaccaattcagccagaaaatcctccacggtcggggagattgtcaacctcatgtctgtggacgctcagaggttcatggacttggccacgtacattaacatgatctggtcagcccccctgcaagtcatccttgctctctacctcctgtggctgaatctgggcccttccgtcctggctggagtggcggtgatggtcctcatggtgcccgtcaatgctgtgatggcgatgaagaccaagacgtatcaggtggcccacatgaagagcaaagacaatcggatcaagctgatgaacgaaattctcaatgggatcaaagtgctaaagctttatgcctgggagctggcattcaaggacaaggtgctggccatcaggcaggaggagctgaaggtgctgaagaagtctgcctacctgtcagccgtgggcaccttcacctgggtctgcacgccctttctggtggccttgtgcacatttgccgtctacgtgaccattgacgagaacaacatcctggatgcccagacagccttcgtgtctttggccttgttcaacatcctccggtttcccctgaacattctccccatggtcatcagcagcatcgtgcaggcgagtgtctccctcaaacgcctgaggatctttctctcccatgaggagctggaacctgacagcatcgagcgacggcctgtcaaagacggcgggggcacgaacagcatcaccgtgaggaatgccacattcacctgggccaggagcgaccctcccacactgaatggcatcaccttctccatccccgaaggtgctttggtggccgtggtgggccaggtgggctgcggaaagtcgtccctgctctcagccctcttggctgagatggacaaagtggaggggcacgtggctatcaagggctccgtggcctatgtgccacagcaggcctggattcagaatgattctctccgagaaaacatcctttttggatgtcagctggaggaaccatattacaggtccgtgatacaggcctgtgccctcctcccagacctggaaatcctgcccagtggggatcggacagagattggcgagaagggcgtgaacctgtctgggggccagaagcagcgcgtgagcctggcccgggccgtgtactccaacgctgacatttacctcttcgatgatcccctctcagcagtggatgcccatgtgggaaaacacatctttgaaaatgtgattggccccaaggggatgctgaagaacaagacgcggatcttggtcacgcacagcatgagctacttgccgcaggtggacgtcatcatcgtcatgagtggcggcaagatctctgagatgggctcctaccaggagctgctggctcgagacggcgccttcgctgagttcctgcgtacctatgccagcacagagcaggagcaggatgcagaggagaacggggtcacgggcgtcagcggtccagggaaggaagcaaagcaaatggagaatggcatgctggtgacggacagtgcagggaagcaactgcagagacagctcagcagctcctcctcctatagtggggacatcagcaggcaccacaacagcaccgcagaactgcagaaagctgaggccaagaaggaggagacctggaagctgatggaggctgacaaggcgcagacagggcaggtcaagctttccgtgtactgggactacatgaaggccatcggactcttcatctccttcctcagcatcttccttttcatgtgtaaccatgtgtccgcgctggcttccaactattggctcagcctctggactgatgaccccatcgtcaacgggactcaggagcacacgaaagtccggctgagcgtctatggagccctgggcatttcacaagggatcgccgtgtttggctactccatggccgtgtccatcggggggatcttggcttcccgctgtctgcacgtggacctgctgcacagcatcctgcggtcacccatgagcttctttgagcggacccccagtgggaacctggtgaaccgcttctccaaggagctggacacagtggactccatgatcccggaggtcatcaagatgttcatgggctccctgttcaacgtcattggtgcctgcatcgttatcctgctggccacgcccatcgccgccatcatcatcccgccccttggcctcatctacttcttcgtccagaggttctacgtggcttcctcccggcagctgaagcgcctcgagtcggtcagccgctccccggtctattcccatttcaacgagaccttgctgggggtcagcgtcattcgagccttcgaggagcaggagcgcttcatccaccagagtgacctgaaggtggacgagaaccagaaggcctattaccccagcatcgtggccaacaggtggctggccgtgcggctggagtgtgtgggcaactgcatcgttctgtttgctgccctgtttgcggtgatctccaggcacagcctcagtgctggcttggtgggcctctcagtgtcttactcattgcaggtcaccacgtacttgaactggctggttcggatgtcatctgaaatggaaaccaacatcgtggccgtggagaggctcaaggagtattcagagactgagaaggaggcgccctggcaaatccaggagacagctccgcccagcagctggccccaggtgggccgagtggaattccggaactactgcctgcgctaccgagaggacctggacttcgttctcaggcacatcaatgtcacgatcaatgggggagaaaaggtcggcatcgtggggcggacgggagctgggaagtcgtccctgaccctgggcttatttcggatcaacgagtctgccgaaggagagatcatcatcgatggcatcaacatcgccaagatcggcctgcacgacctccgcttcaagatcaccatcatcccccaggaccctgttttgttttcgggttccctccgaatgaacctggacccattcagccagtactcggatgaagaagtctggacgtccctggagctggcccacctgaaggacttcgtgtcagcccttcctgacaagctagaccatgaatgtgcagaaggcggggagaacctcagtgtcgggcagcgccagcttgtgtgcctagcccgggccctgctgaggaagacgaagatccttgtgttggatgaggccacggcagccgtggacctggaaacggacgacctcatccagtccaccatccggacacagttcgaggactgcaccgtcctcaccatcgcccaccggctcaacaccatcatggactacacaagggtgatcgtcttggacaaaggagaaatccaggagtacggcgccccatcggacctcctgcagcagagaggtcttttctacagcatggccaaagacgccggcttggtgtgagccccagagctggcatatctggtcagaactgcagggcctatatgccagcgcccagggaggagtcagtacccctggtaaaccaagcctcccacactgaaaccaaaacataaaaaccaaacccagacaaccaaaacatattcaaagcagcagccaccgccatccggtcccctgcctggaactggctgtgaagacccaggagagacagagatgcgaaccacccaaaacacgcacaccctgcccctggtgccctgagacagacacacagcctcacgcccccaggaatgcaagtggtttcctggtgcttcccacggaggagttttggcagccagacttctggaggaattggttgtatagaagatcctagtgaccaaattcagcctactgcctcggatctctccagccgaagtctgtggactgcaagtctttgagatgcttctggctcccatcacctctaacatccttgtctgggtctaccaggaacgcttcatttccttggggctgcagttttgtggttgaggggcctggagaaaatcattttctccccttggcagtgtcccagggccctggatggtcctcttaccaacatctggtcttccaggcactcaaaagctgggaaccagcatctcagcgccagctctaccagttctcgttttgggccagaggcagcctctgcactcccacgcctgtcctcctggaagggacctggttggactaacggctaacctggacctggaactgtagggccaggggattgtctcagggccgacgttccacctggggcttccctccccacccaccccgactccaggctttcccttttttcttttgttcaacattgtaagaacaatcaatgctgttattactgatcccaccatgattgatgtggggtaaatattaaggagatggcctcatgggaatttgaccttgactagaaatagagactgagagtgagcaaccagctggaaggtactatgccagtcctagcagaaaaatgtgttaggggcctggcccaaagcagtgttggttgcttacagtgttgattgattttgttcttttttcttaccacctcttttctttccctctcatggtacctgctcatggttatgaagctttcaaagtaaagaacacgaaatacctcccaagtattaccagtgggtaccaaaaaaatgtccccttgagtcttttccttgtttttagatgttaattctctcccttggcatccggttagccccccagggggggcagcattgtggagaacttgatatttagttactgatgctcttccaggacacgaaaagaacccatctttgaatatcaatgatttttttttttttaagtactgttccggggagaaaaacagtctcaaaacttgaacttcttgggaagagaagtgttgggctgagaagtaacattcccaggaaatagtgagaagctcgccctgtgtttgaaaccgtgttggtctctgtgttcctggaagaaaacagggaagcagcatcttttaaagcctgttctttaaggtgtctcgttagagcccaaagtggaatccggaaggcagccagagctgaggctgccccaagactcagacttgctaagaattacgccgccgacttcaaacccagagagcatctttcttttaggcgaaaacgcatatatttattttttgtaagttataccattctttcacattagataaactaagttttgggggatccttttgtaatgacttacactggaaatgcgaacatttgcagtaaaaaaatatatatatatctatatattttatttctttctaaagaa

SEQ ID NO: 444718 - DNA, 4086 bp, Homo sapiens
agcttaacatagcagggctactgttttctgggctgggttttacccattgctgctggcacaggatgctggctcaggcccagtgccctcagtggatggagccttctgcacagttgcaaagcactgtccctaccccaagggactgagctccagataccacctgccccacaaccagacagcctgttcatggcctctgcagagcaggtctcctactttctgatcatcctggcggccaggtgctctgtggtctcctcactgaagtggccggtttttgttgcccttggttttagcatctgcctcatataaccccacttgccccctttgtctctcttcttgccaggggtcacgggcgtcagcggtccagggaaggaagcaaagcaaatggagaatggcatgctggtgacggacagtgcagggaagcaactgcagagacagctcagcagctcctcctcctatagtggggacatcagcaggcaccacaacagcaccgcagaactgcagaaagctgaggccaagaaggaggagacctggaagctgatggaggctgacaaggcgcagacagggcaggtcaagctttccgtgtactgggactacatgaaggccatcggactcttcatctccttcctcagcatcttccttttcatgtgtaaccatgtgtccgcgctggcttccaactattggctcagcctctggactgatgaccccatcgtcaacgggactcaggagcacacgaaagtccggctgagcgtctatggagccctgggcatttcacaagggatcgccgtgtttggctactccatggccgtgtccatcggggggatcttggcttcccgctgtctgcacgtggacctgctgcacagcatcctgcggtcacccatgagcttctttgagcggacccccagtgggaacctggtgaaccgcttctccaaggagctggacacagtggactccatgatcccggaggtcatcaagatgttcatgggctccctgttcaacgtcattggtgcctgcatcgttatcctgctggccacgcccatcgccgccatcatcatcccgccccttggcctcatctacttcttcgtccagaggttctacgtggcttcctcccggcagctgaagcgcctcgagtcggtcagccgctccccggtctattcccatttcaacgagaccttgctgggggtcagcgtcattcgagccttcgaggagcaggagcgcttcatccaccagagtgacctgaaggtggacgagaaccagaaggcctattaccccagcatcgtggccaacaggtggctggccgtgcggctggagtgtgtgggcaactgcatcgttctgtttgctgccctgtttgcggtgatctccaggcacagcctcagtgctggcttggtgggcctctcagtgtcttactcattgcaggtcaccacgtacttgaactggctggttcggatgtcatctgaaatggaaaccaacatcgtggccgtggagaggctcaaggagtattcagagactgagaaggaggcgccctggcaaatccaggagacagctccgcccagcagctggccccaggtgggccgagtggaattccggaactactgcctgcgctaccgagaggacctggacttcgttctcaggcacatcaatgtcacgatcaatgggggagaaaaggtcggcatcgtggggcggacgggagctgggaagtcgtccctgaccctgggcttatttcggatcaacgagtctgccgaaggagagatcatcatcgatggcatcaacatcgccaagatcggcctgcacgacctccgcttcaagatcaccatcatcccccaggaccctgttttgttttcgggttccctccgaatgaacctggacccattcagccagtactcggatgaagaagtctggacgtccctggagctggcccacctgaaggacttcgtgtcagcccttcctgacaagctagaccatgaatgtgcagaaggcggggagaacctcagtgtcgggcagcgccagcttgtgtgcctagcccgggccctgctgaggaagacgaagatccttgtgttggatgaggccacggcagccgtggacctggaaacggacgacctcatccagtccaccatccggacacagttcgaggactgcaccgtcctcaccatcgcccaccggctcaacaccatcatggactacacaagggtgatcgtcttggacaaaggagaaatccaggagtacggcgccccatcggacctcctgcagcagagaggtcttttctacagcatggccaaagacgccggcttggtgtgagccccagagctggcatatctggtcagaactgcagggcctatatgccagcgcccagggaggagtcagtacccctggtaaaccaagcctcccacactgaaaccaaaacataaaaaccaaacccagacaaccaaaacatattcaaagcagcagccaccgccatccggtcccctgcctggaactggctgtgaagacccaggagagacagagatgcgaaccacccaaaacacgcacaccctgcccctggtgccctgagacagacacacagcctcacgcccccaggaatgcaagtggtttcctggtgcttcccacggaggagttttggcagccagacttctggaggaattggttgtatagaagatcctagtgaccaaattcagcctactgcctcggatctctccagccgaagtctgtggactgcaagtctttgagatgcttctggctcccatcacctctaacatccttgtctgggtctaccaggaacgcttcatttccttggggctgcagttttgtggttgaggggcctggagaaaatcattttctccccttggcagtgtcccagggccctggatggtcctcttaccaacatctggtcttccaggcactcaaaagctgggaaccagcatctcagcgccagctctaccagttctcgttttgggccagaggcagcctctgcactcccacgcctgtcctcctggaagggacctggttggactaacggctaacctggacctggaactgtagggccaggggattgtctcagggccgacgttccacctggggcttccctccccacccaccccgactccaggctttcccttttttcttttgttcaacattgtaagaacaatcaatgctgttattactgatcccaccatgattgatgtggggtaaatattaaggagatggcctcatgggaatttgaccttgactagaaatagagactgagagtgagcaaccagctggaaggtactatgccagtcctagcagaaaaatgtgttaggggcctggcccaaagcagtgttggttgcttacagtgttgattgattttgttcttttttcttaccacctcttttctttccctctcatggtacctgctcatggttatgaagctttcaaagtaaagaacacgaaatacctcccaagtattaccagtgggtaccaaaaaaatgtccccttgagtcttttccttgtttttagatgttaattctctcccttggcatccggttagccccccagggggggcagcattgtggagaacttgatatttagttactgatgctcttccaggacacgaaaagaacccatctttgaatatcaatgatttttttttttttaagtactgttccggggagaaaaacagtctcaaaacttgaacttcttgggaagagaagtgttgggctgagaagtaacattcccaggaaatagtgagaagctcgccctgtgtttgaaaccgtgttggtctctgtgttcctggaagaaaacagggaagcagcatcttttaaagcctgttctttaaggtgtctcgttagagcccaaagtggaatccggaaggcagccagagctgaggctgccccaagactcagacttgctaagaattacgccgccgacttcaaacccagagagcatctttcttttaggcgaaaacgcatatatttattttttgtaagttataccattctttcacattagataaactaagttttgggggatccttttgtaatgacttacactggaaatgcgaacatttgcagtaaaaaaatatatatatatctatatattttatttctttctaaagaa

SEQ ID NO: 444719 - DNA, 3871 bp, Homo sapiens
agacactgcctttctctgggtacctataaacctggagagtgacatggtgggggtgtggtgcatatattcatatatatgtttacatgtgtgcatgtggaaacactccgtctcttatgccatggttcagacccacaatagcagtcccagcagggagccctccgaccctgcccaaggcatctgtacggttgacacccttgtgctttgcttctccagacagctcagcagctcctcctcctatagtggggacatcagcaggcaccacaacagcaccgcagaactgcagaaagctgaggccaagaaggaggagacctggaagctgatggaggctgacaaggcgcagacagggcaggtcaagctttccgtgtactgggactacatgaaggccatcggactcttcatctccttcctcagcatcttccttttcatgtgtaaccatgtgtccgcgctggcttccaactattggctcagcctctggactgatgaccccatcgtcaacgggactcaggagcacacgaaagtccggctgagcgtctatggagccctgggcatttcacaagggatcgccgtgtttggctactccatggccgtgtccatcggggggatcttggcttcccgctgtctgcacgtggacctgctgcacagcatcctgcggtcacccatgagcttctttgagcggacccccagtgggaacctggtgaaccgcttctccaaggagctggacacagtggactccatgatcccggaggtcatcaagatgttcatgggctccctgttcaacgtcattggtgcctgcatcgttatcctgctggccacgcccatcgccgccatcatcatcccgccccttggcctcatctacttcttcgtccagaggttctacgtggcttcctcccggcagctgaagcgcctcgagtcggtcagccgctccccggtctattcccatttcaacgagaccttgctgggggtcagcgtcattcgagccttcgaggagcaggagcgcttcatccaccagagtgacctgaaggtggacgagaaccagaaggcctattaccccagcatcgtggccaacaggtggctggccgtgcggctggagtgtgtgggcaactgcatcgttctgtttgctgccctgtttgcggtgatctccaggcacagcctcagtgctggcttggtgggcctctcagtgtcttactcattgcaggtcaccacgtacttgaactggctggttcggatgtcatctgaaatggaaaccaacatcgtggccgtggagaggctcaaggagtattcagagactgagaaggaggcgccctggcaaatccaggagacagctccgcccagcagctggccccaggtgggccgagtggaattccggaactactgcctgcgctaccgagaggacctggacttcgttctcaggcacatcaatgtcacgatcaatgggggagaaaaggtcggcatcgtggggcggacgggagctgggaagtcgtccctgaccctgggcttatttcggatcaacgagtctgccgaaggagagatcatcatcgatggcatcaacatcgccaagatcggcctgcacgacctccgcttcaagatcaccatcatcccccaggaccctgttttgttttcgggttccctccgaatgaacctggacccattcagccagtactcggatgaagaagtctggacgtccctggagctggcccacctgaaggacttcgtgtcagcccttcctgacaagctagaccatgaatgtgcagaaggcggggagaacctcagtgtcgggcagcgccagcttgtgtgcctagcccgggccctgctgaggaagacgaagatccttgtgttggatgaggccacggcagccgtggacctggaaacggacgacctcatccagtccaccatccggacacagttcgaggactgcaccgtcctcaccatcgcccaccggctcaacaccatcatggactacacaagggtgatcgtcttggacaaaggagaaatccaggagtacggcgccccatcggacctcctgcagcagagaggtcttttctacagcatggccaaagacgccggcttggtgtgagccccagagctggcatatctggtcagaactgcagggcctatatgccagcgcccagggaggagtcagtacccctggtaaaccaagcctcccacactgaaaccaaaacataaaaaccaaacccagacaaccaaaacatattcaaagcagcagccaccgccatccggtcccctgcctggaactggctgtgaagacccaggagagacagagatgcgaaccacccaaaacacgcacaccctgcccctggtgccctgagacagacacacagcctcacgcccccaggaatgcaagtggtttcctggtgcttcccacggaggagttttggcagccagacttctggaggaattggttgtatagaagatcctagtgaccaaattcagcctactgcctcggatctctccagccgaagtctgtggactgcaagtctttgagatgcttctggctcccatcacctctaacatccttgtctgggtctaccaggaacgcttcatttccttggggctgcagttttgtggttgaggggcctggagaaaatcattttctccccttggcagtgtcccagggccctggatggtcctcttaccaacatctggtcttccaggcactcaaaagctgggaaccagcatctcagcgccagctctaccagttctcgttttgggccagaggcagcctctgcactcccacgcctgtcctcctggaagggacctggttggactaacggctaacctggacctggaactgtagggccaggggattgtctcagggccgacgttccacctggggcttccctccccacccaccccgactccaggctttcccttttttcttttgttcaacattgtaagaacaatcaatgctgttattactgatcccaccatgattgatgtggggtaaatattaaggagatggcctcatgggaatttgaccttgactagaaatagagactgagagtgagcaaccagctggaaggtactatgccagtcctagcagaaaaatgtgttaggggcctggcccaaagcagtgttggttgcttacagtgttgattgattttgttcttttttcttaccacctcttttctttccctctcatggtacctgctcatggttatgaagctttcaaagtaaagaacacgaaatacctcccaagtattaccagtgggtaccaaaaaaatgtccccttgagtcttttccttgtttttagatgttaattctctcccttggcatccggttagccccccagggggggcagcattgtggagaacttgatatttagttactgatgctcttccaggacacgaaaagaacccatctttgaatatcaatgatttttttttttttaagtactgttccggggagaaaaacagtctcaaaacttgaacttcttgggaagagaagtgttgggctgagaagtaacattcccaggaaatagtgagaagctcgccctgtgtttgaaaccgtgttggtctctgtgttcctggaagaaaacagggaagcagcatcttttaaagcctgttctttaaggtgtctcgttagagcccaaagtggaatccggaaggcagccagagctgaggctgccccaagactcagacttgctaagaattacgccgccgacttcaaacccagagagcatctttcttttaggcgaaaacgcatatatttattttttgtaagttataccattctttcacattagataaactaagttttgggggatccttttgtaatgacttacactggaaatgcgaacatttgcagtaaaaaaatatatatatatctatatattttatttctttctaaagaa

SEQ ID NO: 444720 - DNA, 4594 bp, Homo sapiens
ccaggcggcgttgcggccccggccccggctccctgcgccgccgccgccgccgccgccgccgccgccgccgccgccgccagcgctagcgccagcagccgggcccgatcacccgccgcccggtgcccgccgccgcccgcgccagcaaccgggcccgatcacccgccgcccggtgcccgccgccgcccgcgccaccggcatggcgctccggggcttctgcagcgccgatggctccgacccgctctgggactggaatgtcacgtggaataccagcaaccccgacttcaccaagtgctttcagaacacggtcctcgtgtgggtgccttgtttttacctctgggcctgtttccccttctacttcctctatctctcccgacatgaccgaggctacattcagatgacacctctcaacaaaaccaaaactgccttgggatttttgctgtggatcgtctgctgggcagacctcttctactctttctgggaaagaagtcggggcatattcctggccccagtgtttctggtcagcccaactctcttgggcatcaccacgctgcttgctacctttttaattcagctggagaggaggaagggagttcagtcttcagggatcatgctcactttctggctggtagccctagtgtgtgccctagccatcctgagatccaaaattatgacagccttaaaagaggatgcccaggtggacctgtttcgtgacatcactttctacgtctacttttccctcttactcattcagctcgtcttgtcctgtttctcagatcgctcacccctgttctcggaaaccatccacgaccctaatccctgcccagagtccagcgcttccttcctgtcgaggatcaccttctggtggatcacagggttgattgtccggggctaccgccagcccctggagggcagtgacctctggtccttaaacaaggaggacacgtcggaacaagtcgtgcctgttttggtaaagaactggaagaaggaatgcgccaagactaggaagcagccggtgaaggttgtgtactcctccaaggatcctgcccagccgaaagagagttccaaggtggatgcgaatgaggaggtggaggctttgatcgtcaagtccccacagaaggagtggaacccctctctgtttaaggtgttatacaagacctttgggccctacttcctcatgagcttcttcttcaaggccatccacgacctgatgatgttttccgggccgcagatcttaaagttgctcatcaagttcgtgaatgacacgaaggccccagactggcagggctacttctacaccgtgctgctgtttgtcactgcctgcctgcagaccctcgtgctgcaccagtacttccacatctgcttcgtcagtggcatgaggatcaagaccgctgtcattggggctgtctatcggaaggccctggtgatcaccaattcagccagaaaatcctccacggtcggggagattgtcaacctcatgtctgtggacgctcagaggttcatggacttggccacgtacattaacatgatctggtcagcccccctgcaagtcatccttgctctctacctcctgtggctgaatctgggcccttccgtcctggctggagtggcggtgatggtcctcatggtgcccgtcaatgctgtgatggcgatgaagaccaagacgtatcaggtggcccacatgaagagcaaagacaatcggatcaagctgatgaacgaaattctcaatgggatcaaagtgctaaagctttatgcctgggagctggcattcaaggacaaggtgctggccatcaggcaggaggagctgaaggtgctgaagaagtctgcctacctgtcagccgtgggcaccttcacctgggtctgcacgccctttctggtggccttgtgcacatttgccgtctacgtgaccattgacgagaacaacatcctggatgcccagacagccttcgtgtctttggccttgttcaacatcctccggtttcccctgaacattctccccatggtcatcagcagcatcgtgcaggcgagtgtctccctcaaacgcctgaggatctttctctcccatgaggagctggaacctgacagcatcgagcgacggcctgtcaaagacggcgggggcacgaacagcatcaccgtgaggaatgccacattcacctgggccaggagcgaccctcccacactgaatggcatcaccttctccatccccgaaggtgctttggtggccgtggtgggccaggtgggctgcggaaagtcgtccctgctctcagccctcttggctgagatggacaaagtggaggggcacgtggctatcaagggctccgtggcctatgtgccacagcaggcctggattcagaatgattctctccgagaaaacatcctttttggatgtcagctggaggaaccatattacaggtccgtgatacaggcctgtgccctcctcccagacctggaaatcctgcccagtggggatcggacagagattggcgagaagggcgtgaacctgtctgggggccagaagcagcgcgtgagcctggcccgggccgtgtactccaacgctgacatttacctcttcgatgatcccctctcagcagtggatgcccatgtgggaaaacacatctttgaaaatgtgattggccccaaggggatgctgaagaacaagacgcggatcttggtcacgcacagcatgagctacttgccgcaggtggacgtcatcatcgtcatgagtggcggcaagatctctgagatgggctcctaccaggagctgctggctcgagacggcgccttcgctgagttcctgcgtacctatgccagcacagagcaggagcaggatgcagaggagaacggggtcacgggcgtcagcggtccagggaaggaagcaaagcaaatggagaatggcatgctggtgacggacagtgcagggaagcaactgcagagacagctcagcagctcctcctcctatagtggggacatcagcaggcaccacaacagcaccgcagaactgcagaaagctgaggccaagaaggaggagacctggaagctgatggaggctgacaaggcgcagacagggcaggtcaagctttccgtgtactgggactacatgaaggccatcggactcttcatctccttcctcagcatcttccttttcatgtgtaaccatgtgtccgcgctggcttccaactattggctcagcctctggactgatgaccccatcgtcaacgggactcaggagcacacgaaagtccggctgagcgtctatggagccctgggcatttcacaagggatcgccgtgtttggctactccatggccgtgtccatcggggggatcttggcttcccgctgtctgcacgtggacctgctgcacagcatcctgcggtcacccatgagcttctttgagcggacccccagtgggaacctggtgaaccgcttctccaaggagctggacacagtggactccatgatcccggaggtcatcaagatgttcatgggctccctgttcaacgtcattggtgcctgcatcgttatcctgctggccacgcccatcgccgccatcatcatcccgccccttggcctcatctacttcttcgtccagaggttctacgtggcttcctcccggcagctgaagcgcctcgagtcggtcagccgctccccggtctattcccatttcaacgagaccttgctgggggtcagcgtcattcgagccttcgaggagcaggagcgcttcatccaccagagtgacctgaaggtggacgagaaccagaaggcctattaccccagcatcgtggccaacaggtggctggccgtgcggctggagtgtgtgggcaactgcatcgttctgtttgctgccctgtttgcggtgatctccaggcacagcctcagtgctggcttggtgggcctctcagtgtcttactcattgcaggtcaccacgtacttgaactggctggttcggatgtcatctgaaatggaaaccaacatcgtggccgtggagaggctcaaggagtattcagagactgagaaggaggcgccctggcaaatccaggagacagctccgcccagcagctggccccaggtgggccgagtggaattccggaactactgcctgcgctaccgagaggacctggacttcgttctcaggcacatcaatgtcacgatcaatgggggagaaaaggtcggcatcgtggggcggacgggagctgggaagtcgtccctgaccctgggcttatttcggatcaacgagtctgccgaaggagagatcatcatcgatggcatcaacatcgccaagatcggcctgcacgacctccgcttcaagatcaccatcatcccccaggaccctgttttgttttcgggttccctccgaatgaacctggacccattcagccagtactcggatgaagaagtctggacgtccctggagctggcccacctgaaggacttcgtgtcagcccttcctgacaagctagaccatgaatgtgcagaaggcggggagaacctcaggcagcgcagatgtgtgctagccgaggcagctgcgacaagacatccaggaggatgggcacgagacgggccggaaaggaaacactcaccacaacgacaagcggagagc

SEQ ID NO: 444721 - DNA, 4363 bp, Homo sapiens
ccaggcggcgttgcggccccggccccggctccctgcgccgccgccgccgccgccgccgccgccgccgccgccgccgccagcgctagcgccagcagccgggcccgatcacccgccgcccggtgcccgccgccgcccgcgccagcaaccgggcccgatcacccgccgcccggtgcccgccgccgcccgcgccaccggcatggcgctccggggcttctgcagcgccgatggctccgacccgctctgggactggaatgtcacgtggaataccagcaaccccgacttcaccaagtgctttcagaacacggtcctcgtgtgggtgccttgtttttacctctgggcctgtttccccttctacttcctctatctctcccgacatgaccgaggctacattcagatgacacctctcaacaaaaccaaaactgccttgggatttttgctgtggatcgtctgctgggcagacctcttctactctttctgggaaagaagtcggggcatattcctggccccagtgtttctggtcagcccaactctcttgggcatcaccacgctgcttgctacctttttaattcagctggagaggaggaagggagttcagtcttcagggatcatgctcactttctggctggtagccctagtgtgtgccctagccatcctgagatccaaaattatgacagccttaaaagaggatgcccaggtggacctgtttcgtgacatcactttctacgtctacttttccctcttactcattcagctcgtcttgtcctgtttctcagatcgctcacccctgttctcggaaaccatccacgaccctaatccctgcccagagtccagcgcttccttcctgtcgaggatcaccttctggtggatcacagggttgattgtccggggctaccgccagcccctggagggcagtgacctctggtccttaaacaaggaggacacgtcggaacaagtcgtgcctgttttggtaaagaactggaagaaggaatgcgccaagactaggaagcagccggtgaaggttgtgtactcctccaaggatcctgcccagccgaaagagagttccaaggtggatgcgaatgaggaggtggaggctttgatcgtcaagtccccacagaaggagtggaacccctctctgtttaaggtgttatacaagacctttgggccctacttcctcatgagcttcttcttcaaggccatccacgacctgatgatgttttccgggccgcagatcttaaagttgctcatcaagttcgtgaatgacacgaaggccccagactggcagggctacttctacaccgtgctgctgtttgtcactgcctgcctgcagaccctcgtgctgcaccagtacttccacatctgcttcgtcagtggcatgaggatcaagaccgctgtcattggggctgtctatcggaaggccctggtgatcaccaattcagccagaaaatcctccacggtcggggagattgtcaacctcatgtctgtggacgctcagaggttcatggacttggccacgtacattaacatgatctggtcagcccccctgcaagtcatccttgctctctacctcctgtggctgaatctgggcccttccgtcctggctggagtggcggtgatggtcctcatggtgcccgtcaatgctgtgatggcgatgaagaccaagacgtatcaggtggcccacatgaagagcaaagacaatcggatcaagctgatgaacgaaattctcaatgggatcaaagtgctaaagctttatgcctgggagctggcattcaaggacaaggtgctggccatcaggcaggaggagctgaaggtgctgaagaagtctgcctacctgtcagccgtgggcaccttcacctgggtctgcacgccctttctggtggccttgtgcacatttgccgtctacgtgaccattgacgagaacaacatcctggatgcccagacagccttcgtgtctttggccttgttcaacatcctccggtttcccctgaacattctccccatggtcatcagcagcatcgtgcaggcgagtgtctccctcaaacgcctgaggatctttctctcccatgaggagctggaacctgacagcatcgagcgacggcctgtcaaagacggcgggggcacgaacagcatcaccgtgaggaatgccacattcacctgggccaggagcgaccctcccacactgaatggcatcaccttctccatccccgaaggtgctttggtggccgtggtgggccaggtgggctgcggaaagtcgtccctgctctcagccctcttggctgagatggacaaagtggaggggcacgtggctatcaagggctccgtggcctatgtgccacagcaggcctggattcagaatgattctctccgagaaaacatcctttttggatgtcagctggaggaaccatattacaggtccgtgatacaggcctgtgccctcctcccagacctggaaatcctgcccagtggggatcggacagagattggcgagaagggcgtgaacctgtctgggggccagaagcagcgcgtgagcctggcccgggccgtgtactccaacgctgacatttacctcttcgatgatcccctctcagcagtggatgcccatgtgggaaaacacatctttgaaaatgtgattggccccaaggggatgctgaagaacaagacgcggatcttggtcacgcacagcatgagctacttgccgcaggtggacgtcatcatcgtcatgagtggcggcaagatctctgagatgggctcctaccaggagctgctggctcgagacggcgccttcgctgagttcctgcgtacctatgccagcacagagcaggagcaggatgcagaggagaacggggtcacgggcgtcagcggtccagggaaggaagcaaagcaaatggagaatggcatgctggtgacggacagtgcagggaagcaactgcagaggtaagggcggggaggaaggccccaacctaaggaccctgccctgccagtgggaggacaagaggaggaacaaaaaaaggcctcagccccctgaggtcctggaaggcctgggcttttaccttccctcccaaatcctccaaggaccttgcttttcagagtacagaggcccaaagaaggaatgtggcactctttttgccaggtggcacaactcacacaggcctcatgatttaaccagctgtccacgcttctgacactcgggctccctacatggtgtgggtctttgctcaggtctcttggcggggcctggaaggttcaggctttgtgaagcagcatttgatttaaaactgtctcaaggccaggtgtggtggctcctgcttgtaatctcagcactttgggaggttgaggcaggaggatcgcttgaggccaggagtttgagaccacagtgggtaacatagcaagacctcatctctacaaaaaaggaagtatgctcgtgtttgattatagagggcttccttagatccctggggatttatagcgtatgcagtatattaaccatcctagcttttaaaaaactggctaagtcggccaggcagggtggctcatgcctataatcccagcacttcgggaggctgaggcgggcggatcacctgaggacaggagttgaagaccagcctggccaacatgatgaaaccctgtctctactaaagatacaaaaattagccaggcatggtggcaggcgcctgtagtcccagctactcgggaggctgaggcacgagaatcgcttgaacccaggaggtggaggttgcagtgagccgagattgcgccatggcactccagcctgggtgacagagcgagactccatctcaaaaaacaaaaacaaaacaaaacagcagcagcagcagaaaacagtaaaacaacaacaaaaattgacaaagtcggagcctaaacgtatcagaccgcggagatctgagaaaggatcccggacctgcagttgctacaggggtcaggagagagcaaagaccatgcggcatagcacggtgcctggaacagacaaacacttcgtagatgtcgcttttgccatggttatcatccggacatggttatggtccggaattggtgggtcttggtctcactgacttcaagaatgaagccgcagaccctcacggtgagtgttacagttcttaaaggtggcacgtctggggtttgttccttctgctgttcggatgtgttcggagtttcttccttctggtgggttcgtggtctcgctggcctcaggagtgaagctgcagaccttcgcggtaagtgttacagctcttaaggtggcgtgtctggagtcgttcgttcctcccgctgggtttgtgctctggctggcttcaggagtgaagctgtagaccttgatggtgagtgttacagctcacaaaggcaatgtggaccc

SEQ ID NO: 444722 - DNA, 1824 bp, Homo sapiens
ccaggcggcgttgcggccccggccccggctccctgcgccgccgccgccgccgccgccgccgccgccgccgccgccgccagcgctagcgccagcagccgggcccgatcacccgccgcccggtgcccgccgccgcccgcgccagcaaccgggcccgatcacccgccgcccggtgcccgccgccgcccgcgccaccggcatggcgctccggggcttctgcagcgccgatggctccgacccgctctgggactggaatgtcacgtggaataccagcaaccccgacttcaccaagtgctttcagaacacggtcctcgtgtgggtgccttgtttttacctctgggcctgtttccccttctacttcctctatctctcccgacatgaccgaggctacattcagatgacacctctcaacaaaaccaaaactgccttgggatttttgctgtggatcgtctgctgggcagacctcttctactctttctgggaaagaagtcggggcatattcctggccccagtgtttctggtcagcccaactctcttgggcatcaccacgctgcttgctacctttttaattcagctggagaggaggaagggagttcagtcttcagggatcatgctcactttctggctggtagccctagtgtgtgccctagccatcctgagatccaaaattatgacagccttaaaagaggatgcccaggtggacctgtttcgtgacatcactttctacgtctacttttccctcttactcattcagctcgtcttgtcctgtttctcagatcgctcacccctgttctcggaaaccatccacgaccctaatccctgcccagagtccagcgcttccttcctgtcgaggatcaccttctggtggatcacagggttgattgtccggggctaccgccagcccctggagggcagtgacctctggtccttaaacaaggaggacacgtcggaacaagtcgtgcctgttttggtaaagaactggaagaaggaatgcgccaagactaggaagcagccggtgaaggttgtgtactcctccaaggatcctgcccagccgaaagagagttccaaggtggatgcgaatgaggaggtggaggctttgatcgtcaagtccccacagaaggagtggaacccctctctgtttaaggtgttatacaagacctttgggccctacttcctcatgagcttcttcttcaaggccatccacgacctgatgatgttttccgggccgcagatcttaaagttgctcatcaagttcgtgaatgacacgaaggccccagactggcagggctacttctacaccgtgctgctgtttgtcactgcctgcctgcagaccctcgtgctgcaccagtacttccacatctgcttcgtcagtggcatgaggatcaagaccgctgtcattggggctgtctatcggaaggccctggtgatcaccaattcagccagaaaatcctccacggtcggggagattgtcaacctcatgtctgtggacgctcagaggttcatggacttggccacgtacattaacatgatctggtcagcccccctgcaagtcatccttgctctctacctcctgtggctgaatctgggcccttccgtcctggctggagtggcggtgatggtcctcatggtgcccgtcaatgctgtgatggcgatgaagaccaagacgtatcaggtggcccacatgaagagcaaagacaatcggatcaagctgatgaacgaaattctcaatgggatcaaagtgctaaagctttatgcctgggagctggacaaaagagggtaagtcctacatgaatgctgagaagggctgcagactgaagcccggggagc

SEQ ID NO: 444723 - DNA, 675 bp, Homo sapiens
gctggtctcaaactcctgaccccaagtgatccagccaccttggcctcccaaagtgctgggattacaggtgtgaaccaccactcctggccatgattgttattttgtattgttttgaaatcaggaagtgtgaatcctccaacttgattcttatttttcatgattgttttgactgttctggatccttgagtttccatgtgaattttaaagttagctcataatttctacctggcagccagctgggcttttgatggggattgccttgactctagatcagtttggagccatcagttttctaagtctttaacttattcaactcgtttaatcttacctaccttggaggtaggtcctacttttatcctcatttcacagaggaggaaactgaggcccagagagcttaaggaccttgtctgaagtcacgcagctggccagtggccaagccagaccttgagccggtggctctggagcccgtggctctggagcccgtgtttgtaaccactgtgctgagctgcctctttccctgggcttgttgtctttgactctgccttccctgaagggtgacattccctggccatgtccctgtggtagggggctgcatctctggcagaccccacaacggcttcacctccttgtgttccaggcagccggtgaaggttgtgtactcctccaaggatcctg

SEQ ID NO: 444724 - DNA, 393 bp, Homo sapiens
tccaaaagtgctaggattacaggcgtgagccaccacacccagccccagaatgtgatctttttcttccttccttccccaccatgtaggatgcccaggtggacctgtttcgtgacatcactttctacgtctacttttccctcttactcattcagctcgtcttgtcctgtttctcagatcgctcacccctgttctcggaaaccatccacgaccctgtaagtgtgaccacagatgagtgtgtgtgcgtgtgtgtgtgagagagatgcgtgacacagtaccagctaacatttcttagatccatccaggatctcgttccagcctccctcaacccctgatacagggaatatcatcccacctactttacagatggaaaaactgaggcttagatgtggctgg

SEQ ID NO: 444725 - DNA, 231 bp, Homo sapiens
tctgggtctggggctgcctccagaactgcaggttgagtttcttctttcagaacccgtggctgatgtcaccagataataatgcctagcgccattcgtgccaagcgtctggggttgaaccattcaagcagagaaagagagtgttctgtgcatgtggagtcgcacagctcagcctgtccctgacatgtctctgtgctttgtaggcgggggcacgaacagcatcaccgtgaggaa

SEQ ID NO: 444726 - DNA, 5760 bp, Homo sapiens
ccaggcggcgttgcggccccggccccggctccctgcgccgccgccgccgccgccgccgccgccgccgccgccgccgccagcgctagcgccagcagccgggcccgatcacccgccgcccggtgcccgccgccgcccgcgccagcaaccgggcccgatcacccgccgcccggtgcccgccgccgcccgcgccaccggcatggcgctccggggcttctgcagcgccgatggctccgacccgctctgggactggaatgtcacgtggaataccagcaaccccgacttcaccaagtgctttcagaacacggtcctcgtgtgggtgccttgtttttacctctgggcctgtttccccttctacttcctctatctctcccgacatgaccgaggctacattcagatgacacctctcaacaaaaccaaaactgccttgggatttttgctgtggatcgtctgctgggcagacctcttctactctttctgggaaagaagtcggggcatattcctggccccagtgtttctggtcagcccaactctcttgggcatcaccacgctgcttgctacctttttaattcagctggagaggaggaagggagttcagtcttcagggatcatgctcactttctggctggtagccctagtgtgtgccctagccatcctgagatccaaaattatgacagccttaaaagaggatgcccaggtggacctgtttcgtgacatcactttctacgtctacttttccctcttactcattcagctcgtcttgtcctgtttctcagatcgctcacccctgttctcggaaaccatccacgaccctaatccctgcccagagtccagcgcttccttcctgtcgaggatcaccttctggtggatcacagggttgattgtccggggctaccgccagcccctggagggcagtgacctctggtccttaaacaaggaggacacgtcggaacaagtcgtgcctgttttggtaaagaactggaagaaggaatgcgccaagactaggaagcagccggtgaaggttgtgtactcctccaaggatcctgcccagccgaaagagagttccaaggtggatgcgaatgaggaggtggaggctttgatcgtcaagtccccacagaaggagtggaacccctctctgtttaaggtgttatacaagacctttgggccctacttcctcatgagcttcttcttcaaggccatccacgacctgatgatgttttccgggccgcagatcttaaagttgctcatcaagttcgtgaatgacacgaaggccccagactggcagggctacttctacaccgtgctgctgtttgtcactgcctgcctgcagaccctcgtgctgcaccagtacttccacatctgcttcgtcagtggcatgaggatcaagaccgctgtcattggggctgtctatcggaaggccctggtgatcaccaattcagccagaaaatcctccacggtcggggagattgtcaacctcatgtctgtggacgctcagaggttcatggacttggccacgtacattaacatgatctggtcagcccccctgcaagtcatccttgctctctacctcctgtggctgaatctgggcccttccgtcctggctggagtggcggtgatggtcctcatggtgcccgtcaatgctgtgatggcgatgaagaccaagacgtatcaggtggcccacatgaagagcaaagacaatcggatcaagctgatgaacgaaattctcaatgggatcaaagtgctaaagctttatgcctgggagctggcattcaaggacaaggtgctggccatcaggcaggaggagctgaaggtgctgaagaagtctgcctacctgtcagccgtgggcaccttcacctgggtctgcacgccctttctggtggccttgtgcacatttgccgtctacgtgaccattgacgagaacaacatcctggatgcccagacagccttcgtgtctttggccttgttcaacatcctccggtttcccctgaacattctccccatggtcatcagcagcatcgtgcaggcgagtgtctccctcaaacgcctgaggatctttctctcccatgaggagctggaacctgacagcatcgagcgacggcctgtcaaagacggcgggggcacgaacagcatcaccgtgaggaatgccacattcacctgggccaggagcgaccctcccacactgaatggcatcaccttctccatccccgaaggtgctttggtggccgtggtgggccaggtgggctgcggaaagtcgtccctgctctcagccctcttggctgagatggacaaagtggaggggcacgtggctatcaagggctccgtggcctatgtgccacagcaggcctggattcagaatgattctctccgagaaaacatcctttttggatgtcagctggaggaaccatattacaggtccgtgatacaggcctgtgccctcctcccagacctggaaatcctgcccagtggggatcggacagagattggcgagaagacgcggatcttggtcacgcacagcatgagctacttgccgcaggtggacgtcatcatcgtcatgagtggcggcaagatctctgagatgggctcctaccaggagctgctggctcgagacggcgccttcgctgagttcctgcgtacctatgccagcacagagcaggagcaggatgcagaggagaacggggtcacgggcgtcagcggtccagggaaggaagcaaagcaaatggagaatggcatgctggtgacggacagtgcagggaagcaactgcagagacagctcagcagctcctcctcctatagtggggacatcagcaggcaccacaacagcaccgcagaactgcagaaagctgaggccaagaaggaggagacctggaagctgatggaggctgacaaggcgcagacagggcaggtcaagctttccgtgtactgggactacatgaaggccatcggactcttcatctccttcctcagcatcttccttttcatgtgtaaccatgtgtccgcgctggcttccaactattggctcagcctctggactgatgaccccatcgtcaacgggactcaggagcacacgaaagtccggctgagcgtctatggagccctgggcatttcacaagggatcgccgtgtttggctactccatggccgtgtccatcggggggatcttggcttcccgctgtctgcacgtggacctgctgcacagcatcctgcggtcacccatgagcttctttgagcggacccccagtgggaacctggtgaaccgcttctccaaggagctggacacagtggactccatgatcccggaggtcatcaagatgttcatgggctccctgttcaacgtcattggtgcctgcatcgttatcctgctggccacgcccatcgccgccatcatcatcccgccccttggcctcatctacttcttcgtccagaggttctacgtggcttcctcccggcagctgaagcgcctcgagtcggtcagccgctccccggtctattcccatttcaacgagaccttgctgggggtcagcgtcattcgagccttcgaggagcaggagcgcttcatccaccagagtgacctgaaggtggacgagaaccagaaggcctattaccccagcatcgtggccaacaggtggctggccgtgcggctggagtgtgtgggcaactgcatcgttctgtttgctgccctgtttgcggtgatctccaggcacagcctcagtgctggcttggtgggcctctcagtgtcttactcattgcaggtcaccacgtacttgaactggctggttcggatgtcatctgaaatggaaaccaacatcgtggccgtggagaggctcaaggagtattcagagactgagaaggaggcgccctggcaaatccaggagacagctccgcccagcagctggccccaggtgggccgagtggaattccggaactactgcctgcgctaccgagaggacctggacttcgttctcaggcacatcaatgtcacgatcaatgggggagaaaaggtcggcatcgtggggcggacgggagctgggaagtcgtccctgaccctgggcttatttcggatcaacgagtctgccgaaggagagatcatcatcgatggcatcaacatcgccaagatcggcctgcacgacctccgcttcaagatcaccatcatcccccaggaccctgttttgttttcgggttccctccgaatgaacctggacccattcagccagtactcggatgaagaagtctggacgtccctggagctggcccacctgaaggacttcgtgtcagcccttcctgacaagctagaccatgaatgtgcagaaggcggggagaacctcagtgtcgggcagcgccagcttgtgtgcctagcccgggccctgctgaggaagacgaagatccttgtgttggatgaggccacggcagccgtggacctggaaacggacgacctcatccagtccaccatccggacacagttcgaggactgcaccgtcctcaccatcgcccaccggctcaacaccatcatggactacacaagggtgatcgtcttggacaaaggagaaatccaggagtacggcgccccatcggacctcctgcagcagagaggtcttttctacagcatggccaaagacgccggcttggtgtgagccccagagctggcatatctggtcagaactgcagggcctatatgccagcgcccagggaggagtcagtacccctggtaaaccaagcctcccacactgaaaccaaaacataaaaaccaaacccagacaaccaaaacatattcaaagcagcagccaccgccatccggtcccctgcctggaactggctgtgaagacccaggagagacagagatgcgaaccacccaaaacacgcacaccctgcccctggtgccctgagacagacacacagcctcacgcccccaggaatgcaagtggtttcctggtgcttcccacggaggagttttggcagccagacttctggaggaattggttgtatagaagatcctagtgaccaaattcagcctactgcctcggatctctccagccgaagtctgtggactgcaagtctttgagatgcttctggctcccatcacctctaacatccttgtctgggtctaccaggaacgcttcatttccttggggctgcagttttgtggttgaggggcctggagaaaatcattttctccccttggcagtgtcccagggccctggatggtcctcttaccaacatctggtcttccaggcactcaaaagctgggaaccagcatctcagcgccagctctaccagttctcgttttgggccagaggcagcctctgcactcccacgcctgtcctcctggaagggacctggttggactaacggctaacctggacctggaactgtagggccaggggattgtctcagggccgacgttccacctggggcttccctccccacccaccccgactccaggctttcccttttttcttttgttcaacattgtaagaacaatcaatgctgttattactgatcccaccatgattgatgtggggtaaatattaaggagatggcctcatgggaatttgaccttgactagaaatagagactgagagtgagcaaccagctggaaggtactatgccagtcctagcagaaaaatgtgttaggggcctggcccaaagcagtgttggttgcttacagtgttgattgattttgttcttttttcttaccacctcttttctttccctctcatggtacctgctcatggttatgaagctttcaaagtaaagaacacgaaatacc

SEQ ID NO: 444727 - DNA, 5781 bp, Homo sapiens
ccaggcggcgttgcggccccggccccggctccctgcgccgccgccgccgccgccgccgccgccgccgccgccgccgccagcgctagcgccagcagccgggcccgatcacccgccgcccggtgcccgccgccgcccgcgccagcaaccgggcccgatcacccgccgcccggtgcccgccgccgcccgcgccaccggcatggcgctccggggcttctgcagcgccgatggctccgacccgctctgggactggaatgtcacgtggaataccagcaaccccgacttcaccaagtgctttcagaacacggtcctcgtgtgggtgccttgtttttacctctgggcctgtttccccttctacttcctctatctctcccgacatgaccgaggctacattcagatgacacctctcaacaaaaccaaaactgccttgggatttttgctgtggatcgtctgctgggcagacctcttctactctttctgggaaagaagtcggggcatattcctggccccagtgtttctggtcagcccaactctcttgggcatcaccacgctgcttgctacctttttaattcagctggagaggaggaagggagttcagtcttcagggatcatgctcactttctggctggtagccctagtgtgtgccctagccatcctgagatccaaaattatgacagccttaaaagaggatgcccaggtggacctgtttcgtgacatcactttctacgtctacttttccctcttactcattcagctcgtcttgtcctgtttctcagatcgctcacccctgttctcggaaaccatccacgaccctaatccctgcccagagtccagcgcttccttcctgtcgaggatcaccttctggtggatcacagggttgattgtccggggctaccgccagcccctggagggcagtgacctctggtccttaaacaaggaggacacgtcggaacaagtcgtgcctgttttggtaaagaactggaagaaggaatgcgccaagactaggaagcagccggtgaaggttgtgtactcctccaaggatcctgcccagccgaaagagagttccaaggtggatgcgaatgaggaggtggaggctttgatcgtcaagtccccacagaaggagtggaacccctctctgtttaaggtgttatacaagacctttgggccctacttcctcatgagcttcttcttcaaggccatccacgacctgatgatgttttccgggccgcagatcttaaagttgctcatcaagttcgtgaatgacacgaaggccccagactggcagggctacttctacaccgtgctgctgtttgtcactgcctgcctgcagaccctcgtgctgcaccagtacttccacatctgcttcgtcagtggcatgaggatcaagaccgctgtcattggggctgtctatcggaaggccctggtgatcaccaattcagccagaaaatcctccacggtcggggagattgtcaacctcatgtctgtggacgctcagaggttcatggacttggccacgtacattaacatgatctggtcagcccccctgcaagtcatccttgctctctacctcctgtggctgaatctgggcccttccgtcctggctggagtggcggtgatggtcctcatggtgcccgtcaatgctgtgatggcgatgaagaccaagacgtatcaggtggcccacatgaagagcaaagacaatcggatcaagctgatgaacgaaattctcaatgggatcaaagtgctaaagctttatgcctgggagctggcattcaaggacaaggtgctggccatcaggcaggaggagctgaaggtgctgaagaagtctgcctacctgtcagccgtgggcaccttcacctgggtctgcacgccctttctggcgagtgtctccctcaaacgcctgaggatctttctctcccatgaggagctggaacctgacagcatcgagcgacggcctgtcaaagacggcgggggcacgaacagcatcaccgtgaggaatgccacattcacctgggccaggagcgaccctcccacactgaatggcatcaccttctccatccccgaaggtgctttggtggccgtggtgggccaggtgggctgcggaaagtcgtccctgctctcagccctcttggctgagatggacaaagtggaggggcacgtggctatcaagggctccgtggcctatgtgccacagcaggcctggattcagaatgattctctccgagaaaacatcctttttggatgtcagctggaggaaccatattacaggtccgtgatacaggcctgtgccctcctcccagacctggaaatcctgcccagtggggatcggacagagattggcgagaagggcgtgaacctgtctgggggccagaagcagcgcgtgagcctggcccgggccgtgtactccaacgctgacatttacctcttcgatgatcccctctcagcagtggatgcccatgtgggaaaacacatctttgaaaatgtgattggccccaaggggatgctgaagaacaagacgcggatcttggtcacgcacagcatgagctacttgccgcaggtggacgtcatcatcgtcatgagtggcggcaagatctctgagatgggctcctaccaggagctgctggctcgagacggcgccttcgctgagttcctgcgtacctatgccagcacagagcaggagcaggatgcagaggagaacggggtcacgggcgtcagcggtccagggaaggaagcaaagcaaatggagaatggcatgctggtgacggacagtgcagggaagcaactgcagagacagctcagcagctcctcctcctatagtggggacatcagcaggcaccacaacagcaccgcagaactgcagaaagctgaggccaagaaggaggagacctggaagctgatggaggctgacaaggcgcagacagggcaggtcaagctttccgtgtactgggactacatgaaggccatcggactcttcatctccttcctcagcatcttccttttcatgtgtaaccatgtgtccgcgctggcttccaactattggctcagcctctggactgatgaccccatcgtcaacgggactcaggagcacacgaaagtccggctgagcgtctatggagccctgggcatttcacaagggatcgccgtgtttggctactccatggccgtgtccatcggggggatcttggcttcccgctgtctgcacgtggacctgctgcacagcatcctgcggtcacccatgagcttctttgagcggacccccagtgggaacctggtgaaccgcttctccaaggagctggacacagtggactccatgatcccggaggtcatcaagatgttcatgggctccctgttcaacgtcattggtgcctgcatcgttatcctgctggccacgcccatcgccgccatcatcatcccgccccttggcctcatctacttcttcgtccagaggttctacgtggcttcctcccggcagctgaagcgcctcgagtcggtcagccgctccccggtctattcccatttcaacgagaccttgctgggggtcagcgtcattcgagccttcgaggagcaggagcgcttcatccaccagagtgacctgaaggtggacgagaaccagaaggcctattaccccagcatcgtggccaacaggtggctggccgtgcggctggagtgtgtgggcaactgcatcgttctgtttgctgccctgtttgcggtgatctccaggcacagcctcagtgctggcttggtgggcctctcagtgtcttactcattgcaggtcaccacgtacttgaactggctggttcggatgtcatctgaaatggaaaccaacatcgtggccgtggagaggctcaaggagtattcagagactgagaaggaggcgccctggcaaatccaggagacagctccgcccagcagctggccccaggtgggccgagtggaattccggaactactgcctgcgctaccgagaggacctggacttcgttctcaggcacatcaatgtcacgatcaatgggggagaaaaggtcggcatcgtggggcggacgggagctgggaagtcgtccctgaccctgggcttatttcggatcaacgagtctgccgaaggagagatcatcatcgatggcatcaacatcgccaagatcggcctgcacgacctccgcttcaagatcaccatcatcccccaggaccctgttttgttttcgggttccctccgaatgaacctggacccattcagccagtactcggatgaagaagtctggacgtccctggagctggcccacctgaaggacttcgtgtcagcccttcctgacaagctagaccatgaatgtgcagaaggcggggagaacctcagtgtcgggcagcgccagcttgtgtgcctagcccgggccctgctgaggaagacgaagatccttgtgttggatgaggccacggcagccgtggacctggaaacggacgacctcatccagtccaccatccggacacagttcgaggactgcaccgtcctcaccatcgcccaccggctcaacaccatcatggactacacaagggtgatcgtcttggacaaaggagaaatccaggagtacggcgccccatcggacctcctgcagcagagaggtcttttctacagcatggccaaagacgccggcttggtgtgagccccagagctggcatatctggtcagaactgcagggcctatatgccagcgcccagggaggagtcagtacccctggtaaaccaagcctcccacactgaaaccaaaacataaaaaccaaacccagacaaccaaaacatattcaaagcagcagccaccgccatccggtcccctgcctggaactggctgtgaagacccaggagagacagagatgcgaaccacccaaaacacgcacaccctgcccctggtgccctgagacagacacacagcctcacgcccccaggaatgcaagtggtttcctggtgcttcccacggaggagttttggcagccagacttctggaggaattggttgtatagaagatcctagtgaccaaattcagcctactgcctcggatctctccagccgaagtctgtggactgcaagtctttgagatgcttctggctcccatcacctctaacatccttgtctgggtctaccaggaacgcttcatttccttggggctgcagttttgtggttgaggggcctggagaaaatcattttctccccttggcagtgtcccagggccctggatggtcctcttaccaacatctggtcttccaggcactcaaaagctgggaaccagcatctcagcgccagctctaccagttctcgttttgggccagaggcagcctctgcactcccacgcctgtcctcctggaagggacctggttggactaacggctaacctggacctggaactgtagggccaggggattgtctcagggccgacgttccacctggggcttccctccccacccaccccgactccaggctttcccttttttcttttgttcaacattgtaagaacaatcaatgctgttattactgatcccaccatgattgatgtggggtaaatattaaggagatggcctcatgggaatttgaccttgactagaaatagagactgagagtgagcaaccagctggaaggtactatgccagtcctagcagaaaaatgtgttaggggcctggcccaaagcagtgttggttgcttacagtgttgattgattttgttcttttttcttaccacctcttttctttccctctcatggtacctgctcatggttatgaagctttcaaagtaaagaacacgaaatacc

SEQ ID NO: 444728 - DNA, 5733 bp, Homo sapiens
ccaggcggcgttgcggccccggccccggctccctgcgccgccgccgccgccgccgccgccgccgccgccgccgccgccagcgctagcgccagcagccgggcccgatcacccgccgcccggtgcccgccgccgcccgcgccagcaaccgggcccgatcacccgccgcccggtgcccgccgccgcccgcgccaccggcatggcgctccggggcttctgcagcgccgatggctccgacccgctctgggactggaatgtcacgtggaataccagcaaccccgacttcaccaagtgctttcagaacacggtcctcgtgtgggtgccttgtttttacctctgggcctgtttccccttctacttcctctatctctcccgacatgaccgaggctacattcagatgacacctctcaacaaaaccaaaactgccttgggatttttgctgtggatcgtctgctgggcagacctcttctactctttctgggaaagaagtcggggcatattcctggccccagtgtttctggtcagcccaactctcttgggcatcaccacgctgcttgctacctttttaattcagctggagaggaggaagggagttcagtcttcagggatcatgctcactttctggctggtagccctagtgtgtgccctagccatcctgagatccaaaattatgacagccttaaaagaggatgcccaggtggacctgtttcgtgacatcactttctacgtctacttttccctcttactcattcagctcgtcttgtcctgtttctcagatcgctcacccctgttctcggaaaccatccacgaccctaatccctgcccagagtccagcgcttccttcctgtcgaggatcaccttctggtggatcacagggttgattgtccggggctaccgccagcccctggagggcagtgacctctggtccttaaacaaggaggacacgtcggaacaagtcgtgcctgttttggtaaagaactggaagaaggaatgcgccaagactaggaagcagccggtgaaggttgtgtactcctccaaggatcctgcccagccgaaagagagttccaaggtggatgcgaatgaggaggtggaggctttgatcgtcaagtccccacagaaggagtggaacccctctctgtttaaggtgttatacaagacctttgggccctacttcctcatgagcttcttcttcaaggccatccacgacctgatgatgttttccgggccgcagatcttaaagttgctcatcaagttcgtgaatgacacgaaggccccagactggcagggctacttctacaccgtgctgctgtttgtcactgcctgcctgcagaccctcgtgctgcaccagtacttccacatctgcttcgtcagtggcatgaggatcaagaccgctgtcattggggctgtctatcggaaggccctggtgatcaccaattcagccagaaaatcctccacggtcggggagattgtcaacctcatgtctgtggacgctcagaggttcatggacttggccacgtacattaacatgatctggtcagcccccctgcaagtcatccttgctctctacctcctgtggctgaatctgggcccttccgtcctggctggagtggcggtgatggtcctcatggtgcccgtcaatgctgtgatggcgatgaagaccaagacgtatcaggtggcccacatgaagagcaaagacaatcggatcaagctgatgaacgaaattctcaatgggatcaaagtgctaaagctttatgcctgggagctggcattcaaggacaaggtgctggccatcaggcaggaggagctgaaggtgctgaagaagtctgcctacctgtcagccgtgggcaccttcacctgggtctgcacgccctttctggtggccttgtgcacatttgccgtctacgtgaccattgacgagaacaacatcctggatgcccagacagccttcgtgtctttggccttgttcaacatcctccggtttcccctgaacattctccccatggtcatcagcagcatcgtgcaggcgagtgtctccctcaaacgcctgaggatctttctctcccatgaggagctggaacctgacagcatcgagcgacggcctgtcaaagacggcgggggcacgaacagcatcaccgtgaggaatgccacattcacctgggccaggagcgaccctcccacactgaatggcatcaccttctccatccccgaaggtgctttggtggccgtggtgggccaggtgggctgcggaaagtcgtccctgctctcagccctcttggctgagatggacaaagtggaggggcacgtggctatcaagggctccgtggcctatgtgccacagcaggcctggattcagaatgattctctccgagaaaacatcctttttggatgtcagctggaggaaccatattacaggtccgtgatacaggcctgtgccctcctcccagacctggaaatcctgcccagtggggatcggacagagattggcgagaagggcgtgaacctgtctgggggccagaagcagcgcgtgagcctggcccgggccgtgtactccaacgctgacatttacctcttcgatgatcccctctcagcagtggatgcccatgtgggaaaacacatctttgaaaatgtgattggccccaaggggatgctgaagaacaagacgcggatcttggtcacgcacagcatgagctacttgccgcaggtggacgtcatcatcgtcatgagtggcggcaagatctctgagatgggctcctaccaggagctgctggctcgagacggcgccttcgctgagttcctgcgtacctatgccagcacagagcaggagcaggatgcagaggagaacggggtcacgggcgtcagcggtccagggaaggaagcaaagcaaatggagaatggcatgctggtgacggacagtgcagggaagcaactgcagagacagctcagcagctcctcctcctatagtggggacatcagcaggcaccacaacagcaccgcagaactgcagaaagctgaggccaagaaggaggagacctggaagctgatggaggctgacaaggcgcagacagggcaggtcaagctttccgtgtactgggactacatgaaggccatcggactcttcatctccttcctcagcatcttccttttcatgtgtaaccatgtgtccgcgctggcttccaactattggctcagcctctggactgatgaccccatcgtcaacgggactcaggagcacacgaaagtccggctgagcgtctatggagccctgggcatttcacaagggatcgccgtgtttggctactccatggccgtgtccatcggggggatcttggcttcccgctgtctgcacgtggacctgctgcacagcatcctgcggtcacccatgagcttctttgagcggacccccagtgggaacctggtgaaccgcttctccaaggagctggacacagtggactccatgatcccggaggtcatcaagatgttcatgggctccctgttcaacgtcattggtgcctgcatcgttatcctgctggccacgcccatcgccgccatcatcatcccgccccttggcctcatctacttcttcgtccagaggttctacgtggcttcctcccggcagctgaagcgcctcgagtcggtcagccgctccccggtctattcccatttcaacgagaccttgctgggggtcagcgtcattcgagccttcgaggagcaggagcgcttcatccaccagagtgacctgaaggtggacgagaaccagaaggcctattaccccagcatcgtggccaacaggtggctggccgtgcggctggagtgtgtgggcaactgcatcgttctgtttgctgccctgtttgcggtgatctccaggcacagcctcagtgctggcttggtgggcctctcagtgtcttactcattgcaggtcaccacgtacttgaactggctggttcggatgtcatctgaaatggaaaccaacatcgtggccgtggagaggctcaaggagtattcagagactgagaaggaggcgccctggcaaatccaggagacagctccgcccagcagctggccccaggtgggccgagtggaattccggaactactgcctgcgctaccgagaggacctggacttcgttctcaggcacatcaatgtcacgatcaatgggggagaaaaggtcggcatcgtggggcggacgggagctgggaagtcgtccctgaccctgggcttatttcggatcaacgagtctgccgaaggagagatcatcatcgatggcatcaacatcgccaagatcggcctgcacgacctccgcttcaagatcaccatcatcccccaggaccctgttttgttttcgggttccctccgaatgaacctggacccattcagccagtactcggatgaagaagtctggacgtccctggagctggcccacctgaaggacttcgtgtcagcccttcctgacaagctagaccatgaatgtgcagaaggcggggagaacctcagggtgatcgtcttggacaaaggagaaatccaggagtacggcgccccatcggacctcctgcagcagagaggtcttttctacagcatggccaaagacgccggcttggtgtgagccccagagctggcatatctggtcagaactgcagggcctatatgccagcgcccagggaggagtcagtacccctggtaaaccaagcctcccacactgaaaccaaaacataaaaaccaaacccagacaaccaaaacatattcaaagcagcagccaccgccatccggtcccctgcctggaactggctgtgaagacccaggagagacagagatgcgaaccacccaaaacacgcacaccctgcccctggtgccctgagacagacacacagcctcacgcccccaggaatgcaagtggtttcctggtgcttcccacggaggagttttggcagccagacttctggaggaattggttgtatagaagatcctagtgaccaaattcagcctactgcctcggatctctccagccgaagtctgtggactgcaagtctttgagatgcttctggctcccatcacctctaacatccttgtctgggtctaccaggaacgcttcatttccttggggctgcagttttgtggttgaggggcctggagaaaatcattttctccccttggcagtgtcccagggccctggatggtcctcttaccaacatctggtcttccaggcactcaaaagctgggaaccagcatctcagcgccagctctaccagttctcgttttgggccagaggcagcctctgcactcccacgcctgtcctcctggaagggacctggttggactaacggctaacctggacctggaactgtagggccaggggattgtctcagggccgacgttccacctggggcttccctccccacccaccccgactccaggctttcccttttttcttttgttcaacattgtaagaacaatcaatgctgttattactgatcccaccatgattgatgtggggtaaatattaaggagatggcctcatgggaatttgaccttgactagaaatagagactgagagtgagcaaccagctggaaggtactatgccagtcctagcagaaaaatgtgttaggggcctggcccaaagcagtgttggttgcttacagtgttgattgattttgttcttttttcttaccacctcttttctttccctctcatggtacctgctcatggttatgaagctttcaaagtaaagaacacgaaatacc

SEQ ID NO: 444729 - DNA, 4703 bp, Homo sapiens
tcccctgttgaccaggggtcaaagtataaaatagtagaacaagaatagggacccaggtgtgtcggatttcagaacccgtggctgatgtcaccagataataatgcctagcgccattcgtgccaagcgtctggggttgaaccattcaagcagagaaagagagtgttctgtgcatgtggagtcgcacagctcagcctgtccctgacatgtctctgtgctttgtaggcgggggcacgaacagcatcaccgtgaggaatgccacattcacctgggccaggagcgaccctcccacactgaatggcatcaccttctccatccccgaaggtgctttggtggccgtggtgggccaggtgggctgcggaaagtcgtccctgctctcagccctcttggctgagatggacaaagtggaggggcacgtggctatcaagggctccgtggcctatgtgccacagcaggcctggattcagaatgattctctccgagaaaacatcctttttggatgtcagctggaggaaccatattacaggtccgtgatacaggcctgtgccctcctcccagacctggaaatcctgcccagtggggatcggacagagattggcgagaagggcgtgaacctgtctgggggccagaagcagcgcgtgagcctggcccgggccgtgtactccaacgctgacatttacctcttcgatgatcccctctcagcagtggatgcccatgtgggaaaacacatctttgaaaatgtgattggccccaaggggatgctgaagaacaagacgcggatcttggtcacgcacagcatgagctacttgccgcaggtggacgtcatcatcgtcatgagtggcggcaagatctctgagatgggctcctaccaggagctgctggctcgagacggcgccttcgctgagttcctgcgtacctatgccagcacagagcaggagcaggatgcagaggagaacggggtcacgggcgtcagcggtccagggaaggaagcaaagcaaatggagaatggcatgctggtgacggacagtgcagggaagcaactgcagagacagctcagcagctcctcctcctatagtggggacatcagcaggcaccacaacagcaccgcagaactgcagaaagctgaggccaagaaggaggagacctggaagctgatggaggctgacaaggcgcagacagggcaggtcaagctttccgtgtactgggactacatgaaggccatcggactcttcatctccttcctcagcatcttccttttcatgtgtaaccatgtgtccgcgctggcttccaactattggctcagcctctggactgatgaccccatcgtcaacgggactcaggagcacacgaaagtccggctgagcgtctatggagccctgggcatttcacaagggatcgccgtgtttggctactccatggccgtgtccatcggggggatcttggcttcccgctgtctgcacgtggacctgctgcacagcatcctgcggtcacccatgagcttctttgagcggacccccagtgggaacctggtgaaccgcttctccaaggagctggacacagtggactccatgatcccggaggtcatcaagatgttcatgggctccctgttcaacgtcattggtgcctgcatcgttatcctgctggccacgcccatcgccgccatcatcatcccgccccttggcctcatctacttcttcgtccagaggttctacgtggcttcctcccggcagctgaagcgcctcgagtcggtcagccgctccccggtctattcccatttcaacgagaccttgctgggggtcagcgtcattcgagccttcgaggagcaggagcgcttcatccaccagagtgacctgaaggtggacgagaaccagaaggcctattaccccagcatcgtggccaacaggtggctggccgtgcggctggagtgtgtgggcaactgcatcgttctgtttgctgccctgtttgcggtgatctccaggcacagcctcagtgctggcttggtgggcctctcagtgtcttactcattgcaggtcaccacgtacttgaactggctggttcggatgtcatctgaaatggaaaccaacatcgtggccgtggagaggctcaaggagtattcagagactgagaaggaggcgccctggcaaatccaggagacagctccgcccagcagctggccccaggtgggccgagtggaattccggaactactgcctgcgctaccgagaggacctggacttcgttctcaggcacatcaatgtcacgatcaatgggggagaaaaggtcggcatcgtggggcggacgggagctgggaagtcgtccctgaccctgggcttatttcggatcaacgagtctgccgaaggagagatcatcatcgatggcatcaacatcgccaagatcggcctgcacgacctccgcttcaagatcaccatcatcccccaggaccctgttttgttttcgggttccctccgaatgaacctggacccattcagccagtactcggatgaagaagtctggacgtccctggagctggcccacctgaaggacttcgtgtcagcccttcctgacaagctagaccatgaatgtgcagaaggcggggagaacctcagtgtcgggcagcgccagcttgtgtgcctagcccgggccctgctgaggaagacgaagatccttgtgttggatgaggccacggcagccgtggacctggaaacggacgacctcatccagtccaccatccggacacagttcgaggactgcaccgtcctcaccatcgcccaccggctcaacaccatcatggactacacaagggtgatcgtcttggacaaaggagaaatccaggagtacggcgccccatcggacctcctgcagcagagaggtcttttctacagcatggccaaagacgccggcttggtgtgagccccagagctggcatatctggtcagaactgcagggcctatatgccagcgcccagggaggagtcagtacccctggtaaaccaagcctcccacactgaaaccaaaacataaaaaccaaacccagacaaccaaaacatattcaaagcagcagccaccgccatccggtcccctgcctggaactggctgtgaagacccaggagagacagagatgcgaaccacccaaaacacgcacaccctgcccctggtgccctgagacagacacacagcctcacgcccccaggaatgcaagtggtttcctggtgcttcccacggaggagttttggcagccagacttctggaggaattggttgtatagaagatcctagtgaccaaattcagcctactgcctcggatctctccagccgaagtctgtggactgcaagtctttgagatgcttctggctcccatcacctctaacatccttgtctgggtctaccaggaacgcttcatttccttggggctgcagttttgtggttgaggggcctggagaaaatcattttctccccttggcagtgtcccagggccctggatggtcctcttaccaacatctggtcttccaggcactcaaaagctgggaaccagcatctcagcgccagctctaccagttctcgttttgggccagaggcagcctctgcactcccacgcctgtcctcctggaagggacctggttggactaacggctaacctggacctggaactgtagggccaggggattgtctcagggccgacgttccacctggggcttccctccccacccaccccgactccaggctttcccttttttcttttgttcaacattgtaagaacaatcaatgctgttattactgatcccaccatgattgatgtggggtaaatattaaggagatggcctcatgggaatttgaccttgactagaaatagagactgagagtgagcaaccagctggaaggtactatgccagtcctagcagaaaaatgtgttaggggcctggcccaaagcagtgttggttgcttacagtgttgattgattttgttcttttttcttaccacctcttttctttccctctcatggtacctgctcatggttatgaagctttcaaagtaaagaacacgaaatacctcccaagtattaccagtgggtaccaaaaaaatgtccccttgagtcttttccttgtttttagatgttaattctctcccttggcatccggttagccccccagggggggcagcattgtggagaacttgatatttagttactgatgctcttccaggacacgaaaagaacccatctttgaatatcaatgatttttttttttttaagtactgttccggggagaaaaacagtctcaaaacttgaacttcttgggaagagaagtgttgggctgagaagtaacattcccaggaaatagtgagaagctcgccctgtgtttgaaaccgtgttggtctctgtgttcctggaagaaaacagggaagcagcatcttttaaagcctgttctttaaggtgtctcgttagagcccaaagtggaatccggaaggcagccagagctgaggctgccccaagactcagacttgctaagaattacgccgccgacttcaaacccagagagcatctttcttttaggcgaaaacgcatatatttattttttgtaagttataccattctttcacattagataaactaagttttgggggatccttttgtaatgacttacactggaaatgcgaacatttgcagtaaaaaaatatatatatatctatatattttatttctttctaaagaa

SEQ ID NO: 444730 - DNA, 3572 bp, Homo sapiens
gcttgcgaccgtatccgctagcgcggcctgggatgcgcttgggctccctggtcaagctttccgtgtactgggactacatgaaggccatcggactcttcatctccttcctcagcatcttccttttcatgtgtaaccatgtgtccgcgctggcttccaactattggctcagcctctggactgatgaccccatcgtcaacgggactcaggagcacacgaaagtccggctgagcgtctatggagccctgggcatttcacaagggatcgccgtgtttggctactccatggccgtgtccatcggggggatcttggcttcccgctgtctgcacgtggacctgctgcacagcatcctgcggtcacccatgagcttctttgagcggacccccagtgggaacctggtgaaccgcttctccaaggagctggacacagtggactccatgatcccggaggtcatcaagatgttcatgggctccctgttcaacgtcattggtgcctgcatcgttatcctgctggccacgcccatcgccgccatcatcatcccgccccttggcctcatctacttcttcgtccagaggttctacgtggcttcctcccggcagctgaagcgcctcgagtcggtcagccgctccccggtctattcccatttcaacgagaccttgctgggggtcagcgtcattcgagccttcgaggagcaggagcgcttcatccaccagagtgacctgaaggtggacgagaaccagaaggcctattaccccagcatcgtggccaacaggtggctggccgtgcggctggagtgtgtgggcaactgcatcgttctgtttgctgccctgtttgcggtgatctccaggcacagcctcagtgctggcttggtgggcctctcagtgtcttactcattgcaggtcaccacgtacttgaactggctggttcggatgtcatctgaaatggaaaccaacatcgtggccgtggagaggctcaaggagtattcagagactgagaaggaggcgccctggcaaatccaggagacagctccgcccagcagctggccccaggtgggccgagtggaattccggaactactgcctgcgctaccgagaggacctggacttcgttctcaggcacatcaatgtcacgatcaatgggggagaaaaggtcggcatcgtggggcggacgggagctgggaagtcgtccctgaccctgggcttatttcggatcaacgagtctgccgaaggagagatcatcatcgatggcatcaacatcgccaagatcggcctgcacgacctccgcttcaagatcaccatcatcccccaggaccctgttttgttttcgggttccctccgaatgaacctggacccattcagccagtactcggatgaagaagtctggacgtccctggagctggcccacctgaaggacttcgtgtcagcccttcctgacaagctagaccatgaatgtgcagaaggcggggagaacctcagtgtcgggcagcgccagcttgtgtgcctagcccgggccctgctgaggaagacgaagatccttgtgttggatgaggccacggcagccgtggacctggaaacggacgacctcatccagtccaccatccggacacagttcgaggactgcaccgtcctcaccatcgcccaccggctcaacaccatcatggactacacaagggtgatcgtcttggacaaaggagaaatccaggagtacggcgccccatcggacctcctgcagcagagaggtcttttctacagcatggccaaagacgccggcttggtgtgagccccagagctggcatatctggtcagaactgcagggcctatatgccagcgcccagggaggagtcagtacccctggtaaaccaagcctcccacactgaaaccaaaacataaaaaccaaacccagacaaccaaaacatattcaaagcagcagccaccgccatccggtcccctgcctggaactggctgtgaagacccaggagagacagagatgcgaaccacccaaaacacgcacaccctgcccctggtgccctgagacagacacacagcctcacgcccccaggaatgcaagtggtttcctggtgcttcccacggaggagttttggcagccagacttctggaggaattggttgtatagaagatcctagtgaccaaattcagcctactgcctcggatctctccagccgaagtctgtggactgcaagtctttgagatgcttctggctcccatcacctctaacatccttgtctgggtctaccaggaacgcttcatttccttggggctgcagttttgtggttgaggggcctggagaaaatcattttctccccttggcagtgtcccagggccctggatggtcctcttaccaacatctggtcttccaggcactcaaaagctgggaaccagcatctcagcgccagctctaccagttctcgttttgggccagaggcagcctctgcactcccacgcctgtcctcctggaagggacctggttggactaacggctaacctggacctggaactgtagggccaggggattgtctcagggccgacgttccacctggggcttccctccccacccaccccgactccaggctttcccttttttcttttgttcaacattgtaagaacaatcaatgctgttattactgatcccaccatgattgatgtggggtaaatattaaggagatggcctcatgggaatttgaccttgactagaaatagagactgagagtgagcaaccagctggaaggtactatgccagtcctagcagaaaaatgtgttaggggcctggcccaaagcagtgttggttgcttacagtgttgattgattttgttcttttttcttaccacctcttttctttccctctcatggtacctgctcatggttatgaagctttcaaagtaaagaacacgaaatacctcccaagtattaccagtgggtaccaaaaaaatgtccccttgagtcttttccttgtttttagatgttaattctctcccttggcatccggttagccccccagggggggcagcattgtggagaacttgatatttagttactgatgctcttccaggacacgaaaagaacccatctttgaatatcaatgatttttttttttttaagtactgttccggggagaaaaacagtctcaaaacttgaacttcttgggaagagaagtgttgggctgagaagtaacattcccaggaaatagtgagaagctcgccctgtgtttgaaaccgtgttggtctctgtgttcctggaagaaaacagggaagcagcatcttttaaagcctgttctttaaggtgtctcgttagagcccaaagtggaatccggaaggcagccagagctgaggctgccccaagactcagacttgctaagaattacgccgccgacttcaaacccagagagcatctttcttttaggcgaaaacgcatatatttattttttgtaagttataccattctttcacattagataaactaagttttgggggatccttttgtaatgacttacactggaaatgcgaacatttgcagtaaaaaaatatatatatatctatatattttatttctttctaaagaa

SEQ ID NO: 444731 - DNA, 3521 bp, Homo sapiens
tcgttgacctcaaagcctatgctgaaaaccacactgctggttccagaaaaccctagaggtgaaaggcttcagagaggcagtacagggtagaggttagcactttgcagcccagatggcctgggtttgaatcccagttctgccccttgctagccatgtgaccttggggaggagattaactagcttctttgtgccttagtctacccatcacatataggaatgagcacctcaggttttttgtgaggattgaatgaactgatgtttgtaaaactgcttagaacgatgcctggggctgtgggctttgtataagcgtgagctattattgtcactgtccttgtcattggtggtgctattcctgtggttcaccaggtgagtgggcacccctgtgagggcagcccggctctaacattttgcctcctggaggtatcggttacgtctagatgttctccagcacagccctgccctgggaggatggcaggagggaaccttcatcaactccccgcgtctgttctctaccccagaggttctacgtggcttcctcccggcagctgaagcgcctcgagtcggtcagccgctccccggtctattcccatttcaacgagaccttgctgggggtcagcgtcattcgagccttcgaggagcaggagcgcttcatccaccagagtgacctgaaggtggacgagaaccagaaggcctattaccccagcatcgtggccaacaggtggctggccgtgcggctggagtgtgtgggcaactgcatcgttctgtttgctgccctgtttgcggtgatctccaggcacagcctcagtgctggcttggtgggcctctcagtgtcttactcattgcaggtcaccacgtacttgaactggctggttcggatgtcatctgaaatggaaaccaacatcgtggccgtggagaggctcaaggagtattcagagactgagaaggaggcgccctggcaaatccaggagacagctccgcccagcagctggccccaggtgggccgagtggaattccggaactactgcctgcgctaccgagaggacctggacttcgttctcaggcacatcaatgtcacgatcaatgggggagaaaaggtcggcatcgtggggcggacgggagctgggaagtcgtccctgaccctgggcttatttcggatcaacgagtctgccgaaggagagatcatcatcgatggcatcaacatcgccaagatcggcctgcacgacctccgcttcaagatcaccatcatcccccaggaccctgttttgttttcgggttccctccgaatgaacctggacccattcagccagtactcggatgaagaagtctggacgtccctggagctggcccacctgaaggacttcgtgtcagcccttcctgacaagctagaccatgaatgtgcagaaggcggggagaacctcagtgtcgggcagcgccagcttgtgtgcctagcccgggccctgctgaggaagacgaagatccttgtgttggatgaggccacggcagccgtggacctggaaacggacgacctcatccagtccaccatccggacacagttcgaggactgcaccgtcctcaccatcgcccaccggctcaacaccatcatggactacacaagggtgatcgtcttggacaaaggagaaatccaggagtacggcgccccatcggacctcctgcagcagagaggtcttttctacagcatggccaaagacgccggcttggtgtgagccccagagctggcatatctggtcagaactgcagggcctatatgccagcgcccagggaggagtcagtacccctggtaaaccaagcctcccacactgaaaccaaaacataaaaaccaaacccagacaaccaaaacatattcaaagcagcagccaccgccatccggtcccctgcctggaactggctgtgaagacccaggagagacagagatgcgaaccacccaaaacacgcacaccctgcccctggtgccctgagacagacacacagcctcacgcccccaggaatgcaagtggtttcctggtgcttcccacggaggagttttggcagccagacttctggaggaattggttgtatagaagatcctagtgaccaaattcagcctactgcctcggatctctccagccgaagtctgtggactgcaagtctttgagatgcttctggctcccatcacctctaacatccttgtctgggtctaccaggaacgcttcatttccttggggctgcagttttgtggttgaggggcctggagaaaatcattttctccccttggcagtgtcccagggccctggatggtcctcttaccaacatctggtcttccaggcactcaaaagctgggaaccagcatctcagcgccagctctaccagttctcgttttgggccagaggcagcctctgcactcccacgcctgtcctcctggaagggacctggttggactaacggctaacctggacctggaactgtagggccaggggattgtctcagggccgacgttccacctggggcttccctccccacccaccccgactccaggctttcccttttttcttttgttcaacattgtaagaacaatcaatgctgttattactgatcccaccatgattgatgtggggtaaatattaaggagatggcctcatgggaatttgaccttgactagaaatagagactgagagtgagcaaccagctggaaggtactatgccagtcctagcagaaaaatgtgttaggggcctggcccaaagcagtgttggttgcttacagtgttgattgattttgttcttttttcttaccacctcttttctttccctctcatggtacctgctcatggttatgaagctttcaaagtaaagaacacgaaatacctcccaagtattaccagtgggtaccaaaaaaatgtccccttgagtcttttccttgtttttagatgttaattctctcccttggcatccggttagccccccagggggggcagcattgtggagaacttgatatttagttactgatgctcttccaggacacgaaaagaacccatctttgaatatcaatgatttttttttttttaagtactgttccggggagaaaaacagtctcaaaacttgaacttcttgggaagagaagtgttgggctgagaagtaacattcccaggaaatagtgagaagctcgccctgtgtttgaaaccgtgttggtctctgtgttcctggaagaaaacagggaagcagcatcttttaaagcctgttctttaaggtgtctcgttagagcccaaagtggaatccggaaggcagccagagctgaggctgccccaagactcagacttgctaagaattacgccgccgacttcaaacccagagagcatctttcttttaggcgaaaacgcatatatttattttttgtaagttataccattctttcacattagataaactaagttttgggggatccttttgtaatgacttacactggaaatgcgaacatttgcagtaaaaaaatatatatatatctatatattttatttctttctaaagaa

SEQ ID NO: 444732 - DNA, 2197 bp, Homo sapiens
ccaggcggcgttgcggccccggccccggctccctgcgccgccgccgccgccgccgccgccgccgccgccgccgccgccagcgctagcgccagcagccgggcccgatcacccgccgcccggtgcccgccgccgcccgcgccagcaaccgggcccgatcacccgccgcccggtgcccgccgccgcccgcgccaccggcatggcgctccggggcttctgcagcgccgatggctccgacccgctctgggactggaatgtcacgtggaataccagcaaccccgacttcaccaagtgctttcagaacacggtcctcgtgtgggtgccttgtttttacctctgggcctgtttccccttctacttcctctatctctcccgacatgaccgaggctacattcagatgacacctctcaacaaaaccaaaactgccttgggatttttgctgtggatcgtctgctgggcagacctcttctactctttctgggaaagaagtcggggcatattcctggccccagtgtttctggtcagcccaactctcttgggcatcaccacgctgcttgctacctttttaattcagctggagaggaggaagggagttcagtcttcagggatcatgctcactttctggctggtagccctagtgtgtgccctagccatcctgagatccaaaattatgacagccttaaaagaggatgcccaggtggacctgtttcgtgacatcactttctacgtctacttttccctcttactcattcagctcgtcttgtcctgtttctcagatcgctcacccctgttctcggaaaccatccacgaccctaatccctgcccagagtccagcgcttccttcctgtcgaggatcaccttctggtggatcacagggttgattgtccggggctaccgccagcccctggagggcagtgacctctggtccttaaacaaggaggacacgtcggaacaagtcgtgcctgttttggtaaagaactggaagaaggaatgcgccaagactaggaagcagccggtgaaggttgtgtactcctccaaggatcctgcccagccgaaagagagttccaaggtggatgcgaatgaggaggtggaggctttgatcgtcaagtccccacagaaggagtggaacccctctctgtttaaggtgttatacaagacctttgggccctacttcctcatgagcttcttcttcaaggccatccacgacctgatgatgttttccgggccgcagatcttaaagttgctcatcaagttcgtgaatgacacgaaggccccagactggcagggctacttctacaccgtgctgctgtttgtcactgcctgcctgcagaccctcgtgctgcaccagtacttccacatctgcttcgtcagtggcatgaggatcaagaccgctgtcattggggctgtctatcggaaggccctggtgatcaccaattcagccagaaaatcctccacggtcggggagattgtcaacctcatgtctgtggacgctcagaggttcatggacttggccacgtacattaacatgatctggtcagcccccctgcaagtcatccttgctctctacctcctgtggctgaatctgggcccttccgtcctggctggagtggcggtgatggtcctcatggtgcccgtcaatgctgtgatggcgatgaagaccaagacgtatcaggtaaggcatgtgtctctgcgggcccccaagccgggccctaggcagaggcctctccatgaggattttagtccagttccttctgctctgtccctggggttctcagccttgcctgccagttggactcacttggggagccttaacaaatgctgatgccccggctgcatatctgggattctgattcacttattgtgggtggggtctggacatcaagatgttttaaagcttcccaggtcattatattgggcagccaagattgagagctcctgacacatggttagaccttgtaggccggtgactggaatcagaaggtctgtgagcctctgagaaagtccttgtttcccacggtcttgtttattatgtgtatgtgtgactcagctttcaagagttgagtacaaattaccccctacttttttcccccttattagctcttaccttataggatacatgctgttaatctctttatttaaattaaaataattaatttctaaaatggggcctgggcagcatggtgaaaccccatctctattg

SEQ ID NO: 444733 - DNA, 731 bp, Homo sapiens
gggagacagaatacactcaagcatgcgagccccaagagggctggggacaggcagtgccctgaaggagaaggcagtgcgggaggggacagagggacacagggctgagagggtgctctgtatcgaccagagatccacaggatgcaagggggtcatttggggaataacattccaggaagggcaaccccccagtgctgaggcctgggaggccaccttgggcagcagagtgagtgagaggggaggtcaggggagtcacagctttaccagatggactggaaattccttactctctcccttcactgcgatcgaaggcgccctggcaaatccaggagacagctccgcccagcagctggccccaggtgggccgagtggaattccggaactactgcctgcgctaccgagaggacctggacttcgttctcaggcacatcaatgtcacgatcaatgggggagaaaaggtgggtacacatcgccccattccctcacccattcccagtcgggcacagggtgccatcgggcaggtgaacctagctgcagcgtctccccagtcactcacggctccacacctttgcttgaatggctttttggggggctgggagtggactgtggcagtaaaagctgttcagagcgcatacaacttgcagaagtgaaggcttttaggtgaactgacagcctgaagaccaaatgagccccacagatttgttttggaagattttttgttgttgttgttgaga

SEQ ID NO: 444734 - DNA, 2974 bp, Homo sapiens
gaagtttgcaggagacccgcgctgcctaggcaaagggacccggcgaccaagacacccccgcgagggcccagggcgcgtccctcccgccaggccccagactccggctctgcgccaccccctcctacgccccggcgcgggcgcagccagtccggcttcctccaggcccccaagtcccggaccgagtgtggggccgcctctccctctcggaaggagccatcgccgctttaagtggaagaggagaggaagggggcgggggagcggggggcggggagcggaggcggaggagggggagggggatccccctggctcccacgtggtccgggcgcctgtgaatcgcgcccaccggagggtctcacagcgaaatacaaaagcagctgggaagcggcggggactcgagttcccagcgccgggcggagcgccggacagagccccgcagcgccccgcggccgcgatggggccgaagcgcccgaagccccggagcccacaaactgccgggcccgcctcgccgccgggacccgggtgcctgggctcggcttgaagcggcggcggcgcaccggcacagccgcgggagcatgggcaggaggatgcggggcgccgccgccaccgcggggctctggctgctggcgctgggctcgctgctggcgctgtggggagggctcctgccgccgcggaccgagctgcccgcctcccggccgcccgaagaccgactcccacggcgcccggcccggagcggcggccccgcgcccgcgcctcgcttccctctgcccccgcccctggcgtgggacgcccgcggcggctccctgaaaactttccgggcgctgctcaccctggcggccggcgcggacggcccgccccggcagtcccggagcgagcccaggtggcacgtgtcagccaggcagccccggccggaggagagcgccgcggtgcacgggggcgtcttctggagccgcggcctggaggagcaggtgcccccgggcttttcggaggcccaggcggcggcgtggctggaggcggctcgcggcgcccggatggtggccctggagcgcgggggttgcgggcgcagctccaaccgactggcccgttttgccgacggcacccgcgcctgcgtgcgctacggcatcaacccggagcagattcagggcgaggccctgtcttactatctggcgcgcctgctgggcctccagcgccacgtgccgccgctggcactggctcgggtggaggctcggggcgcgcagtgggcgcaggtgcaggaggagctgcgcgctgcgcactggaccgagggcagcgtggtgagcctgacacgctggctgcccaacctcacggacgtggtggtgcccgcgccctggcgctcggaggacggccgtctgcgccccctccgggatgccgggggtgagctggccaacctcagccaggcggagctggtggacctagtacaatggaccgacttaatccttttcgactacctgacggccaacttcgaccggctcgtaagcaacctcttcagcctgcagtgggacccgcgcgtcatgcagcgtgccaccagcaacctgcaccgcggtccgggcggggcgctggtctttctggacaatgaggcgggcttggtgcacggctaccgggtagcaggcatgtgggacaagtataacgagccgctgttgcagtcagtgtgcgtgttccgcgagcggaccgcgcggcgcgtcctggagctgcaccgcggacaggacgccgcggcccggctgctgcgcctctaccggcgccacgagcctcgcttccccgagctggccgcccttgcagacccccacgctcagctgctacagcgccgcctcgacttcctcgccaagcacattttgcactgtaaggccaagtacggccgccggtctgggacttagtgtcaccgggaggaaaagagagagatctggggctggggtatggatgatggggggaagggcggtcgcctctgccactgtcagggaccagccggccaacgcccacccgcaaaggtgtctaaaaacttcagcttttcacccacctgcccctttctttcaatcccacgctgtttcctttcaaagttctgggaggacgaactcaccgaggcgagaagtgtaacattctctccacccagcttataaaaggattctttactgtgccagcacggggattggatccgaagaaactggctactggggtttggcccccgagtggccgtccctgtgggagatgcaccccattcttgggcccccctcattccctttccgaaaaaggaaaacttgcgtttgagccgttgagctaattctgcaattttctaccaaacagagcgctggtggccccggagcagggctgtgacattggctggtggagcccccttcctgtgttctccctttgttccagcgccgcgatggtgagatcactgttccaagcagggggacggctcgcgataggacaaagagagcaggacctccagactctggggagccctgcagaccttgacaatttgcctgactcattcctgacctcttgtcattttggcctgaaggctacaaattcagggtcagctgtatgcactaagtcaaataatgaatttcttcctccctctcgcaaccgaccaaaattttgacaacgatgatgttcaccagaaggaaaaaaaaatcagttttatgcactttattttgttttgattttcattttttattaagaaaaaattttattttacagaatttaccttctctgtatatatgtgcataaagtgtggtgtaaatatactaaacaaacttatatttcaataaaagggagtttaaaatttataaaaaaacacaaaagggggcggttaaaattccctgagggccaagttaggtacccagttcttgtaaagggcccaagggacgattaagaggcggggcgtaaagctgcggaaacgctggtcgggactttggcggatgcaccccaatagggataatagtaggacgttggatgtggtcgg

SEQ ID NO: 444735 - DNA, 2801 bp, Homo sapiens
gaagtttgcaggagacccgcgctgcctaggcaaagggacccggcgaccaagacacccccgcgagggcccagggcgcgtccctcccgccaggccccagactccggctctgcgccaccccctcctacgccccggcgcgggcgcagccagtccggcttcctccaggcccccaagtcccggaccgagtgtggggccgcctctccctctcggaaggagccatcgccgctttaagtggaagaggagaggaagggggcgggggagcggggggcggggagcggaggcggaggagggggagggggatccccctggctcccacgtggtccgggcgcctgtgaatcgcgcccaccggagggtctcacagcgaaatacaaaagcagctgggaagcggcggggactcgagttcccagcgccgggcggagcgccggacagagccccgcagcgccccgcggccgcgatggggccgaagcgcccgaagccccggagcccacaaactgccgggcccgcctcgccgccgggacccgggtgcctgggctcggcttgaagcggcggcggcgcaccggcacagccgcgggagcatgggcaggaggatgcggggcgccgccgccaccgcggggctctggctgctggcgctgggctcgctgctggcgctgtggggagggctcctgccgccgcggaccgagctgcccgcctcccggccgcccgaagaccgactcccacggcgcccggcccggagcggcggccccgcgcccgcgcctcgcttccctctgcccccgcccctggcgtgggacgcccgcggcggctccctgaaaactttccgggcgctgctcaccctggcggccggcgcggacggcccgccccggcagtcccggagcgagcccaggtggcacgtgtcagccaggcagccccggccggaggagagcgccgcggtgcacgggggcgtcttctggagccgcggcctggaggagcaggtgcccccgggcttttcggaggcccaggcggcggcgtggctggaggcggctcgcggcgcccggatggtggccctggagcgcgggggttgcgggcgcagctccaaccgactggcccgttttgccgacggcacccgcgcctgcgtgcgctacggcatcaacccggagcagattcagggcgaggccctgtcttactatctggcgcgcctgctgggcctccagcgccacgtgccgccgctggcactggctcgggtggaggctcggggcgcgcagtgggcgcaggtgcaggaggagctgcgcgctgcgcactggaccgagggcagcgtggtgagcctgacacgctggctgcccaacctcacggacgtggtggtgcccgcgccctggcgctcggaggacggccgtctgcgccccctccgggatgccgggggtgagctggccaacctcagccaggcggagctggtggacctagtacaatggaccgacttaatccttttcgactacctgacggccaacttcgaccggctcgtaagcaacctcttcagcctgcagtgggacccgcgcgtcatgcagcgtgccaccagcaacctgcaccgcggtccgggcggggcgctggtctttctggacaatgaggcgggcttggtgcacggctaccgggtagcaggcatgtgggacaagtataacgagccgctgttgcagtcagtgtgcgtgttccgcgagcggaccgcgcggcgcgtcctggagctgcaccgcggacaggacgccgcggcccggctgctgcgcctctaccggcgccacgagcctcgcttccccgagctggccgcccttgcagacccccacgctcagctgctacagcgccgcctcgacttcctcgccaagcacattttgcactgtaaggccaagtacggccgccggtctgggacttagtgtcaccgggaggaaaagagagagatctggggctggggtatggatgatggggggaagggcggtcgcctctgccactgtcagggaccagccggccaacgcccacccgcaaaggtgtctaaaaacttcagcttttcacccacctgcccctttctttcaatcccacgctgtttcctttcaaagttctgggaggacgaactcaccgaggcgagaagtgtaacattctctccacccagcttataaaaggattctttactgtgccagcacggggattggatccgaagaaactggctactggggtttggcccccgagtggccgtccctgtgggagatgcaccccattcttgggcccccctcattccctttccgaaaaaggaaaacttgcgtttgagccgttgagctaattctgcaattttctaccaaacagagcgctggtggccccggagcagggctgtgacattggctggtggagcccccttcctgtgttctccctttgttccagcgccgcgatggtgagatcactgttccaagcagggggacggctcgcgataggacaaagagagcaggacctccagactctggggagccctgcagaccttgacaatttgcctgactcattcctgacctcttgtcattttggcctgaaggctacaaattcagggtcagctgtatgcactaagtcaaataatgaatttcttcctccctctcgcaaccgaccaaaattttgacaacgatgatgttcaccagaaggaaaaaaaaatcagttttatgcactttattttgttttgattttcattttttattaagaaaaaattttattttacagaatttaccttctctgtatatatgtgcataaagtgtggtgtaaatatactaaacaaacttatatttcaataaaagggagtttaaaatttataa

SEQ ID NO: 444736 - DNA, 2488 bp, Homo sapiens
gaagtttgcaggagacccgcgctgcctaggcaaagggacccggcgaccaagacacccccgcgagggcccagggcgcgtccctcccgccaggccccagactccggctctgcgccaccccctcctacgccccggcgcgggcgcagccagtccggcttcctccaggcccccaagtcccggaccgagtgtggggccgcctctccctctcggaaggagccatcgccgctttaagtggaagaggagaggaagggggcgggggagcggggggcggggagcggaggcggaggagggggagggggatccccctggctcccacgtggtccgggcgcctgtgaatcgcgcccaccggagggtctcacagcgaaatacaaaagcagctgggaagcggcggggactcgagttcccagcgccgggcggagcgccggacagagccccgcagcgccccgcggccgcgatggggccgaagcgcccgaagccccggagcccacaaactgccgggcccgcctcgccgccgggacccgggtgcctgggctcggcttgaagcggcggcggcgcaccggcacagccgcgggagcatgggcaggaggatgcggggcgccgccgccaccgcggggctctggctgctggcgctgggctcgctgctggcgctgtggggagggctcctgccgccgcggaccgagctgcccgcctcccggccgcccgaagaccgactcccacggcgcccggcccggagcggcggccccgcgcccgcgcctcgcttccctctgcccccgcccctggcgtgggacgcccgcggcggctccctgaaaactttccgggcgctgctcaccctggcggccggcgcggacggcccgccccggcagtcccggagcgagcccaggtggcacgtgtcagccaggcagccccggccggaggagagcgccgcggtgcacgggggcgtcttctggagccgcggcctggaggagcaggtgcccccgggcttttcggaggcccaggcggcggcgtggctggaggcggctcgcggcgcccggatggtggccctggagcgcgggggttgcgggcgcagctccaaccgactggcccgttttgccgacggcacccgcgcctgcgtgcgctacggcatcaacccggagcagattcagggcgaggccctgtcttactatctggcgcgcctgctgggcctccagcgccacgtgccgccgctggcactggctcgggtggaggctcggggcgcgcagtgggcgcaggtgcaggaggagctgcgcgctgcgcactggaccgagggcagcgtggtgagcctgacacgctggctgcccaacctcacggacgtggtggtgcccgcgccctggcgctcggaggacggccgtctgcgccccctccgggatgccgggggtgagctggccaacctcagccaggcggagctggtggacctagtacaatggaccgacttaatccttttcgactacctgacggccaacttcgaccggctcgtaagcaacctcttcagcctgcagtgggacccgcgcgtcatgcagcgtgccaccagcaacctgcaccgcggtccgggcggggcgctggtctttctggacaatgaggcgggcttggtgcacggctaccgggtagcaggcatgtgggacaagtataacgagccgctgttgcagtcagtgtgcgtgttccgcgagcggaccgcgcggcgcgtcctggagctgcaccgcggacaggacgccgcggcccggctgctgcgcctctaccggcgccacgagcctcgcttccccgagctggccgcccttgcagacccccacgctcagctgctacagcgccgcctcgacttcctcgccaagcacattttgcactgtaaggccaagtacggccgccggtctgggacttagtgtcaccgggaggaaaagagagagatctggggctggggtatggatgatggggggaagggcggtcgcctctgccactgtcagggaccagccggccaacgcccacccgcaaagagcgctggtggccccggagcagggctgtgacattggctggtggagcccccttcctgtgttctccctttgttccagcgccgcgatggtgagatcactgttccaagcagggggacggctcgcgataggacaaagagagcaggacctccagactctggggagccctgcagaccttgacaatttgcctgactcattcctgacctcttgtcattttggcctgaaggctacaaattcagggtcagctgtatgcactaagtcaaataatgaatttcttcctccctctcgcaaccgaccaaaattttgacaacgatgatgttcaccagaaggaaaaaaaaatcagttttatgcactttattttgttttgattttcattttttattaagaaaaaattttattttacagaatttaccttctctgtatatatgtgcataaagtgtggtgtaaatatactaaacaaacttatatttcaataaaagggagtttaaaatttataa

SEQ ID NO: 444737 - DNA, 711 bp, Homo sapiens
cttgatttcccttctcagaatgtcttttattttaagtgtgatggtaaaattatactaaaaatgcatttgtcaggacttgaaagacagtgagagtgattcaagctcagaggaagagcggagagtcactacccgagttattcgccggcgtttgattataaaggtatcctgtagctggatcattatgtggcattgctctactattagaaactccttccttgtggttgtagaaactccttccttgtggttgtgaaatttcagcatgcttgataatgaaatggctttgtgtaatttttttgcacccttgaaagcttgtaaaaacaacaaccaaaaagaaaagaagccatgttgcatggtattctgtataggcctatttgatatgtggcggttgtagttttatttgagaattcttggcatttgtatcctgctttccttgaagaagtgttatgtgaatgagcaaagattctgtcttggtgacacagtagttcatatcaaatgaaatgtttaattgaaaccttagaaactgtaacaaggtatgaggcacgataaagaagaaagagaatgaaagaattaaaaggcttccttctcagtctcaaattcctactgccttaagaatttttaaattaaaaccagttcttcataagcaatcagtggctgagaatttgaggttataacctggcatggatatatgtgacacaatgcaagtcaagtaaa

SEQ ID NO: 444738 - DNA, 14767 bp, Homo sapiens
gggacaccatcatttgggtttttaaaagcttcagcttctccagcatctttgcattgtgaatatcttcctgcttctagtcaaagctttctctctagtgattggaatgctgctgtaagcctattagaggtgcctgaggatatcaccttttacaaggaagccgtgtgtgcttgagaggatctttttaaatgcattatggctcatgcagcctcacaattaaagaaaaacagggatttagaaatcaatgctgaagaagagcctgagaaaaaaaggaaacaccgcaaacggtcccgggatcggaagaaaaagtctgatgccaatgcaagttacttaagagcagctcgagctggacaccttgaaaaggccctcgactacataaaaaatggagttgacatcaacatttgcaatcagaatgggttgaacgctctccaccttgcttccaaagaaggccatgtagaggttgtttctgagctgctgcagagagaagccaatgtggatgcagctacaaagaaaggaaacacagcattgcacatcgcatctttggctgggcaagcagaggtggtaaaagtcttggttacaaatggagccaatgtcaatgcacaatctcagaatggtttcacgccattgtatatggcagcccaggaaaatcacctggaagttgtcaagtttcttcttgacaatggtgcaagccagagcctagccacagaggatggcttcacaccattggcagtggctttgcaacaaggtcacgaccaagtcgtttcgctcctgctagagaatgacaccaaaggaaaagtgcgtctcccagctcttcatatcgcggcccgaaaagacgacacgaaagccgccgccctgctgctgcagaatgacaacaatgcagatgtggaatcaaagagtggcttcactccgctccacatagctgctcactatggaaatatcaatgtagccacgttgctgttaaaccgagcggctgctgtggatttcaccgcaaggaatgacatcactcctttacatgttgcatcaaaaagaggaaatgcaaatatggtaaaactattgctcgatcgaggagctaaaatcgatgccaaaaccagggatggtctgacaccactgcactgtggagcaaggagtggccacgagcaggtggtagaaatgttgcttgatcgagctgcccccattctttcaaaaaccaagaatggattatctccattgcacatggccacacaaggggatcatttaaactgcgtccagcttctcctccagcataatgtacccgtggatgatgtcaccaatgactacctgactgccctacacgtggctgcccactgtggccattacaaagttgccaaggttctcttggataagaaagctaaccccaatgccaaagccctgaatggctttacccctcttcatattgcctgcaagaagaatcgaattaaagtaatggaactccttctgaaacacggtgcatccatccaagctgtaaccgagtcgggccttaccccaatccatgttgctgccttcatggggcatgtaaatattgtatcacaactaatgcatcatggagcctcaccaaacaccaccaatgtgagaggagaaacagcactgcacatggcagctcgctccggccaagctgaagttgtgcggtatctggtacaagacggagctcaggtagaagctaaagctaaggatgaccaaacaccactccacatttcagcccgactggggaaagcagacatagtacaacagctgttgcagcaaggggcatctccaaatgcagccacaacttctgggtacaccccacttcacctttccgcccgagaggggcatgaggatgtggccgcgttccttttggatcatggagcgtctttatctataacaacaaagaaaggatttactcctcttcatgtggcagcaaaatatggaaagcttgaagtcgccaatctcctgctacagaaaagtgcatctccagatgctgctgggaagagcgggctaacaccactgcatgtagctgcacattacgataatcagaaagtggcccttctgcttttggaccaaggagcctcacctcacgcagccgcaaagaatggttatacgccactgcacatcgctgccaaaaagaaccagatggacatagcgacaactctgctggaatatggtgctgatgccaacgcagttacccggcaaggaattgcttccgtccatctcgcagctcaggaagggcacgtggacatggtgtcgctgctcctcggtagaaatgcgaatgtgaacctgagcaataagagcggcctgaccccactccatttggctgctcaagaagatcgagtgaatgtggcagaagtcctcgtaaaccaaggggctcatgtggacgcccagacaaagatgggatacacaccactgcatgtgggctgccactatggaaatatcaagattgttaatttcctgctccagcattctgcaaaagttaatgccaaaacaaagaatgggtatacgccattacatcaagcagcacagcaggggcatacgcatataataaatgtcttacttcagaacaacgcctcccccaatgaactcactgtgaatgggaatactgcccttggcattgcccggcgcctcggctacatctcagtagtggacaccctgaagatagtgaccgaagaaaccatgaccacaactactgtcacagagaagcacaaaatgaatgttccagaaacgatgaatgaagttcttgatatgtctgatgatgaagttcgtaaagccaatgcccctgaaatgctcagtgatggcgaatatatctcagatgttgaagaaggtgaagatgcaatgaccggggacacagacaaatatcttgggccacaggaccttaaggaattgggtgatgattccctgcctgcagagggttacatgggctttagtctcggagcgcgttctgccagcctccgctccttcagttcggataggtcttacaccttgaacagaagctcctatgcacgggacagcatgatgattgaagaactccttgtgccatccaaagagcagcatctaacattcacaagggaatttgattcagattctcttagacattacagctgggctgcagacaccttagacaatgtcaatcttgtttcaagccccattcattctgggtttctggttagctttatggtggacgcgagagggggctccatgagaggaagccgtcatcacgggatgagaatcatcattcctccacgcaagtgtacggcccccactcgaatcacctgccgtttggtaaagagacataaactggccaacccaccccccatggtggaaggagagggattagccagtaggctggtagaaatgggtcctgcaggggcacaatttttaggccctgtcatagtggaaatccctcactttgggtccatgagaggaaaagagagagaactcattgttcttcgaagtgaaaatggtgaaacttggaaggagcatcagtttgacagcaaaaatgaagatttaaccgagttacttaatggcatggatgaagaacttgatagcccagaagagttagggaaaaagcgtatctgcaggattatcacgaaagatttcccccagtattttgcagtggtttcccggattaagcaggaaagcaaccagattggtcctgaaggtggaattctgagcagcaccacagtgccccttgttcaagcatctttcccagagggtgccctaactaaaagaattcgagtgggcctccaggcccagcctgttccagatgaaattgtgaaaaagatccttggaaacaaagcaacttttagcccaattgtcactgtggaaccaagaagacggaaattccataaaccaatcacaatgaccattccggtgcccccgccctcaggagaaggtgtatccaatggatacaaaggggacactacacccaatctgcgtcttctctgtagcattacagggggcacttcgcctgctcagtgggaagacatcacaggaacaactcctttgacgtttataaaagattgtgtctcctttacaaccaatgtttcagccagattttggcttgcagactgccatcaagttttagaaactgtggggttagccacgcaactgtacagagaattgatatgtgttccatatatggccaagtttgttgtttttgccaaaatgaatgatcccgtagaatcttccttgcgatgtttctgcatgacagatgacaaagtggacaaaactttagagcaacaagagaattttgaggaagtcgcaagaagcaaagatattgaggttctggaaggaaaacctatttatgttgattgttatggaaatttggccccacttaccaaaggaggacagcaacttgtttttaacttttattctttcaaagaaaatagactgccattttccatcaagattagagacaccagccaagagccctgtggtcgtctgtcttttctgaaagaaccaaagacaacaaaaggactgcctcaaacagcggtttgcaacttaaatatcactctgccagcacataaaaaggagacagagtcagatcaagatgatgagattgagaaaacagatagacgacagagcttcgcatccttagctttacgtaagcgctacagctacttgactgagcctggaatgattgaacggagtacaggagcaacaagatccctccccaccacttactcatacaagccattcttttctacaagaccataccagtcctggacaacagctccgattacagtgcctgggccagccaagtcaggcttcacttccttatcaagttcttcctctaatacgccatcagcttctccgttaaaatcaatatggtctgtttcgacaccttctccaatcaaatccacattaggcgcgtcaactacatcttcagttaaatccattagtgacgtggcatctccaattagatccttacggacaatgtcttcgccgataaaaactgtggtgtcacaatctccatacaatatccaggtttcctctggtaccctggctagagctccagcagtcacggaagctacgcccttaaaagggctggcatccaattctacgttttcctctcgaacctctccagtgactacagcagggtctcttttggagaggtcatcaattactatgacaccccctgcctcccccaaatcaaacattaatatgtattcctcaagtttgccatttaagtcaattattacatcagcagcaccgctaatatcttcacctttaaagtcagtggtgtctccagttaaatcacgagttgatgtcatttcatcagccaaaattacaatggcatcttctctctcatcacctgtgaagcagatgcctggacatgcagaggtagcattagtcaatggatctatttcccctctaaaatatgcatcatcctcaactttaattaatggatgcaaagccactgccacgttacaggaaaaaatttcttctgctacaaactctgtgagctctgtggtcagtgcagccactgacacagttgagaaagtgttttctaccacgactgcaatgccattttccccactcaggtcatatgtttctgcagcaccatcagcttttcagtctctaagaactccttccgcaagtgcactctatacatcccttgggtcgtcaatatctgcaactacctcatctgtaacttcatcaattataacagtgccagtatactctgtagtcaatgttttgccagaaccagcattaaagaaacttccagactctaattcatttacaaaatcagcagcagccttgctgtcacccattaaaacattgactacggagacacatcctcagcctcacttcagtcgaacttcatctccagttaagtcatctttgttccttgcaccctctgcccttaagttgtctacaccatcttctttatcttccagtcaggagatactaaaagatgtagctgaaatgaaagaggacctaatgcggatgaccgcaatactacagacagatgtgcctgaggagaagccattccaacctgaactcccaaaggaagggagaatagatgatgaagaacctttcaaaattgtagagaaagtaaaggaagacttagtgaaagttagtgaaatccttaaaaaggatgtatgtgtagataataaaggatcacccaaatcaccaaagagtgacaaaggacactctcctgaagatgactggatagaatttagttcggaagaaatccgggaagccagacaacaagctgctgcgagccagtctccatctctgccagagagagtgcaagtaaaagcaaaagccgcctccgaaaaggattataacttgaccaaagttattgattacctaacaaatgatattgggagtagttcactgacaaacttaaaatacaagtttgaggatgcaaagaaggatggtgagggaggacagaaaagagttttaaaaccagcaattgctttgcaggaacacaaactcaaaatgcctccagcctccatgaggacttccacctctgagaaagaattgtgtaaaatggctgattccttttttggaacagatactattttagagtctcctgatgacttttctcaacacgaccaagataaaagtcccttgtctgacagtggctttgaaacaagaagtgaaaagacaccttcagccccacaaagcgctgaaacgactggtcctaaaccactttttcatgaagttcccatccctcctgttattacagaaacaagaactgaagtggttcatgttatcaggagctatgatccctcagctggggatgttccccagacccaaccagaggagcctgtgtcacctaaaccttcacctacttttatggaattggaaccaaagcccaccacctctagtattaaagaaaaggttaaagcatttcaaatgaaagccagtagtgaagaagatgaccacaatcgggttttaagcaaaggcatgcgtgttaaagaagagactcacataaccacaaccaccagaatggtttatcattctccaccaggcggtgaaggtgcatctgaaagaattgaagaaaccatgtcagtccatgacatcatgaaggcctttcagtccgggcgggatccttccaaagaactggcaggtctgtttgaacataagtcggcagtgtctccagatgttcacaagtctgctgctgaaacctcagcccagcatgcagagaaggacaaccaaatgaaacccaaactggagcgtataatagaagtccacatcgaaaaaggtaaccaagctgagcccactgaagtcattattagagaaaccaaaaagcatccagaaaaagaaatgtatgtatatcagaaagacttatcccggggagatattaacctaaaagattttctgccagaaaaacacgatgcttttccttgttcagaggaacagggtcagcaagaagaagaagaacttactgctgaagagtcattgccttcttatctggagtcttccagagtaaacactcctgtgtcccaagaagaagatagccgccctagttctgctcaactcatatctgatgactcttataaaacattgaagcttttgagtcaacactcaatagaataccatgacgatgagttgtcagaactaagaggggagtcttacaggtttgctgagaaaatgcttctgtcagaaaagctagatgtgtctcattctgatactgaggaatcggttacagaccatgcaggaccccctagctcagagttacaggggtctgataagcggtccagagaaaaaatagccactgcccccaaaaaagaaattctctccaaaatctataaagatgtttctgaaaatggtgtaggtaaagtgtctaaagatgagcattttgataaagtgacagtgttgcactattctggcaatgttagtagtccaaaacatgccatgtggatgcgctttactgaggacagattagacagaggtagagagaagttgatatatgaagatagggtggacaggactgtgaaggaggctgaagaaaaactgactgaagtgtcacagttttttcgtgacaaaactgaaaagctaaatgatgaactgcagtccccagagaaaaaggcacgccctaaaaatggcaaagaatattcttctcaaagccctaccagtagcagccctgagaaagtgctactgacagaactgctggcatccaatgatgagtgggttaaggcaagacagcatggccctgatggacaaggcttccccaaggccgaggagaaggcacccagtctgcccagcagcccagagaagatggttctctcccaacagactgaggacagcaagtccacagtggaagccaaaggaagtatttcacagagcaaagcaccagatgggccccagtctggattccagctcaaacaatctaaactcagttccattagattaaaatttgaacaaggcacacacgcaaaaagtaaggacatgtctcaagaagacagaaagtcagatggccagtccagaatcccagttaaaaaaatacaggagagcaagctacccgtctaccaagtttttgctagagaaaaacagcagaaggccatagacctcccagatgaaagtgtatctgtgcaaaaagattttatggtattaaaaaccaaagatgagcatgcccaaagcaacgaaattgttgtaaatgattctggctctgataatgtgaaaaaacagagaactgaaatgtcaagtaaagcaatgcctgactctttttctgagcagcaggctaaagacttggcatgtcatataacctcagatttagcaactaggggaccatgggacaaaaaggtctttagaacatgggagagttcgggagccactaacaataagtctcagaaagaaaaactttcgcatgtacttgttcatgatgtaagagagaatcacattggtcaccctgagagtaaaagtgttgatcaaaagaatgaatttatgtctgtgactgagagagaacgcaaattgttaacaaacggctctctctcagaaattaaagaaatgactgtaaaatctccctccaaaaaagtcttatatagggaatatgttgtgaaagaaggggaccatccaggcggattgcttgatcagccttccaggaggagcgagagctcagcagtgtcacacattcccgtcagagttgctgatgagaggagaatgctgtcttctaatattcccgatggtttttgtgaacagtcggcatttccaaaacatgaactatcacaaaaattgtcccagtcaagcatgagtaaagagacagttgagacacagcactttaattctatagaagatgaaaaagttacctattcagaaatcagcaaagtttccaaacaccagagttatgtaggtttatgcccacctctcgaggaaaccgaaacctcccccaccaaatctcctgattctttagagtttagcccaggaaaggaatctccctctagtgatgtattcgaccacagtcccattgatggattggaaaaactcgcaccactagcccagacagagggagggaaagagataaaaactttacccgtttatgtcagttttgtacaagtggggaagcaatatgaaaaggagatacaacaaggaggtgtaaaaaaaatcataagtcaggaatgtaagacagtacaagaaaccagggggaccttttatacaactagacagcaaaagcaacctccttctccccaaggtagtccagaagatgatactctagagcaagtatcctttctagacagctctgggaaaagccctttaaccccagaaacacccagttcagaggaagtgagttatgaatttacatctaagacacctgactcgctcatagcttatataccaggcaaacccagcccaattcccgaggtttctgaggagtcagaggaggaggaacaggccaagtcaacctcccttaagcagactacagtggaggaaacagcagttgagcgtgaaatgcctaatgacgtgagcaaagactctaaccaaagacccaaaaataacagagttgcctatattgaatttccccctcctccaccactggatgcggaccagattgagtcagataagaagcatcattatctcccagaaaaagaggttgacatgattgaagtcaatctgcaagatgagcatgacaagtaccagctggctgaacctgtcattagagtgcagccaccttcaccagttcctcccggggcagacgtcagtgattcaagcgatgacgaatctatttatcagccagtcccagttaaaaaatataccttcaaattaaaggaagtggacgatgaacaaaaagaaaaacccaaagcttctgctgaaaaggcttccaaccagaaagaactggaaagtaatggatctggaaaagataatgaatttggccttggccttgattcacctcagaatgaaattgcccagaatgggaacaacgaccagtccatcacagagtgttccattgccaccacagcagagttttctcatgacacggatgccacagagatcgactctctggatggctatgacctgcaagatgaagatgatggcttgacagagagtgattctaaactcccaattcaagccatggaaattaagaaagatatctggaacacagagggcattctgaagccagctgaccgctcttttagccaaagtaaacttgaagttatcgaggaggagggaaaggtgggaccagatgaggacaagccaccttctaaaagttcttcatctgaaaagactcctgataagactgatcagaagtcaggggcccagttcttcacactggaaggcagacatcctgacagatcagtgtttcctgatacttacttcagttacaaagtagatgaagaatttgccactccttttaaaacagtagctaccaaaggtctagattttgacccttggtctaataaccgaggggatgatgaagtttttgacagtaaatcacgggaagatgaaactaagccatttgggctggcggtagaagaccgctctccagcaacaacccctgatacaacgccagccagaacgccaactgatgaaagtaccccaactagtgagcctaaccccttcccatttcatgaaggaaaaatgtttgagatgactcgcagtggtgcaattgacatgagcaagagggattttgttgaagagaggctccaatttttccagattggtgagcatacttctgaagggaagtcaggggaccagggggaaggggataaaagtatggtcactgccacaccacagccacagtcaggggacaccactgtagaaaccaatctagagagaaatgtagagacacctacagtggaacctaaccccagcatcccgaccagcggagagtgtcaggaaggcacatccagtagtggctccctggagaaatcagcagcagccactaacacctctaaagttgaccccaagttgcgcacgcctataaaaatgggaatttctgcatccaccatgaccatgaagaaagaaggccctggagaaataacagataagatagaagcggtgatgaccagttgtcagggattagaaaatgaaactataacaatgatttcaaatacagccaatagccagatgggcgttaggccccatgaaaaacatgattttcaaaaagataactttaataacaacaacaatttggattcttccactatacagacagataacattatgagtaatatagttctgacagaacattctgcacccacttgtaccacagagaaagataacccagtgaaagtctcatcaggaaaaaagacaggggtactacaaggacactgtgtaagagataagcagaaagttcttggagaacagcaaaaaacaaaggaattgatagggattaggcaaaaatccaaacttcccataaaggccacttcaccaaaagataccttcccaccgaaccatatgtcaaacactaaagcaagtaaaatgaagcaggttagtcaatccgagaaaaccaaagcccttactacttcttcatgtgtagatgtaaagtccagaattccagtgaaaaacacacccagggataacataattgcagttagaaaagcatgtgccacacaaaagcaagggcagccagagaaaggcaaggccaaacagcttccatccaagttgccagtaaaggtaagatccacctgtgtcactaccaccaccaccactgccaccaccaccaccactaccaccactaccaccaccaccagctgcacagttaaagttaggaaaagtcagctcaaggaagtatgtaaacattccattgaatattttaagggaattagtggtgagaccttaaagcttgtggaccgcctctctgaagaagaaaaaaagatgcagtccgagttgtccgatgaggaagaaagtacctcaagaaacacgtcgttgtccgagacttcccggggtggccagccttcggttacaacgaagtctgctagagataagaaaacagaggcagcacctttaaaatcaaagagtgaaaaggccggcagtgagaaaaggagcagtagaaggactggtccacagagtccatgtgaacggacagatatcaggatggcaatagtagccgatcacctgggacttagttggacagaactggcaagggaactgaatttttcagtggatgaaatcaatcaaatacgtgtggaaaatccaaattctttaatttctcagagcttcatgttattaaaaaaatgggttaccagagacggaaaaaatgccacaactgatgccttaacttcggtcttgacaaaaattaatcgaatagatatagtgacactgctagaaggaccaatatttgattatggaaatatttcaggcaccagaagttttgcagatgagaacaatgttttccatgaccctgttgatggttggcagaatgagacatcaagtggaaacctagagtcctgcgctcaagctcgaagagtaactggtgggttactagatcgactggatgacagccctgaccagtgtagagattccattacctcatatctcaaaggagaagctggcaaatttgaagcaaatggaagccatacagaaatcactccagaagcaaagacaaaatcttactttccagaatcccaaaatgatgtaggaaaacagagtaccaaggaaactctgaaaccaaaaatacatggatctggtcatgttgaagaaccagcatcaccactagcagcatatcagaaatctctagaagaaaccagcaagcttataatagaagagactaaaccctgtgtgcctgtcagtatgaaaaagatgagtaggacttctccagcagatggcaagccaaggcttagcctccatgaagaagaggggtccagtgggtctgagcaaaagcagggagaaggttttaaggtgaaaacgaagaaagaaatccggcatgtggaaaagaagagccactcgtaacagcgaacggtcagtcaaggatcataagtttttactgccagtattgagaaattcgtggaagaaatgtcagcaggaagtaaaaattcaccgagaagtgtgtgtgtgttcgctgcttccacacattaatggcatgattttttttatgcaaaaagaaaagaaaagaaaaccacccacattttaatttagcatgagccaatttacagagcatggaaatcactttcatttccggattggcgcgtgtgcaattagcaatgcagtgtatatacaagaagccatgctgttaacagtttatctcaagtaatttggtgtcatttacaaaaggaagaaattcctgccatcagaagggacagaaggagatggaatgatcaaatcacagagaaacactaaaattactaaatctacaacagctcgccttatttttcttggacccaaactgtcagggtataaacactatttgtttcttttttaaaacatcgatagttttgctgtaaataataacactgtataaattctaacagaaaaatagaataaaatgttgataaggcactgcctcttagaacacaaacagaatattgcaaatgcatttaacaaataggggtctcaagtgacttcaccctagaagaggagggagggattctgggtgggggtgactcttcactgattcttgtatattagcaattataatgtttgtatatgcaaaactgctagcttgattttaaaaaaaaacaaatctttaaaatctgctgcaaatttaaataattcccaaaatgaggaattctgtagttctgtgaaaaatttttttcttcagaatactaatattttgatgcatgtgtatcaccttattttgattaaatcttttccaattttgcaaacactacagtatactgcaacacaaaagattttatctgtaaacacaaagcccttcatctaatatttgttgctattgccaatttttcaatgaaatgacctaaaaacaacaaaaaaaaataacctatacggtagttgctttagggggtggggggatgctatctgttagtgcttaaaagggggtaaatgcttgccgctttagaggtggatggtgctcataaaaggccccagtcgggggtatttaaaaaggactgaacagaaatccttagctagtagaatggcagcacgctgtaaaattattactgtattgtgtactggctataagatgtagacacctttcagtaagccaatcatttgtaaccattctagcagtgtcatattaggttaataaggctgctgtgttttaaagggcatttttatttgggttttggtgaaattctttaatttgttgattatattcacataaaatcagcattcattgacacatagctctaatgacatatgtatgaaaaaccatacactggatgacctagtcgattatttaagcataaaataaattgtgttaaactcttca

SEQ ID NO: 444739 - DNA, 866 bp, Homo sapiens
cagtcagcagaagggagaaagattaggtatcctggtatgttatgctcacaccctgtcaataagaaggctcttgaactcttatctgtgagtcttggactttaaatgcagacttcactgctcatcatcaatagaataattaatcagttctggaaagcagtgcccttatgtcatatctttttgtttgtttgttgtttggtttgggttttgtgtgtgttttccttatgtcatttctattgttcattatttttatgttttttttttttcagaaaggatttactcctcttcatgtggcagcaaaatatggaaagcttgaagtcgccaatctcctgctacagaaaagtgcatctccagatgctgctgggaaggtaagaggtcaccagccactctgaagcaggccacttccacgataacaaaatacacccttgctaatattcactaatagccactcaaattataactaaatatttaagtcccactaggatgaagagcacttgggaaataaaaggtaaatgctggggtccaagtactgtggaaaccggaatgtaaatatgccctatgtcgtatccaatctaatttcatttcctcaatctaagcctctggttttaagacacctttgacactggttgttgtttctgcacgtgttttcagagcgggctaacaccactgcatgtagctgcacattacgataatcagaaagtggcccttctgcttttggaccaaggagcctcacctcacgcagccgcaaaggtacctataattccacagcctaaggagactgatgggtaaggtctatcagtctctatctgcacatctacttctgcttcagcaggagcaccctcctagtttagccacgacactaaaaaatc

SEQ ID NO: 444740 - DNA, 753 bp, Homo sapiens
actctttgccgtggttttggatgttggaataccggcggtgatctgtcttttataaactcacctgatttaaaggaaagatgagtgaagaaccaaaggagaaaaatgcaaaacctgctcataggaaaaggaaaggaaaaaagtctgatgccaatgcaagttacttaagagcagctcgagctggacaccttgaaaaggccctcgactacataaaaaatggagttgacatcaacatttgcaatcagaatgggttgaacgctctccaccttgcttccaaagaaggccatgtagaggttgtttctgagctgctgcagagagaagccaatgtggatgcagctacaaagaaaggaaacacagcattgcacatcgcatctttggctgggcaagcagaggtggtaaaagtcttggttacaaatggagccaatgtcaatgcacaatctcagaatggtttcacgccattgtatatggcagcccaggaaaatcacctggaagttgtcaagtttcttcttgacaatggtgcaagccagagcctagccacagagacacttcataaggtactggatatccttgagcaaccaggggatggaccttttttccagtagcctctatcacatttcctttctgctcatttttctctgaagaataactgcacaaagcaaaccacaccatttaaacttggttttgaaacgtctttaattggcttatgcaggaaacatattcttgtcactgctaatcggctcagttgcagtttatttt

SEQ ID NO: 444741 - DNA, 732 bp, Homo sapiens
cagctgagaacaaagttgaaagtttgcctggagctccatgccactccccgcctgggccactgctttgttttcttctaatgtttttcctctacctgggttggctgtttcttcattcatatttgagaagaatcacctcctaattaaatgtagcacttcgctctctccctacatgaaggctgtcttggttacccgactaggcaacgcgcattggtatcaaattaccgaaagtctacaccggagcagtcctcatatttacatacaaataactcaggggcttgcatttatgtcaccattctgtcctgctagaggcttgccagaggagtttttaatccaatcagaaggagctttaaaaggatgtctgcgaagtggtcaaaaggatcttaacctcaattaagtggggttttttaaaaagattttttggggggcctgaaattttgaaaatcttcgaactctgagtggggaaagatgtataattcctcaattgcctacgaggatatcaagatgctgagaggaattcagcggtggtgaagagagtggatacaaaccagggattggtttccttgagctgttttggaggttgattctaaatcactgcttaaggaattcctggaaacatcaggaaaacatttgatcatccaagcctagtggaaatggctttaccgcagagtaagatctttgagttgtacttggtgtgtgctgtttttgtttgagatgcagtgaatgtgcaaatag

SEQ ID NO: 444742 - DNA, 370 bp, Homo sapiens
atgcttgaatgttgttgactgctaaataactgtcagtgaagtcagcctttttcccttgcactggagtagcaagtagaatttacaacttatttctctaaaattccagagcatgtgtgtggtgtttggagtagtgtggagatttctccatctagtatgttgctaatctttatgccacatcctttagggagaggaagcaaaaaacattcctggtgaatctgtcacagaagaacaatttactgatgaagaaggcaacctcatcaccagaaaagtaatcatcattcagatttcatgcttctcttggaatttagattttctgcattaaaaactctgctacttttgtgctgtagtgtcatctcctaaaacagaaaaa

SEQ ID NO: 444743 - DNA, 1122 bp, Homo sapiens
agactctgtctcaaaaaataaaataaaataaaataaaataaaataaaataaataaaatgtccatattaaattatgttttccctacttaggaatgcaggatacatgagggcactatattcatgtaccacttggtttaccagtatttgcttacttaatcatgatttcttaagcaatcatagaaaaccactagaaagagacataaactatttgaaaatgcactgtgcacatttttatcttgttcctgggcatgtgaccaagtgatttgtgttgacagaatggttatacgccactgcacatcgctgccaaaaagaaccagatggacatagcgacaactctgctggaatatggtgctgatgccaacgcagttacccggcaaggaattgcttccgtccatctcgcagctcaggaagggcacgtggacatggtgtcgctgctcctcggtagaaatgcgaatgtgaacctgagcaataagagcggcctgaccccactccatttggctgctcaagaagatcgagtgaatgtggcagaagtcctcgtaaaccaaggggctcatgtggacgcccagacaaaggtatacggccctcccttgccacacggaaaagaatgtgtccatttggtgactgcagtaaggaagaaactataattgtatcaggagaacaaaccctttaatcatctcttttctacgtagtattttaaatgtttatttatgcaagggacactaaagtctccggttgccgtattccagggacttttgtcttcaacggcctgggtacttgattctagctgcacagtaatttccccctatattaacactgttgagcctccttacaacaaatgtgtccttcggggcagagtgtgaaagcttgtacctttcttagtttttgtgatggatgttttaaatgcagacaaatagacaaatagaaaaacttgtaatttgtgacctctacgttcgttcagcatgatttatgaaacaggataaattaaggcttatttaaatattactcacttgctaaattcctaatggtctgtgcggtcatgcgtgtgttctccctctctcagacgagaaagctctcatttcaaaaagaaaaaaaaattgctaattaatcttatataatgccacaa

SEQ ID NO: 444744 - DNA, 7453 bp, Homo sapiens
actctttgccgtggttttggatgttggaataccggcggtgatctgtcttttataaactcacctgatttaaaggaaagatgagtgaagaaccaaaggagaaaaatgcaaaacctgctcataggaaaaggaaaggaaaaaagtctgatgccaatgcaagttacttaagagcagctcgagctggacaccttgaaaaggccctcgactacataaaaaatggagttgacatcaacatttgcaatcagaatgggttgaacgctctccaccttgcttccaaagaaggccatgtagaggttgtttctgagctgctgcagagagaagccaatgtggatgcagctacaaagaaaggaaacacagcattgcacatcgcatctttggctgggcaagcagaggtggtaaaagtcttggttacaaatggagccaatgtcaatgcacaatctcagaatggtttcacgccattgtatatggcagcccaggaaaatcacctggaagttgtcaagtttcttcttgacaatggtgcaagccagagcctagccacagaggatggcttcacaccattggcagtggctttgcaacaaggtcacgaccaagtcgtttcgctcctgctagagaatgacaccaaaggaaaagtgcgtctcccagctcttcatatcgcggcccgaaaagacgacacgaaagccgccgccctgctgctgcagaatgacaacaatgcagatgtggaatcaaagagtggcttcactccgctccacatagctgctcactatggaaatatcaatgtagccacgttgctgttaaaccgagcggctgctgtggatttcaccgcaaggaatgacatcactcctttacatgttgcatcaaaaagaggaaatgcaaatatggtaaaactattgctcgatcgaggagctaaaatcgatgccaaaaccagggatggtctgacaccactgcactgtggagcaaggagtggccacgagcaggtggtagaaatgttgcttgatcgagctgcccccattctttcaaaaaccaagaatggattatctccattgcacatggccacacaaggggatcatttaaactgcgtccagcttctcctccagcataatgtacccgtggatgatgtcaccaatgactacctgactgccctacacgtggctgcccactgtggccattacaaagttgccaaggttctcttggataagaaagctaaccccaatgccaaagccctgaatggctttacccctcttcatattgcctgcaagaagaatcgaattaaagtaatggaactccttctgaaacacggtgcatccatccaagctgtaaccgagtcgggccttaccccaatccatgttgctgccttcatggggcatgtaaatattgtatcacaactaatgcatcatggagcctcaccaaacaccaccaatgtgagaggagaaacagcactgcacatggcagctcgctccggccaagctgaagttgtgcggtatctggtacaagacggagctcaggtagaagctaaagctaaggatgaccaaacaccactccacatttcagcccgactggggaaagcagacatagtacaacagctgttgcagcaaggggcatctccaaatgcagccacaacttctgggtacaccccacttcacctttccgcccgagaggggcatgaggatgtggccgcgttccttttggatcatggagcgtctttatctataacaacaaagaaaggatttactcctcttcatgtggcagcaaaatatggaaagcttgaagtcgccaatctcctgctacagaaaagtgcatctccagatgctgctgggaaggtaagaggtcaccagccactctgaagcaggccacttccacgataacaaaatacacccttgctaatattcactaatagccactcaaattataactaaatatttaagtcccactaggatgaagagcacttgggaaataaaaggtaaatgctggggtccaagtactgtggaaaccggaatgtaaatatgccctatgtcgtatccaatctaatttcatttcctcaatctaagcctctggttttaagacacctttgacactggttgttgtttctgcacgtgttttcagagcgggctaacaccactgcatgtagctgcacattacgataatcagaaagtggcccttctgcttttggaccaaggagcctcacctcacgcagccgcaaagaatggttatacgccactgcacatcgctgccaaaaagaaccagatggacatagcgacaactctgctggaatatggtgctgatgccaacgcagttacccggcaaggaattgcttccgtccatctcgcagctcaggaagggcacgtggacatggtgtcgctgctcctcggtagaaatgcgaatgtgaacctgagcaataagagcggcctgaccccactccatttggctgctcaagaagatcgagtgaatgtggcagaagtcctcgtaaaccaaggggctcatgtggacgcccagacaaagatgggatacacaccactgcatgtgggctgccactatggaaatatcaagattgttaatttcctgctccagcattctgcaaaagttaatgccaaaacaaagaatgggtatacgccattacatcaagcagcacagcaggggcatacgcatataataaatgtcttacttcagaacaacgcctcccccaatgaactcactgtgaatgggaatactgcccttggcattgcccggcgcctcggctacatctcagtagtggacaccctgaagatagtgaccgaagaaaccatgaccacaactactgtcacagagaagcacaaaatgaatgttccagaaacgatgaatgaagttcttgatatgtctgatgatgaagttcgtaaagccaatgcccctgaaatgctcagtgatggcgaatatatctcagatgttgaagaaggtgaagatgcaatgaccggggacacagacaaatatcttgggccacaggaccttaaggaattgggtgatgattccctgcctgcagagggttacatgggctttagtctcggagcgcgttctgccagcctccgctccttcagttcggataggtcttacaccttgaacagaagctcctatgcacgggacagcatgatgattgaagaactccttgtgccatccaaagagcagcatctaacattcacaagggaatttgattcagattctcttagacattacagctgggctgcagacaccttagacaatgtcaatcttgtttcaagccccattcattctgggtttctggttagctttatggtggacgcgagagggggctccatgagaggaagccgtcatcacgggatgagaatcatcattcctccacgcaagtgtacggcccccactcgaatcacctgccgtttggtaaagagacataaactggccaacccaccccccatggtggaaggagagggattagccagtaggctggtagaaatgggtcctgcaggggcacaatttttaggtaaactgcatcttcctaccaatcctccccctgtaaatgagggtgagagcttggttagccgaatcctgcagcttgggcctcaaggaacaaaatttattggccctgtcatagtggaaatccctcactttgggtccatgagaggaaaagagagagaactcattgttcttcgaagtgaaaatggtgaaacttggaaggagcatcagtttgacagcaaaaatgaagatttaaccgagttacttaatggcatggatgaagaacttgatagcccagaagagttagggaaaaagcgtatctgcaggattatcacgaaagatttcccccagtattttgcagtggtttcccggattaagcaggaaagcaaccagattggtcctgaaggtggaattctgagcagcaccacagtgccccttgttcaagcatctttcccagagggtgccctaactaaaagaattcgagtgggcctccaggcccagcctgttccagatgaaattgtgaaaaagatccttggaaacaaagcaacttttagcccaattgtcactgtggaaccaagaagacggaaattccataaaccaatcacaatgaccattccggtgcccccgccctcaggagaaggtgtatccaatggatacaaaggggacactacacccaatctgcgtcttctctgtagcattacagggggcacttcgcctgctcagtgggaagacatcacaggaacaactcctttgacgtttataaaagattgtgtctcctttacaaccaatgtttcagccagattttggcttgcagactgccatcaagttttagaaactgtggggttagccacgcaactgtacagagaattgatatgtgttccatatatggccaagtttgttgtttttgccaaaatgaatgatcccgtagaatcttccttgcgatgtttctgcatgacagatgacaaagtggacaaaactttagagcaacaagagaattttgaggaagtcgcaagaagcaaagatattgaggttctggaaggaaaacctatttatgttgattgttatggaaatttggccccacttaccaaaggaggacagcaacttgtttttaacttttattctttcaaagaaaatagactgccattttccatcaagattagagacaccagccaagagccctgtggtcgtctgtcttttctgaaagaaccaaagacaacaaaaggactgcctcaaacagcggtttgcaacttaaatatcactctgccagcacataaaaagattgagaaaacagatagacgacagagcttcgcatccttagctttacgtaagcgctacagctacttgactgagcctggaatgagtccacagagtccatgtgaacggacagatatcaggatggcaatagtagccgatcacctgggacttagttggacagaactggcaagggaactgaatttttcagtggatgaaatcaatcaaatacgtgtggaaaatccaaattctttaatttctcagagcttcatgttattaaaaaaatgggttaccagagacggaaaaaatgccacaactgatgccttaacttcggtcttgacaaaaattaatcgaatagatatagtgacactgctagaaggaccaatatttgattatggaaatatttcaggcaccagaagttttgcagatgagaacaatgttttccatgaccctgttgatggttatccttcccttcaagtggaactggaaacccccacagggttgcactacacaccacctacccctttccagcaagatgattattttagtgatatctctagcatagaatctccccttagaacccctagtagactgagtgatgggctagtgccttcccaggggaacatagagcattccgcagatggacctccagtcgtaactgcagaagacgcttccttagaagacagcaaactggaagactcagtgcctttaacagaaatgcctgaagcagtggatgtagatgagagccagttggagaatgtatgtctgagttggcagaatgagacatcaagtggaaacctagagtcctgcgctcaagctcgaagagtaactggtgggttactagatcgactggatgacagccctgaccagtgtagagattccattacctcatatctcaaaggagaagctggcaaatttgaagcaaatggaagccatacagaaatcactccagaagcaaagacaaaatcttactttccagaatcccaaaatgatgtaggaaaacagagtaccaaggaaactctgaaaccaaaaatacatggatctggtcatgttgaagaaccagcatcaccactagcagcatatcagaaatctctagaagaaaccagcaagcttataatagaagagactaaaccctgtgtgcctgtcagtatgaaaaagatgagtaggacttctccagcagatggcaagccaaggcttagcctccatgaagaagaggggtccagtgggtctgagcaaaagcagggagaaggttttaaggtgaaaacgaagaaagaaatccggcatgtggaaaagaagagccactcgtaacagcgaacggtcagtcaaggatcataagtttttactgccagtattgagaaattcgtggaagaaatgtcagcaggaagtaaaaattcaccgagaagtgtgtgtgtgttcgctgcttccacacattaatggcatgattttttttatgcaaaaagaaaagaaaagaaaaccacccacattttaatttagcatgagccaatttacagagcatggaaatcactttcatttccggattggcgcgtgtgcaattagcaatgcagtgtatatacaagaagccatgctgttaacagtttatctcaagtaatttggtgtcatttacaaaaggaagaaattcctgccatcagaagggacagaaggagatggaatgatcaaatcacagagaaacactaaaattactaaatctacaacagctcgccttatttttcttggacccaaactgtcagggtataaacactatttgtttcttttttaaaacatcgatagttttgctgtaaataataacactgtataaattctaacagaaaaatagaataaaatgttgataaggcactgcctcttagaacacaaacagaatattgcaaatgcatttaacaaataggggtctcaagtgacttcaccctagaagaggagggagggattctgggtgggggtgactcttcactgattcttgtatattagcaattataatgtttgtatatgcaaaactgctagcttgattttaaaaaaaaacaaatctttaaaatctgctgcaaatttaaataattcccaaaatgaggaattctgtagttctgtgaaaaatttttttcttcagaatactaatattttgatgcatgtgtatcaccttattttgattaaatcttttccaattttgcaaacactacagtatactgcaacacaaaagattttatctgtaaacacaaagcccttcatctaatatttgttgctattgccaatttttcaatgaaatgacctaaaaacaacaaaaaaaaataacctatacggtagttgctttagggggtggggggatgctatctgttagtgcttaaaagggggtaaatgcttgccgctttagaggtggatggtgctcataaaaggccccagtcgggggtatttaaaaaggactgaacagaaatccttagctagtagaatggcagcacgctgtaaaattattactgtattgtgtactggctataagatgtagacacctttcagtaagccaatcatttgtaaccattctagcagtgtcatattaggttaataaggctgctgtgttttaaagggcatttttatttgggttttggtgaaattctttaatttgttgattatattcacataaaatcagcattcattgacacatagctctaatgacatatgtatgaaaaaccatacactggatgacctagtcgattatttaagcataaaataaattgtgttaaactcttca

SEQ ID NO: 444745 - DNA, 15220 bp, Homo sapiens
actctttgccgtggttttggatgttggaataccggcggtgatctgtcttttataaactcacctgatttaaaggaaagatgagtgaagaaccaaaggagaaaaatgcaaaacctgctcataggaaaaggaaaggaaaaaagtctgatgccaatgcaagttacttaagagcagctcgagctggacaccttgaaaaggccctcgactacataaaaaatggagttgacatcaacatttgcaatcagaatgggttgaacgctctccaccttgcttccaaagaaggccatgtagaggttgtttctgagctgctgcagagagaagccaatgtggatgcagctacaaagaaaggaaacacagcattgcacatcgcatctttggctgggcaagcagaggtggtaaaagtcttggttacaaatggagccaatgtcaatgcacaatctcagaatggtttcacgccattgtatatggcagcccaggaaaatcacctggaagttgtcaagtttcttcttgacaatggtgcaagccagagcctagccacagaggatggcttcacaccattggcagtggctttgcaacaaggtcacgaccaagtcgtttcgctcctgctagagaatgacaccaaaggaaaagtgcgtctcccagctcttcatatcgcggcccgaaaagacgacacgaaagccgccgccctgctgctgcagaatgacaacaatgcagatgtggaatcaaagagtggcttcactccgctccacatagctgctcactatggaaatatcaatgtagccacgttgctgttaaaccgagcggctgctgtggatttcaccgcaaggaatgacatcactcctttacatgttgcatcaaaaagaggaaatgcaaatatggtaaaactattgctcgatcgaggagctaaaatcgatgccaaaaccagggatggtctgacaccactgcactgtggagcaaggagtggccacgagcaggtggtagaaatgttgcttgatcgagctgcccccattctttcaaaaaccaagaatggattatctccattgcacatggccacacaaggggatcatttaaactgcgtccagcttctcctccagcataatgtacccgtggatgatgtcaccaatgactacctgactgccctacacgtggctgcccactgtggccattacaaagttgccaaggttctcttggataagaaagctaaccccaatgccaaagccctgaatggctttacccctcttcatattgcctgcaagaagaatcgaattaaagtaatggaactccttctgaaacacggtgcatccatccaagctgtaaccgagtcgggccttaccccaatccatgttgctgccttcatggggcatgtaaatattgtatcacaactaatgcatcatggagcctcaccaaacaccaccaatgtgagaggagaaacagcactgcacatggcagctcgctccggccaagctgaagttgtgcggtatctggtacaagacggagctcaggtagaagctaaagctaaggatgaccaaacaccactccacatttcagcccgactggggaaagcagacatagtacaacagctgttgcagcaaggggcatctccaaatgcagccacaacttctgggtacaccccacttcacctttccgcccgagaggggcatgaggatgtggccgcgttccttttggatcatggagcgtctttatctataacaacaaagaaaggatttactcctcttcatgtggcagcaaaatatggaaagcttgaagtcgccaatctcctgctacagaaaagtgcatctccagatgctgctgggaaggtaagaggtcaccagccactctgaagcaggccacttccacgataacaaaatacacccttgctaatattcactaatagccactcaaattataactaaatatttaagtcccactaggatgaagagcacttgggaaataaaaggtaaatgctggggtccaagtactgtggaaaccggaatgtaaatatgccctatgtcgtatccaatctaatttcatttcctcaatctaagcctctggttttaagacacctttgacactggttgttgtttctgcacgtgttttcagagcgggctaacaccactgcatgtagctgcacattacgataatcagaaagtggcccttctgcttttggaccaaggagcctcacctcacgcagccgcaaagaatggttatacgccactgcacatcgctgccaaaaagaaccagatggacatagcgacaactctgctggaatatggtgctgatgccaacgcagttacccggcaaggaattgcttccgtccatctcgcagctcaggaagggcacgtggacatggtgtcgctgctcctcggtagaaatgcgaatgtgaacctgagcaataagagcggcctgaccccactccatttggctgctcaagaagatcgagtgaatgtggcagaagtcctcgtaaaccaaggggctcatgtggacgcccagacaaagatgggatacacaccactgcatgtgggctgccactatggaaatatcaagattgttaatttcctgctccagcattctgcaaaagttaatgccaaaacaaagaatgggtatacgccattacatcaagcagcacagcaggggcatacgcatataataaatgtcttacttcagaacaacgcctcccccaatgaactcactgtgaatgggaatactgcccttggcattgcccggcgcctcggctacatctcagtagtggacaccctgaagatagtgaccgaagaaaccatgaccacaactactgtcacagagaagcacaaaatgaatgttccagaaacgatgaatgaagttcttgatatgtctgatgatgaagttcgtaaagccaatgcccctgaaatgctcagtgatggcgaatatatctcagatgttgaagaaggtgaagatgcaatgaccggggacacagacaaatatcttgggccacaggaccttaaggaattgggtgatgattccctgcctgcagagggttacatgggctttagtctcggagcgcgttctgccagcctccgctccttcagttcggataggtcttacaccttgaacagaagctcctatgcacgggacagcatgatgattgaagaactccttgtgccatccaaagagcagcatctaacattcacaagggaatttgattcagattctcttagacattacagctgggctgcagacaccttagacaatgtcaatcttgtttcaagccccattcattctgggtttctggttagctttatggtggacgcgagagggggctccatgagaggaagccgtcatcacgggatgagaatcatcattcctccacgcaagtgtacggcccccactcgaatcacctgccgtttggtaaagagacataaactggccaacccaccccccatggtggaaggagagggattagccagtaggctggtagaaatgggtcctgcaggggcacaatttttaggccctgtcatagtggaaatccctcactttgggtccatgagaggaaaagagagagaactcattgttcttcgaagtgaaaatggtgaaacttggaaggagcatcagtttgacagcaaaaatgaagatttaaccgagttacttaatggcatggatgaagaacttgatagcccagaagagttagggaaaaagcgtatctgcaggattatcacgaaagatttcccccagtattttgcagtggtttcccggattaagcaggaaagcaaccagattggtcctgaaggtggaattctgagcagcaccacagtgccccttgttcaagcatctttcccagagggtgccctaactaaaagaattcgagtgggcctccaggcccagcctgttccagatgaaattgtgaaaaagatccttggaaacaaagcaacttttagcccaattgtcactgtggaaccaagaagacggaaattccataaaccaatcacaatgaccattccggtgcccccgccctcaggagaaggtgtatccaatggatacaaaggggacactacacccaatctgcgtcttctctgtagcattacagggggcacttcgcctgctcagtgggaagacatcacaggaacaactcctttgacgtttataaaagattgtgtctcctttacaaccaatgtttcagccagattttggcttgcagactgccatcaagttttagaaactgtggggttagccacgcaactgtacagagaattgatatgtgttccatatatggccaagtttgttgtttttgccaaaatgaatgatcccgtagaatcttccttgcgatgtttctgcatgacagatgacaaagtggacaaaactttagagcaacaagagaattttgaggaagtcgcaagaagcaaagatattgaggttctggaaggaaaacctatttatgttgattgttatggaaatttggccccacttaccaaaggaggacagcaacttgtttttaacttttattctttcaaagaaaatagactgccattttccatcaagattagagacaccagccaagagccctgtggtcgtctgtcttttctgaaagaaccaaagacaacaaaaggactgcctcaaacagcggtttgcaacttaaatatcactctgccagcacataaaaaggagacagagtcagatcaagatgatgagattgagaaaacagatagacgacagagcttcgcatccttagctttacgtaagcgctacagctacttgactgagcctggaatgattgaacggagtacaggagcaacaagatccctccccaccacttactcatacaagccattcttttctacaagaccataccagtcctggacaacagctccgattacagtgcctgggccagccaagtcaggcttcacttccttatcaagttcttcctctaatacgccatcagcttctccgttaaaatcaatatggtctgtttcgacaccttctccaatcaaatccacattaggcgcgtcaactacatcttcagttaaatccattagtgacgtggcatctccaattagatccttacggacaatgtcttcgccgataaaaactgtggtgtcacaatctccatacaatatccaggtttcctctggtaccctggctagagctccagcagtcacggaagctacgcccttaaaagggctggcatccaattctacgttttcctctcgaacctctccagtgactacagcagggtctcttttggagaggtcatcaattactatgacaccccctgcctcccccaaatcaaacattaatatgtattcctcaagtttgccatttaagtcaattattacatcagcagcaccgctaatatcttcacctttaaagtcagtggtgtctccagttaaatcacgagttgatgtcatttcatcagccaaaattacaatggcatcttctctctcatcacctgtgaagcagatgcctggacatgcagaggtagcattagtcaatggatctatttcccctctaaaatatgcatcatcctcaactttaattaatggatgcaaagccactgccacgttacaggaaaaaatttcttctgctacaaactctgtgagctctgtggtcagtgcagccactgacacagttgagaaagtgttttctaccacgactgcaatgccattttccccactcaggtcatatgtttctgcagcaccatcagcttttcagtctctaagaactccttccgcaagtgcactctatacatcccttgggtcgtcaatatctgcaactacctcatctgtaacttcatcaattataacagtgccagtatactctgtagtcaatgttttgccagaaccagcattaaagaaacttccagactctaattcatttacaaaatcagcagcagccttgctgtcacccattaaaacattgactacggagacacatcctcagcctcacttcagtcgaacttcatctccagttaagtcatctttgttccttgcaccctctgcccttaagttgtctacaccatcttctttatcttccagtcaggagatactaaaagatgtagctgaaatgaaagaggacctaatgcggatgaccgcaatactacagacagatgtgcctgaggagaagccattccaacctgaactcccaaaggaagggagaatagatgatgaagaacctttcaaaattgtagagaaagtaaaggaagacttagtgaaagttagtgaaatccttaaaaaggatgtatgtgtagataataaaggatcacccaaatcaccaaagagtgacaaaggacactctcctgaagatgactggatagaatttagttcggaagaaatccgggaagccagacaacaagctgctgcgagccagtctccatctctgccagagagagtgcaagtaaaagcaaaagccgcctccgaaaaggattataacttgaccaaagttattgattacctaacaaatgatattgggagtagttcactgacaaacttaaaatacaagtttgaggatgcaaagaaggatggtgagggaggacagaaaagagttttaaaaccagcaattgctttgcaggaacacaaactcaaaatgcctccagcctccatgaggacttccacctctgagaaagaattgtgtaaaatggctgattccttttttggaacagatactattttagagtctcctgatgacttttctcaacacgaccaagataaaagtcccttgtctgacagtggctttgaaacaagaagtgaaaagacaccttcagccccacaaagcgctgaaacgactggtcctaaaccactttttcatgaagttcccatccctcctgttattacagaaacaagaactgaagtggttcatgttatcaggagctatgatccctcagctggggatgttccccagacccaaccagaggagcctgtgtcacctaaaccttcacctacttttatggaattggaaccaaagcccaccacctctagtattaaagaaaaggttaaagcatttcaaatgaaagccagtagtgaagaagatgaccacaatcgggttttaagcaaaggcatgcgtgttaaagaagagactcacataaccacaaccaccagaatggtttatcattctccaccaggcggtgaaggtgcatctgaaagaattgaagaaaccatgtcagtccatgacatcatgaaggcctttcagtccgggcgggatccttccaaagaactggcaggtctgtttgaacataagtcggcagtgtctccagatgttcacaagtctgctgctgaaacctcagcccagcatgcagagaaggacaaccaaatgaaacccaaactggagcgtataatagaagtccacatcgaaaaaggtaaccaagctgagcccactgaagtcattattagagaaaccaaaaagcatccagaaaaagaaatgtatgtatatcagaaagacttatcccggggagatattaacctaaaagattttctgccagaaaaacacgatgcttttccttgttcagaggaacagggtcagcaagaagaagaagaacttactgctgaagagtcattgccttcttatctggagtcttccagagtaaacactcctgtgtcccaagaagaagatagccgccctagttctgctcaactcatatctgatgactcttataaaacattgaagcttttgagtcaacactcaatagaataccatgacgatgagttgtcagaactaagaggggagtcttacaggtttgctgagaaaatgcttctgtcagaaaagctagatgtgtctcattctgatactgaggaatcggttacagaccatgcaggaccccctagctcagagttacaggggtctgataagcggtccagagaaaaaatagccactgcccccaaaaaagaaattctctccaaaatctataaagatgtttctgaaaatggtgtaggtaaagtgtctaaagatgagcattttgataaagtgacagtgttgcactattctggcaatgttagtagtccaaaacatgccatgtggatgcgctttactgaggacagattagacagaggtagagagaagttgatatatgaagatagggtggacaggactgtgaaggaggctgaagaaaaactgactgaagtgtcacagttttttcgtgacaaaactgaaaagctaaatgatgaactgcagtccccagagaaaaaggcacgccctaaaaatggcaaagaatattcttctcaaagccctaccagtagcagccctgagaaagtgctactgacagaactgctggcatccaatgatgagtgggttaaggcaagacagcatggccctgatggacaaggcttccccaaggccgaggagaaggcacccagtctgcccagcagcccagagaagatggttctctcccaacagactgaggacagcaagtccacagtggaagccaaaggaagtatttcacagagcaaagcaccagatgggccccagtctggattccagctcaaacaatctaaactcagttccattagattaaaatttgaacaaggcacacacgcaaaaagtaaggacatgtctcaagaagacagaaagtcagatggccagtccagaatcccagttaaaaaaatacaggagagcaagctacccgtctaccaagtttttgctagagaaaaacagcagaaggccatagacctcccagatgaaagtgtatctgtgcaaaaagattttatggtattaaaaaccaaagatgagcatgcccaaagcaacgaaattgttgtaaatgattctggctctgataatgtgaaaaaacagagaactgaaatgtcaagtaaagcaatgcctgactctttttctgagcagcaggctaaagacttggcatgtcatataacctcagatttagcaactaggggaccatgggacaaaaaggtctttagaacatgggagagttcgggagccactaacaataagtctcagaaagaaaaactttcgcatgtacttgttcatgatgtaagagagaatcacattggtcaccctgagagtaaaagtgttgatcaaaagaatgaatttatgtctgtgactgagagagaacgcaaattgttaacaaacggctctctctcagaaattaaagaaatgactgtaaaatctccctccaaaaaagtcttatatagggaatatgttgtgaaagaaggggaccatccaggcggattgcttgatcagccttccaggaggagcgagagctcagcagtgtcacacattcccgtcagagttgctgatgagaggagaatgctgtcttctaatattcccgatggtttttgtgaacagtcggcatttccaaaacatgaactatcacaaaaattgtcccagtcaagcatgagtaaagagacagttgagacacagcactttaattctatagaagatgaaaaagttacctattcagaaatcagcaaagtttccaaacaccagagttatgtaggtttatgcccacctctcgaggaaaccgaaacctcccccaccaaatctcctgattctttagagtttagcccaggaaaggaatctccctctagtgatgtattcgaccacagtcccattgatggattggaaaaactcgcaccactagcccagacagagggagggaaagagataaaaactttacccgtttatgtcagttttgtacaagtggggaagcaatatgaaaaggagatacaacaaggaggtgtaaaaaaaatcataagtcaggaatgtaagacagtacaagaaaccagggggaccttttatacaactagacagcaaaagcaacctccttctccccaaggtagtccagaagatgatactctagagcaagtatcctttctagacagctctgggaaaagccctttaaccccagaaacacccagttcagaggaagtgagttatgaatttacatctaagacacctgactcgctcatagcttatataccaggcaaacccagcccaattcccgaggtttctgaggagtcagaggaggaggaacaggccaagtcaacctcccttaagcagactacagtggaggaaacagcagttgagcgtgaaatgcctaatgacgtgagcaaagactctaaccaaagacccaaaaataacagagttgcctatattgaatttccccctcctccaccactggatgcggaccagattgagtcagataagaagcatcattatctcccagaaaaagaggttgacatgattgaagtcaatctgcaagatgagcatgacaagtaccagctggctgaacctgtcattagagtgcagccaccttcaccagttcctcccggggcagacgtcagtgattcaagcgatgacgaatctatttatcagccagtcccagttaaaaaatataccttcaaattaaaggaagtggacgatgaacaaaaagaaaaacccaaagcttctgctgaaaaggcttccaaccagaaagaactggaaagtaatggatctggaaaagataatgaatttggccttggccttgattcacctcagaatgaaattgcccagaatgggaacaacgaccagtccatcacagagtgttccattgccaccacagcagagttttctcatgacacggatgccacagagatcgactctctggatggctatgacctgcaagatgaagatgatggcttgacagagagtgattctaaactcccaattcaagccatggaaattaagaaagatatctggaacacagagggcattctgaagccagctgaccgctcttttagccaaagtaaacttgaagttatcgaggaggagggaaaggtgggaccagatgaggacaagccaccttctaaaagttcttcatctgaaaagactcctgataagactgatcagaagtcaggggcccagttcttcacactggaaggcagacatcctgacagatcagtgtttcctgatacttacttcagttacaaagtagatgaagaatttgccactccttttaaaacagtagctaccaaaggtctagattttgacccttggtctaataaccgaggggatgatgaagtttttgacagtaaatcacgggaagatgaaactaagccatttgggctggcggtagaagaccgctctccagcaacaacccctgatacaacgccagccagaacgccaactgatgaaagtaccccaactagtgagcctaaccccttcccatttcatgaaggaaaaatgtttgagatgactcgcagtggtgcaattgacatgagcaagagggattttgttgaagagaggctccaatttttccagattggtgagcatacttctgaagggaagtcaggggaccagggggaaggggataaaagtatggtcactgccacaccacagccacagtcaggggacaccactgtagaaaccaatctagagagaaatgtagagacacctacagtggaacctaaccccagcatcccgaccagcggagagtgtcaggaaggcacatccagtagtggctccctggagaaatcagcagcagccactaacacctctaaagttgaccccaagttgcgcacgcctataaaaatgggaatttctgcatccaccatgaccatgaagaaagaaggccctggagaaataacagataagatagaagcggtgatgaccagttgtcagggattagaaaatgaaactataacaatgatttcaaatacagccaatagccagatgggcgttaggccccatgaaaaacatgattttcaaaaagataactttaataacaacaacaatttggattcttccactatacagacagataacattatgagtaatatagttctgacagaacattctgcacccacttgtaccacagagaaagataacccagtgaaagtctcatcaggaaaaaagacaggggtactacaaggacactgtgtaagagataagcagaaagttcttggagaacagcaaaaaacaaaggaattgatagggattaggcaaaaatccaaacttcccataaaggccacttcaccaaaagataccttcccaccgaaccatatgtcaaacactaaagcaagtaaaatgaagcaggttagtcaatccgagaaaaccaaagcccttactacttcttcatgtgtagatgtaaagtccagaattccagtgaaaaacacacccagggataacataattgcagttagaaaagcatgtgccacacaaaagcaagggcagccagagaaaggcaaggccaaacagcttccatccaagttgccagtaaaggtaagatccacctgtgtcactaccaccaccaccactgccaccaccaccaccactaccaccactaccaccaccaccagctgcacagttaaagttaggaaaagtcagctcaaggaagtatgtaaacattccattgaatattttaagggaattagtggtgagaccttaaagcttgtggaccgcctctctgaagaagaaaaaaagatgcagtccgagttgtccgatgaggaagaaagtacctcaagaaacacgtcgttgtccgagacttcccggggtggccagccttcggttacaacgaagtctgctagagataagaaaacagaggcagcacctttaaaatcaaagagtgaaaaggccggcagtgagaaaaggagcagtagaaggactggtccacagagtccatgtgaacggacagatatcaggatggcaatagtagccgatcacctgggacttagttggacagaactggcaagggaactgaatttttcagtggatgaaatcaatcaaatacgtgtggaaaatccaaattctttaatttctcagagcttcatgttattaaaaaaatgggttaccagagacggaaaaaatgccacaactgatgccttaacttcggtcttgacaaaaattaatcgaatagatatagtgacactgctagaaggaccaatatttgattatggaaatatttcaggcaccagaagttttgcagatgagaacaatgttttccatgaccctgttgatgtcagtccaaatgtactgtcttccataggttatccttcccttcaagtggaactggaaacccccacagggttgcactacacaccacctacccctttccagcaagatgattattttagtgatatctctagcatagaatctccccttagaacccctagtagactgagtgatgggctagtgccttcccaggggaacatagagcattccgcagatggacctccagtcgtaactgcagaagacgcttccttagaagacagcaaactggaagactcagtgcctttaacagaaatgcctgaagcagtggatgtagatgagagccagttggagaatgtatgtctgagttggcagaatgagacatcaagtggaaacctagagtcctgcgctcaagctcgaagagtaactggtgggttactagatcgactggatgacagccctgaccagtgtagagattccattacctcatatctcaaaggagaagctggcaaatttgaagcaaatggaagccatacagaaatcactccagaagcaaagacaaaatcttactttccagaatcccaaaatgatgtaggaaaacagagtaccaaggaaactctgaaaccaaaaatacatggatctggtcatgttgaagaaccagcatcaccactagcagcatatcagaaatctctagaagaaaccagcaagcttataatagaagagactaaaccctgtgtgcctgtcagtatgaaaaagatgagtaggacttctccagcagatggcaagccaaggcttagcctccatgaagaagaggggtccagtgggtctgagcaaaagcagggagaaggttttaaggtgaaaacgaagaaagaaatccggcatgtggaaaagaagagccactcgtaacagcgaacggtcagtcaaggatcataagtttttactgccagtattgagaaattcgtggaagaaatgtcagcaggaagtaaaaattcaccgagaagtgtgtgtgtgttcgctgcttccacacattaatggcatgattttttttatgcaaaaagaaaagaaaagaaaaccacccacattttaatttagcatgagccaatttacagagcatggaaatcactttcatttccggattggcgcgtgtgcaattagcaatgcagtgtatatacaagaagccatgctgttaacagtttatctcaagtaatttggtgtcatttacaaaaggaagaaattcctgccatcagaagggacagaaggagatggaatgatcaaatcacagagaaacactaaaattactaaatctacaacagctcgccttatttttcttggacccaaactgtcagggtataaacactatttgtttcttttttaaaacatcgatagttttgctgtaaataataacactgtataaattctaacagaaaaatagaataaaatgttgataaggcactgcctcttagaacacaaacagaatattgcaaatgcatttaacaaataggggtctcaagtgacttcaccctagaagaggagggagggattctgggtgggggtgactcttcactgattcttgtatattagcaattataatgtttgtatatgcaaaactgctagcttgattttaaaaaaaaacaaatctttaaaatctgctgcaaatttaaataattcccaaaatgaggaattctgtagttctgtgaaaaatttttttcttcagaatactaatattttgatgcatgtgtatcaccttattttgattaaatcttttccaattttgcaaacactacagtatactgcaacacaaaagattttatctgtaaacacaaagcccttcatctaatatttgttgctattgccaatttttcaatgaaatgacctaaaaacaacaaaaaaaaataacctatacggtagttgctttagggggtggggggatgctatctgttagtgcttaaaagggggtaaatgcttgccgctttagaggtggatggtgctcataaaaggccccagtcgggggtatttaaaaaggactgaacagaaatccttagctagtagaatggcagcacgctgtaaaattattactgtattgtgtactggctataagatgtagacacctttcagtaagccaatcatttgtaaccattctagcagtgtcatattaggttaataaggctgctgtgttttaaagggcatttttatttgggttttggtgaaattctttaatttgttgattatattcacataaaatcagcattcattgacacatagctctaatgacatatgtatgaaaaaccatacactggatgacctagtcgattatttaagcataaaataaattgtgttaaactcttca

SEQ ID NO: 444746 - DNA, 7318 bp, Homo sapiens
actctttgccgtggttttggatgttggaataccggcggtgatctgtcttttataaactcacctgatttaaaggaaagatgagtgaagaaccaaaggagaaaaatgcaaaacctgctcataggaaaaggaaaggaaaaaagtctgatgccaatgcaagttacttaagagcagctcgagctggacaccttgaaaaggccctcgactacataaaaaatggagttgacatcaacatttgcaatcagaatgggttgaacgctctccaccttgcttccaaagaaggccatgtagaggttgtttctgagctgctgcagagagaagccaatgtggatgcagctacaaagaaaggaaacacagcattgcacatcgcatctttggctgggcaagcagaggtggtaaaagtcttggttacaaatggagccaatgtcaatgcacaatctcagaatggtttcacgccattgtatatggcagcccaggaaaatcacctggaagttgtcaagtttcttcttgacaatggtgcaagccagagcctagccacagaggatggcttcacaccattggcagtggctttgcaacaaggtcacgaccaagtcgtttcgctcctgctagagaatgacaccaaaggaaaagtgcgtctcccagctcttcatatcgcggcccgaaaagacgacacgaaagccgccgccctgctgctgcagaatgacaacaatgcagatgtggaatcaaagagtggcttcactccgctccacatagctgctcactatggaaatatcaatgtagccacgttgctgttaaaccgagcggctgctgtggatttcaccgcaaggaatgacatcactcctttacatgttgcatcaaaaagaggaaatgcaaatatggtaaaactattgctcgatcgaggagctaaaatcgatgccaaaaccagggatggtctgacaccactgcactgtggagcaaggagtggccacgagcaggtggtagaaatgttgcttgatcgagctgcccccattctttcaaaaaccaagaatggattatctccattgcacatggccacacaaggggatcatttaaactgcgtccagcttctcctccagcataatgtacccgtggatgatgtcaccaatgactacctgactgccctacacgtggctgcccactgtggccattacaaagttgccaaggttctcttggataagaaagctaaccccaatgccaaagccctgaatggctttacccctcttcatattgcctgcaagaagaatcgaattaaagtaatggaactccttctgaaacacggtgcatccatccaagctgtaaccgagtcgggccttaccccaatccatgttgctgccttcatggggcatgtaaatattgtatcacaactaatgcatcatggagcctcaccaaacaccaccaatgtgagaggagaaacagcactgcacatggcagctcgctccggccaagctgaagttgtgcggtatctggtacaagacggagctcaggtagaagctaaagctaaggatgaccaaacaccactccacatttcagcccgactggggaaagcagacatagtacaacagctgttgcagcaaggggcatctccaaatgcagccacaacttctgggtacaccccacttcacctttccgcccgagaggggcatgaggatgtggccgcgttccttttggatcatggagcgtctttatctataacaacaaagaaaggatttactcctcttcatgtggcagcaaaatatggaaagcttgaagtcgccaatctcctgctacagaaaagtgcatctccagatgctgctgggaaggtaagaggtcaccagccactctgaagcaggccacttccacgataacaaaatacacccttgctaatattcactaatagccactcaaattataactaaatatttaagtcccactaggatgaagagcacttgggaaataaaaggtaaatgctggggtccaagtactgtggaaaccggaatgtaaatatgccctatgtcgtatccaatctaatttcatttcctcaatctaagcctctggttttaagacacctttgacactggttgttgtttctgcacgtgttttcagagcgggctaacaccactgcatgtagctgcacattacgataatcagaaagtggcccttctgcttttggaccaaggagcctcacctcacgcagccgcaaagaatggttatacgccactgcacatcgctgccaaaaagaaccagatggacatagcgacaactctgctggaatatggtgctgatgccaacgcagttacccggcaaggaattgcttccgtccatctcgcagctcaggaagggcacgtggacatggtgtcgctgctcctcggtagaaatgcgaatgtgaacctgagcaataagagcggcctgaccccactccatttggctgctcaagaagatcgagtgaatgtggcagaagtcctcgtaaaccaaggggctcatgtggacgcccagacaaagatgggatacacaccactgcatgtgggctgccactatggaaatatcaagattgttaatttcctgctccagcattctgcaaaagttaatgccaaaacaaagaatgggtatacgccattacatcaagcagcacagcaggggcatacgcatataataaatgtcttacttcagaacaacgcctcccccaatgaactcactgtgaatgggaatactgcccttggcattgcccggcgcctcggctacatctcagtagtggacaccctgaagatagtgaccgaagaaaccatgaccacaactactgtcacagagaagcacaaaatgaatgttccagaaacgatgaatgaagttcttgatatgtctgatgatgaagttcgtaaagccaatgcccctgaaatgctcagtgatggcgaatatatctcagatgttgaagaaggtgaagatgcaatgaccggggacacagacaaatatcttgggccacaggaccttaaggaattgggtgatgattccctgcctgcagagggttacatgggctttagtctcggagcgcgttctgccagcctccgctccttcagttcggataggtcttacaccttgaacagaagctcctatgcacgggacagcatgatgattgaagaactccttgtgccatccaaagagcagcatctaacattcacaagggaatttgattcagattctcttagacattacagctgggctgcagacaccttagacaatgtcaatcttgtttcaagccccattcattctgggtttctggttagctttatggtggacgcgagagggggctccatgagaggaagccgtcatcacgggatgagaatcatcattcctccacgcaagtgtacggcccccactcgaatcacctgccgtttggtaaagagacataaactggccaacccaccccccatggtggaaggagagggattagccagtaggctggtagaaatgggtcctgcaggggcacaatttttaggccctgtcatagtggaaatccctcactttgggtccatgagaggaaaagagagagaactcattgttcttcgaagtgaaaatggtgaaacttggaaggagcatcagtttgacagcaaaaatgaagatttaaccgagttacttaatggcatggatgaagaacttgatagcccagaagagttagggaaaaagcgtatctgcaggattatcacgaaagatttcccccagtattttgcagtggtttcccggattaagcaggaaagcaaccagattggtcctgaaggtggaattctgagcagcaccacagtgccccttgttcaagcatctttcccagagggtgccctaactaaaagaattcgagtgggcctccaggcccagcctgttccagatgaaattgtgaaaaagatccttggaaacaaagcaacttttagcccaattgtcactgtggaaccaagaagacggaaattccataaaccaatcacaatgaccattccggtgcccccgccctcaggagaaggtgtatccaatggatacaaaggggacactacacccaatctgcgtcttctctgtagcattacagggggcacttcgcctgctcagtgggaagacatcacaggaacaactcctttgacgtttataaaagattgtgtctcctttacaaccaatgtttcagccagattttggcttgcagactgccatcaagttttagaaactgtggggttagccacgcaactgtacagagaattgatatgtgttccatatatggccaagtttgttgtttttgccaaaatgaatgatcccgtagaatcttccttgcgatgtttctgcatgacagatgacaaagtggacaaaactttagagcaacaagagaattttgaggaagtcgcaagaagcaaagatattgaggttctggaaggaaaacctatttatgttgattgttatggaaatttggccccacttaccaaaggaggacagcaacttgtttttaacttttattctttcaaagaaaatagactgccattttccatcaagattagagacaccagccaagagccctgtggtcgtctgtcttttctgaaagaaccaaagacaacaaaaggactgcctcaaacagcggtttgcaacttaaatatcactctgccagcacataaaaagattgagaaaacagatagacgacagagcttcgcatccttagctttacgtccacagagtccatgtgaacggacagatatcaggatggcaatagtagccgatcacctgggacttagttggacagaactggcaagggaactgaatttttcagtggatgaaatcaatcaaatacgtgtggaaaatccaaattctttaatttctcagagcttcatgttattaaaaaaatgggttaccagagacggaaaaaatgccacaactgatgccttaacttcggtcttgacaaaaattaatcgaatagatatagtgacactgctagaaggaccaatatttgattatggaaatatttcaggcaccagaagttttgcagatgagaacaatgttttccatgaccctgttgatggttatccttcccttcaagtggaactggaaacccccacagggttgcactacacaccacctacccctttccagcaagatgattattttagtgatatctctagcatagaatctccccttagaacccctagtagactgagtgatgggctagtgccttcccaggggaacatagagcattccgcagatggacctccagtcgtaactgcagaagacgcttccttagaagacagcaaactggaagactcagtgcctttaacagaaatgcctgaagcagtggatgtagatgagagccagttggagaatgtatgtctgagttggcagaatgagacatcaagtggaaacctagagtcctgcgctcaagctcgaagagtaactggtgggttactagatcgactggatgacagccctgaccagtgtagagattccattacctcatatctcaaaggagaagctggcaaatttgaagcaaatggaagccatacagaaatcactccagaagcaaagacaaaatcttactttccagaatcccaaaatgatgtaggaaaacagagtaccaaggaaactctgaaaccaaaaatacatggatctggtcatgttgaagaaccagcatcaccactagcagcatatcagaaatctctagaagaaaccagcaagcttataatagaagagactaaaccctgtgtgcctgtcagtatgaaaaagatgagtaggacttctccagcagatggcaagccaaggcttagcctccatgaagaagaggggtccagtgggtctgagcaaaagcagggagaaggttttaaggtgaaaacgaagaaagaaatccggcatgtggaaaagaagagccactcgtaacagcgaacggtcagtcaaggatcataagtttttactgccagtattgagaaattcgtggaagaaatgtcagcaggaagtaaaaattcaccgagaagtgtgtgtgtgttcgctgcttccacacattaatggcatgattttttttatgcaaaaagaaaagaaaagaaaaccacccacattttaatttagcatgagccaatttacagagcatggaaatcactttcatttccggattggcgcgtgtgcaattagcaatgcagtgtatatacaagaagccatgctgttaacagtttatctcaagtaatttggtgtcatttacaaaaggaagaaattcctgccatcagaagggacagaaggagatggaatgatcaaatcacagagaaacactaaaattactaaatctacaacagctcgccttatttttcttggacccaaactgtcagggtataaacactatttgtttcttttttaaaacatcgatagttttgctgtaaataataacactgtataaattctaacagaaaaatagaataaaatgttgataaggcactgcctcttagaacacaaacagaatattgcaaatgcatttaacaaataggggtctcaagtgacttcaccctagaagaggagggagggattctgggtgggggtgactcttcactgattcttgtatattagcaattataatgtttgtatatgcaaaactgctagcttgattttaaaaaaaaacaaatctttaaaatctgctgcaaatttaaataattcccaaaatgaggaattctgtagttctgtgaaaaatttttttcttcagaatactaatattttgatgcatgtgtatcaccttattttgattaaatcttttccaattttgcaaacactacagtatactgcaacacaaaagattttatctgtaaacacaaagcccttcatctaatatttgttgctattgccaatttttcaatgaaatgacctaaaaacaacaaaaaaaaataacctatacggtagttgctttagggggtggggggatgctatctgttagtgcttaaaagggggtaaatgcttgccgctttagaggtggatggtgctcataaaaggccccagtcgggggtatttaaaaaggactgaacagaaatccttagctagtagaatggcagcacgctgtaaaattattactgtattgtgtactggctataagatgtagacacctttcagtaagccaatcatttgtaaccattctagcagtgtcatattaggttaataaggctgctgtgttttaaagggcatttttatttgggttttggtgaaattctttaatttgttgattatattcacataaaatcagcattcattgacacatagctctaatgacatatgtatgaaaaaccatacactggatgacctagtcgattatttaagcataaaataaattgtgttaaactcttca

SEQ ID NO: 444747 - DNA, 7296 bp, Homo sapiens
actctttgccgtggttttggatgttggaataccggcggtgatctgtcttttataaactcacctgatttaaaggaaagatgagtgaagaaccaaaggagaaaaatgcaaaacctgctcataggaaaaggaaaggaaaaaagtctgatgccaatgcaagttacttaagagcagctcgagctggacaccttgaaaaggccctcgactacataaaaaatggagttgacatcaacatttgcaatcagaatgggttgaacgctctccaccttgcttccaaagaaggccatgtagaggttgtttctgagctgctgcagagagaagccaatgtggatgcagctacaaagaaaggaaacacagcattgcacatcgcatctttggctgggcaagcagaggtggtaaaagtcttggttacaaatggagccaatgtcaatgcacaatctcagaatggtttcacgccattgtatatggcagcccaggaaaatcacctggaagttgtcaagtttcttcttgacaatggtgcaagccagagcctagccacagaggatggcttcacaccattggcagtggctttgcaacaaggtcacgaccaagtcgtttcgctcctgctagagaatgacaccaaaggaaaagtgcgtctcccagctcttcatatcgcggcccgaaaagacgacacgaaagccgccgccctgctgctgcagaatgacaacaatgcagatgtggaatcaaagagtggcttcactccgctccacatagctgctcactatggaaatatcaatgtagccacgttgctgttaaaccgagcggctgctgtggatttcaccgcaaggaatgacatcactcctttacatgttgcatcaaaaagaggaaatgcaaatatggtaaaactattgctcgatcgaggagctaaaatcgatgccaaaaccagggatggtctgacaccactgcactgtggagcaaggagtggccacgagcaggtggtagaaatgttgcttgatcgagctgcccccattctttcaaaaaccaagaatggattatctccattgcacatggccacacaaggggatcatttaaactgcgtccagcttctcctccagcataatgtacccgtggatgatgtcaccaatgactacctgactgccctacacgtggctgcccactgtggccattacaaagttgccaaggttctcttggataagaaagctaaccccaatgccaaagccctgaatggctttacccctcttcatattgcctgcaagaagaatcgaattaaagtaatggaactccttctgaaacacggtgcatccatccaagctgtaaccgagtcgggccttaccccaatccatgttgctgccttcatggggcatgtaaatattgtatcacaactaatgcatcatggagcctcaccaaacaccaccaatgtgagaggagaaacagcactgcacatggcagctcgctccggccaagctgaagttgtgcggtatctggtacaagacggagctcaggtagaagctaaagctaaggatgaccaaacaccactccacatttcagcccgactggggaaagcagacatagtacaacagctgttgcagcaaggggcatctccaaatgcagccacaacttctgggtacaccccacttcacctttccgcccgagaggggcatgaggatgtggccgcgttccttttggatcatggagcgtctttatctataacaacaaagaaaggatttactcctcttcatgtggcagcaaaatatggaaagcttgaagtcgccaatctcctgctacagaaaagtgcatctccagatgctgctgggaaggtaagaggtcaccagccactctgaagcaggccacttccacgataacaaaatacacccttgctaatattcactaatagccactcaaattataactaaatatttaagtcccactaggatgaagagcacttgggaaataaaaggtaaatgctggggtccaagtactgtggaaaccggaatgtaaatatgccctatgtcgtatccaatctaatttcatttcctcaatctaagcctctggttttaagacacctttgacactggttgttgtttctgcacgtgttttcagagcgggctaacaccactgcatgtagctgcacattacgataatcagaaagtggcccttctgcttttggaccaaggagcctcacctcacgcagccgcaaagaatggttatacgccactgcacatcgctgccaaaaagaaccagatggacatagcgacaactctgctggaatatggtgctgatgccaacgcagttacccggcaaggaattgcttccgtccatctcgcagctcaggaagggcacgtggacatggtgtcgctgctcctcggtagaaatgcgaatgtgaacctgagcaataagagcggcctgaccccactccatttggctgctcaagaagatcgagtgaatgtggcagaagtcctcgtaaaccaaggggctcatgtggacgcccagacaaagatgggatacacaccactgcatgtgggctgccactatggaaatatcaagattgttaatttcctgctccagcattctgcaaaagttaatgccaaaacaaagaatgggtatacgccattacatcaagcagcacagcaggggcatacgcatataataaatgtcttacttcagaacaacgcctcccccaatgaactcactgtgaatgggaatactgcccttggcattgcccggcgcctcggctacatctcagtagtggacaccctgaagatagtgaccgaagaaaccatgaccacaactactgtcacagagaagcacaaaatgaatgttccagaaacgatgaatgaagttcttgatatgtctgatgatgaagttcgtaaagccaatgcccctgaaatgctcagtgatggcgaatatatctcagatgttgaagaaggtgaagatgcaatgaccggggacacagacaaatatcttgggccacaggaccttaaggaattgggtgatgattccctgcctgcagagggttacatgggctttagtctcggagcgcgttctgccagcctccgctccttcagttcggataggtcttacaccttgaacagaagctcctatgcacgggacagcatgatgattgaagaactccttgtgccatccaaagagcagcatctaacattcacaagggaatttgattcagattctcttagacattacagctgggctgcagacaccttagacaatgtcaatcttgtttcaagccccattcattctgggtttctggttagctttatggtggacgcgagagggggctccatgagaggaagccgtcatcacgggatgagaatcatcattcctccacgcaagtgtacggcccccactcgaatcacctgccgtttggtaaagagacataaactggccaacccaccccccatggtggaaggagagggattagccagtaggctggtagaaatgggtcctgcaggggcacaatttttaggccctgtcatagtggaaatccctcactttgggtccatgagaggaaaagagagagaactcattgttcttcgaagtgaaaatggtgaaacttggaaggagcatcagtttgacagcaaaaatgaagatttaaccgagttacttaatggcatggatgaagaacttgatagcccagaagagttagggaaaaagcgtatctgcaggattatcacgaaagatttcccccagtattttgcagtggtttcccggattaagcaggaaagcaaccagattggtcctgaaggtggaattctgagcagcaccacagtgccccttgttcaagcatctttcccagagggtgccctaactaaaagaattcgagtgggcctccaggcccagcctgttccagatgaaattgtgaaaaagatccttggaaacaaagcaacttttagcccaattgtcactgtggaaccaagaagacggaaattccataaaccaatcacaatgaccattccggtgcccccgccctcaggagaaggtgtatccaatggatacaaaggggacactacacccaatctgcgtcttctctgtagcattacagggggcacttcgcctgctcagtgggaagacatcacaggaacaactcctttgacgtttataaaagattgtgtctcctttacaaccaatgtttcagccagattttggcttgcagactgccatcaagttttagaaactgtggggttagccacgcaactgtacagagaattgatatgtgttccatatatggccaagtttgttgtttttgccaaaatgaatgatcccgtagaatcttccttgcgatgtttctgcatgacagatgacaaagtggacaaaactttagagcaacaagagaattttgaggaagtcgcaagaagcaaagatattgaggttctggaaggaaaacctatttatgttgattgttatggaaatttggccccacttaccaaaggaggacagcaacttgtttttaacttttattctttcaaagaaaatagactgccattttccatcaagattagagacaccagccaagagccctgtggtcgtctgtcttttctgaaagaaccaaagacaacaaaaggactgcctcaaacagcggtttgcaacttaaatatcactctgccagcacataaaaagattgagaaaacagatagacgacagagcttcgcatccttagctttacgtaagcgctacagctacttgactgagcctggaatgagtccacagagtccatgtgaacggacagatatcaggatggcaatagtagccgatcacctgggacttagttggacagaactggcaagggaactgaatttttcagtggatgaaatcaatcaaatacgtgtggaaaatccaaattctttaatttctcagagcttcatgttattaaaaaaatgggttaccagagacggaaaaaatgccacaactgatgccttaacttcggtcttgacaaaaattaatcgaatagatatagtgacactgctagaaggaccaatatttgattatggaaatatttcaggcaccagaagttttgcagatgagaacaatgttttccatgaccctgttgatggttatccttcccttcaagtggaactggaaacccccacagggttgcactacacaccacctacccctttccagcaagatgattattttagtgatatctctagcatagaatctccccttagaacccctagtagactgagtgatgggctagtgccttcccaggggaacatagagcattccgcagatggacctccagtcgtaactgcagaagacgcttccttagaagacagcaaactggaagactcagtgcctttaacagaaatgcctgaagcagtggatgtagatgagagccagttggagaatgtatgtctgagttggcagaatgagacatcaagtggaaacctagagtcctgcgctcaagctcgaagagtaactggtgggttactagatcgactggatgacagccctgaccagtgtagagattccattacctcatatctcaaaggagaagctggcaaatttgaagcaaatggaagccatacagaaatcactccagaagcaaagacaaaatcttactttccagaatcccaaaatgatgtaggaaaacagagtaccaaggaaactctgaaaccaaaaatacatggatctggtcatgttgaagaaccagcatcaccactagcagcatatcagaaatctctagaagaaaccagcaagcttataatagaagagactaaaccctgtgtgcctgtcagtatgaaaaagatgagtaggacttctccagcagatggcaagccaaggcttagcctccatgaagaagaggggtccagtgggtctgagcaaaagcagggagaaggttttaaggtgaaaacgaagaaagaaatccggcatgtggaaaagaagagccactcgtaacagcgaacggtcagtcaaggatcataagtttttactgccagtattgagaaattcgtggaagaaatgtcagcaggaagtaaaaattcaccgagaagtgtgtgtgtgttcgctgcttccacacattaatggcatgattttttttatgcaaaaagaaaagaaaagaaaaccacccacattttaatttagcatgagccaatttacagagcatggaaatcactttcatttccggattggcgcgtgtgcaattagcaatgcagtgtatatacaagaagccatgctgttaacagtttatctcaagtaatttggtgtcatttacaaaaggaagaaattcctgccatcagaagggacagaaggagatggaatgatcaaatcacagagaaacactaaaattactaaatctacaacagctcgccttatttttcttggacccaaactgtcagggtataaacactatttgtttcttttttaaaacatcgatagttttgctgtaaataataacactgtataaattctaacagaaaaatagaataaaatgttgataaggcactgcctcttagaacacaaacagaatattgcaaatgcatttaacaaataggggtctcaagtgacttcaccctagaagaggagggagggattctgggtgggggtgactcttcactgattcttgtatattagcaattataatgtttgtatatgcaaaactgctagcttgattttatctgtagttctgtgaaaaatttttttcttcagaatactaatattttgatgcatgtgtatcaccttattttgattaaatcttttccaattttgcaaacactacagtatactgcaacacaaaagattttatctgtaaacacaaagcccttcatctaatatttgttgctattgccaatttttcaatgaaatgacctaaaaacaacaaaaaaaaataacctatacggtagttgctttagggggtggggggatgctatctgttagtgcttaaaagggggtaaatgcttgccgctttagaggtggatggtgctcataaaaggccccagtcgggggtatttaaaaaggactgaacagaaatccttagctagtagaatggcagcacgctgtaaaattattactgtattgtgtactggctataagatgtagacacctttcagtaagccaatcatttgtaaccattctagcagtgtcatattaggttaataaggctgctgtgttttaaagggcatttttatttgggttttggtgaaattctttaatttgttgattatattcacataaaatcagcattcattgacacatagctctaatgacatatgtatgaaaaaccatacactggatgacctagtcgattatttaagcataaaataaattgtgttaaactcttca

SEQ ID NO: 444748 - DNA, 7405 bp, Homo sapiens
actctttgccgtggttttggatgttggaataccggcggtgatctgtcttttataaactcacctgatttaaaggaaagatgagtgaagaaccaaaggagaaaaatgcaaaacctgctcataggaaaaggaaaggaaaaaagtctgatgccaatgcaagttacttaagagcagctcgagctggacaccttgaaaaggccctcgactacataaaaaatggagttgacatcaacatttgcaatcagaatgggttgaacgctctccaccttgcttccaaagaaggccatgtagaggttgtttctgagctgctgcagagagaagccaatgtggatgcagctacaaagaaaggaaacacagcattgcacatcgcatctttggctgggcaagcagaggtggtaaaagtcttggttacaaatggagccaatgtcaatgcacaatctcagaatggtttcacgccattgtatatggcagcccaggaaaatcacctggaagttgtcaagtttcttcttgacaatggtgcaagccagagcctagccacagaggatggcttcacaccattggcagtggctttgcaacaaggtcacgaccaagtcgtttcgctcctgctagagaatgacaccaaaggaaaagtgcgtctcccagctcttcatatcgcggcccgaaaagacgacacgaaagccgccgccctgctgctgcagaatgacaacaatgcagatgtggaatcaaagagtggcttcactccgctccacatagctgctcactatggaaatatcaatgtagccacgttgctgttaaaccgagcggctgctgtggatttcaccgcaaggaatgacatcactcctttacatgttgcatcaaaaagaggaaatgcaaatatggtaaaactattgctcgatcgaggagctaaaatcgatgccaaaaccagggatggtctgacaccactgcactgtggagcaaggagtggccacgagcaggtggtagaaatgttgcttgatcgagctgcccccattctttcaaaaaccaagaatggattatctccattgcacatggccacacaaggggatcatttaaactgcgtccagcttctcctccagcataatgtacccgtggatgatgtcaccaatgactacctgactgccctacacgtggctgcccactgtggccattacaaagttgccaaggttctcttggataagaaagctaaccccaatgccaaagccctgaatggctttacccctcttcatattgcctgcaagaagaatcgaattaaagtaatggaactccttctgaaacacggtgcatccatccaagctgtaaccgagtcgggccttaccccaatccatgttgctgccttcatggggcatgtaaatattgtatcacaactaatgcatcatggagcctcaccaaacaccaccaatgtgagaggagaaacagcactgcacatggcagctcgctccggccaagctgaagttgtgcggtatctggtacaagacggagctcaggtagaagctaaagctaaggatgaccaaacaccactccacatttcagcccgactggggaaagcagacatagtacaacagctgttgcagcaaggggcatctccaaatgcagccacaacttctgggtacaccccacttcacctttccgcccgagaggggcatgaggatgtggccgcgttccttttggatcatggagcgtctttatctataacaacaaagaaaggatttactcctcttcatgtggcagcaaaatatggaaagcttgaagtcgccaatctcctgctacagaaaagtgcatctccagatgctgctgggaaggtaagaggtcaccagccactctgaagcaggccacttccacgataacaaaatacacccttgctaatattcactaatagccactcaaattataactaaatatttaagtcccactaggatgaagagcacttgggaaataaaaggtaaatgctggggtccaagtactgtggaaaccggaatgtaaatatgccctatgtcgtatccaatctaatttcatttcctcaatctaagcctctggttttaagacacctttgacactggttgttgtttctgcacgtgttttcagagcgggctaacaccactgcatgtagctgcacattacgataatcagaaagtggcccttctgcttttggaccaaggagcctcacctcacgcagccgcaaagaatggttatacgccactgcacatcgctgccaaaaagaaccagatggacatagcgacaactctgctggaatatggtgctgatgccaacgcagttacccggcaaggaattgcttccgtccatctcgcagctcaggaagggcacgtggacatggtgtcgctgctcctcggtagaaatgcgaatgtgaacctgagcaataagagcggcctgaccccactccatttggctgctcaagaagatcgagtgaatgtggcagaagtcctcgtaaaccaaggggctcatgtggacgcccagacaaagatgggatacacaccactgcatgtgggctgccactatggaaatatcaagattgttaatttcctgctccagcattctgcaaaagttaatgccaaaacaaagaatgggtatacgccattacatcaagcagcacagcaggggcatacgcatataataaatgtcttacttcagaacaacgcctcccccaatgaactcactgtgaatgggaatactgcccttggcattgcccggcgcctcggctacatctcagtagtggacaccctgaagatagtgaccgaagaaaccatgaccacaactactgtcacagagaagcacaaaatgaatgttccagaaacgatgaatgaagttcttgatatgtctgatgatgaagttcgtaaagccaatgcccctgaaatgctcagtgatggcgaatatatctcagatgttgaagaaggtgaagatgcaatgaccggggacacagacaaatatcttgggccacaggaccttaaggaattgggtgatgattccctgcctgcagagggttacatgggctttagtctcggagcgcgttctgccagcctccgctccttcagttcggataggtcttacaccttgaacagaagctcctatgcacgggacagcatgatgattgaagaactccttgtgccatccaaagagcagcatctaacattcacaagggaatttgattcagattctcttagacattacagctgggctgcagacaccttagacaatgtcaatcttgtttcaagccccattcattctgggtttctggttagctttatggtggacgcgagagggggctccatgagaggaagccgtcatcacgggatgagaatcatcattcctccacgcaagtgtacggcccccactcgaatcacctgccgtttggtaaagagacataaactggccaacccaccccccatggtggaaggagagggattagccagtaggctggtagaaatgggtcctgcaggggcacaatttttaggccctgtcatagtggaaatccctcactttgggtccatgagaggaaaagagagagaactcattgttcttcgaagtgaaaatggtgaaacttggaaggagcatcagtttgacagcaaaaatgaagatttaaccgagttacttaatggcatggatgaagaacttgatagcccagaagagttagggaaaaagcgtatctgcaggattatcacgaaagatttcccccagtattttgcagtggtttcccggattaagcaggaaagcaaccagattggtcctgaaggtggaattctgagcagcaccacagtgccccttgttcaagcatctttcccagagggtgccctaactaaaagaattcgagtgggcctccaggcccagcctgttccagatgaaattgtgaaaaagatccttggaaacaaagcaacttttagcccaattgtcactgtggaaccaagaagacggaaattccataaaccaatcacaatgaccattccggtgcccccgccctcaggagaaggtgtatccaatggatacaaaggggacactacacccaatctgcgtcttctctgtagcattacagggggcacttcgcctgctcagtgggaagacatcacaggaacaactcctttgacgtttataaaagattgtgtctcctttacaaccaatgtttcagccagattttggcttgcagactgccatcaagttttagaaactgtggggttagccacgcaactgtacagagaattgatatgtgttccatatatggccaagtttgttgtttttgccaaaatgaatgatcccgtagaatcttccttgcgatgtttctgcatgacagatgacaaagtggacaaaactttagagcaacaagagaattttgaggaagtcgcaagaagcaaagatattgaggttctggaaggaaaacctatttatgttgattgttatggaaatttggccccacttaccaaaggaggacagcaacttgtttttaacttttattctttcaaagaaaatagactgccattttccatcaagattagagacaccagccaagagccctgtggtcgtctgtcttttctgaaagaaccaaagacaacaaaaggactgcctcaaacagcggtttgcaacttaaatatcactctgccagcacataaaaagattgagaaaacagatagacgacagagcttcgcatccttagctttacgtaagcgctacagctacttgactgagcctggaatgagtccacagagtccatgtgaacggacagatatcaggatggcaatagtagccgatcacctgggacttagttggacagaactggcaagggaactgaatttttcagtggatgaaatcaatcaaatacgtgtggaaaatccaaattctttaatttctcagagcttcatgttattaaaaaaatgggttaccagagacggaaaaaatgccacaactgatgccttaacttcggtcttgacaaaaattaatcgaatagatatagtgacactgctagaaggaccaatatttgattatggaaatatttcaggcaccagaagttttgcagatgagaacaatgttttccatgaccctgttgatggttatccttcccttcaagtggaactggaaacccccacagggttgcactacacaccacctacccctttccagcaagatgattattttagtgatatctctagcatagaatctccccttagaacccctagtagactgagtgatgggctagtgccttcccaggggaacatagagcattccgcagatggacctccagtcgtaactgcagaagacgcttccttagaagacagcaaactggaagactcagtgcctttaacagaaatgcctgaagcagtggatgtagatgagagccagttggagaatgtatgtctgagttggcagaatgagacatcaagtggaaacctagagtcctgcgctcaagctcgaagagtaactggtgggttactagatcgactggatgacagccctgaccagtgtagagattccattacctcatatctcaaaggagaagctggcaaatttgaagcaaatggaagccatacagaaatcactccagaagcaaagacaaaatcttactttccagaatcccaaaatgatgtaggaaaacagagtaccaaggaaactctgaaaccaaaaatacatggatctggtcatgttgaagaaccagcatcaccactagcagcatatcagaaatctctagaagaaaccagcaagcttataatagaagagactaaaccctgtgtgcctgtcagtatgaaaaagatgagtaggacttctccagcagatggcaagccaaggcttagcctccatgaagaagaggggtccagtgggtctgagcaaaaggtcaaaagtccgggtgcggctcctacacggatgactgcctgctgttataagcagggagaaggttttaaggtgaaaacgaagaaagaaatccggcatgtggaaaagaagagccactcgtaacagcgaacggtcagtcaaggatcataagtttttactgccagtattgagaaattcgtggaagaaatgtcagcaggaagtaaaaattcaccgagaagtgtgtgtgtgttcgctgcttccacacattaatggcatgattttttttatgcaaaaagaaaagaaaagaaaaccacccacattttaatttagcatgagccaatttacagagcatggaaatcactttcatttccggattggcgcgtgtgcaattagcaatgcagtgtatatacaagaagccatgctgttaacagtttatctcaagtaatttggtgtcatttacaaaaggaagaaattcctgccatcagaagggacagaaggagatggaatgatcaaatcacagagaaacactaaaattactaaatctacaacagctcgccttatttttcttggacccaaactgtcagggtataaacactatttgtttcttttttaaaacatcgatagttttgctgtaaataataacactgtataaattctaacagaaaaatagaataaaatgttgataaggcactgcctcttagaacacaaacagaatattgcaaatgcatttaacaaataggggtctcaagtgacttcaccctagaagaggagggagggattctgggtgggggtgactcttcactgattcttgtatattagcaattataatgtttgtatatgcaaaactgctagcttgattttaaaaaaaaacaaatctttaaaatctgctgcaaatttaaataattcccaaaatgaggaattctgtagttctgtgaaaaatttttttcttcagaatactaatattttgatgcatgtgtatcaccttattttgattaaatcttttccaattttgcaaacactacagtatactgcaacacaaaagattttatctgtaaacacaaagcccttcatctaatatttgttgctattgccaatttttcaatgaaatgacctaaaaacaacaaaaaaaaataacctatacggtagttgctttagggggtggggggatgctatctgttagtgcttaaaagggggtaaatgcttgccgctttagaggtggatggtgctcataaaaggccccagtcgggggtatttaaaaaggactgaacagaaatccttagctagtagaatggcagcacgctgtaaaattattactgtattgtgtactggctataagatgtagacacctttcagtaagccaatcatttgtaaccattctagcagtgtcatattaggttaataaggctgctgtgttttaaagggcatttttatttgggttttggtgaaattctttaatttgttgattatattcacataaaatcagcattcattgacacatagctctaatgacatatgtatgaaaaaccatacactggatgacctagtcgattatttaagcataaaataaattgtgttaaactcttca

SEQ ID NO: 444749 - DNA, 3068 bp, Homo sapiens
  misc_feature (61)..(61): n is a, c, g, or t
  misc_feature (80)..(80): n is a, c, g, or t
  misc_feature (97)..(97): n is a, c, g, or t
  misc_feature (203)..(203): n is a, c, g, or t
  misc_feature (283)..(283): n is a, c, g, or t
  misc_feature (316)..(316): n is a, c, g, or t
cgaggcggtgatcgcgtaggccgatgacgagcgaggcgatgtccgacgagcaccgcgcganaggagcgcggctgccgcgngacgggcggacgagganatgcgtcggaggggcatcgggcgcgtggcggacgaccggcgtgattacgggcggcgacgtagggcgatgacctgcgtgaataggggcggaagcgcgggacgatagncggcgggaacaccgcggatacgggacgcaagaagtgatggcggagtggtgcggcggttagtagaggcgcggcgggacganagtgggcgtgggccgcaatcggggtggcgacanaggatatcgtgaggcggatggggcatggcgggcggccggaaatgcggggggtatgggcggtggagacggggggcgagcgggagatacggggtgaacggaaggcggcggtaatggcacgaacggaagcggcagacaataaacggcgaggagggacgggcggggaataaactggggtgggggtgctggggggtgcggagagagccaatgggcgatatgcgggggtaatcctgggcgtgggcgaaagacgggggcggcacacaagggggcggcgacgcgccacctacccctttccagcaagatgattattttagtgatatctctagcatagaatctccccttagaacccctagtagactgagtgatgggctagtgccttcccaggggaacatagagcattccgcagatggacctccagtcgtaactgcagaagacgcttccttagaagacagcaaactggaagactcagtgcctttaacagaaatgcctgaagcagtggatgtagatgagagccagttggagaatgtatgtctgagtgagtatcctcaataccttggaaatttggctgggtccccaaaagatgttaaaccagcagagcctagaaaactaggagtaagctctgagcagcaggagaaaggaaaatctggtcctgatgaggagatgatggaagagaaactcaaatctctatttgaggacattcaacttgaagaaggagtagagtctgaggagatgacagaagaaaaagtacaggctattcttaagcgtgttcagcaagcagaactggaaatgtcttcaattacaggttggcagaatgagacatcaagtggaaacctagagtcctgcgctcaagctcgaagagtaactggtgggttactagatcgactggatgacagctcatatctcaaaggagaagctggcaaatttgaagcaaatggaagccatacagaaatcactccagaagcaaagacaaaatcttactttccagaatcccaaaatgatgtaggaaaacagagtaccaaggaaactctgaaaccaaaaatacatggatctggtcatgttgaagaaccagcatcaccactagcagcatatcagaaatctctagaagaaaccagcaagcttataatagaagagactaaaccctgtgtgcctgtcagtatgaaaaagatgagtaggacttctccagcagatggcaagccaaggcttagcctccatgaagaagaggggtccagtgggtctgagcaaaagcagggagaaggttttaaggtgaaaacgaagaaagaaatccggcatgtggaaaagaagagccactcgtaacagcgaacggtcagtcaaggatcataagtttttactgccagtattgagaaattcgtggaagaaatgtcagcaggaagtaaaaattcaccgagaagtgtgtgtgtgttcgctgcttccacacattaatggcatgattttttttatgcaaaaagaaaagaaaagaaaaccacccacattttaatttagcatgagccaatttacagagcatggaaatcactttcatttccggattggcgcgtgtgcaattagcaatgcagtgtatatacaagaagccatgctgttaacagtttatctcaagtaatttggtgtcatttacaaaaggaagaaattcctgccatcagaagggacagaaggagatggaatgatcaaatcacagagaaacactaaaattactaaatctacaacagctcgccttatttttcttggacccaaactgtcagggtataaacactatttgtttcttttttaaaacatcgatagttttgctgtaaataataacactgtataaattctaacagaaaaatagaataaaatgttgataaggcactgcctcttagaacacaaacagaatattgcaaatgcatttaacaaataggggtctcaagtgacttcaccctagaagaggagggagggattctgggtgggggtgactcttcactgattcttgtatattagcaattataatgtttgtatatgcaaaactgctagcttgattttaaaaaaaaacaaatctttaaaatctgctgcaaatttaaataattcccaaaatgaggaattctgtagttctgtgaaaaatttttttcttcagaatactaatattttgatgcatgtgtatcaccttattttgattaaatcttttccaattttgcaaacactacagtatactgcaacacaaaagattttatctgtaaacacaaagcccttcatctaatatttgttgctattgccaatttttcaatgaaatgacctaaaaacaacaaaaaaaaataacctatacggtagttgctttagggggtggggggatgctatctgttagtgcttaaaagggggtaaatgcttgccgctttagaggtggatggtgctcataaaaggccccagtcgggggtatttaaaaaggactgaacagaaatccttagctagtagaatggcagcacgctgtaaaattattactgtattgtgtactggctataagatgtagacacctttcagtaagccaatcatttgtaaccattctagcagtgtcatattaggttaataaggctgctgtgttttaaagggcatttttatttgggttttggtgaaattctttaatttgttgattatattcacataaaatcagcattcattgacacatagctctaatgacatatgtatgaaaaaccatacactggatgacctagtcgattatttaagcataaaataaattgtgttaaactcttca

SEQ ID NO: 444750 - DNA, 13183 bp, Homo sapiens
actctttgccgtggttttggatgttggaataccggcggtgatctgtcttttataaactcacctgatttaaaggaaagatgagtgaagaaccaaaggagaaaaatgcaaaacctgctcataggaaaaggaaaggaaaaaagtctgatgccaatgcaagttacttaagagcagctcgagctggacaccttgaaaaggccctcgactacataaaaaatggagttgacatcaacatttgcaatcagaatgggttgaacgctctccaccttgcttccaaagaaggccatgtagaggttgtttctgagctgctgcagagagaagccaatgtggatgcagctacaaagaaaggaaacacagcattgcacatcgcatctttggctgggcaagcagaggtggtaaaagtcttggttacaaatggagccaatgtcaatgcacaatctcagaatggtttcacgccattgtatatggcagcccaggaaaatcacctggaagttgtcaagtttcttcttgacaatggtgcaagccagagcctagccacagaggatggcttcacaccattggcagtggctttgcaacaaggtcacgaccaagtcgtttcgctcctgctagagaatgacaccaaaggaaaagtgcgtctcccagctcttcatatcgcggcccgaaaagacgacacgaaagccgccgccctgctgctgcagaatgacaacaatgcagatgtggaatcaaagagtggcttcactccgctccacatagctgctcactatggaaatatcaatgtagccacgttgctgttaaaccgagcggctgctgtggatttcaccgcaaggaatgacatcactcctttacatgttgcatcaaaaagaggaaatgcaaatatggtaaaactattgctcgatcgaggagctaaaatcgatgccaaaaccagggatggtctgacaccactgcactgtggagcaaggagtggccacgagcaggtggtagaaatgttgcttgatcgagctgcccccattctttcaaaaaccaagaatggattatctccattgcacatggccacacaaggggatcatttaaactgcgtccagcttctcctccagcataatgtacccgtggatgatgtcaccaatgactacctgactgccctacacgtggctgcccactgtggccattacaaagttgccaaggttctcttggataagaaagctaaccccaatgccaaagccctgaatggctttacccctcttcatattgcctgcaagaagaatcgaattaaagtaatggaactccttctgaaacacggtgcatccatccaagctgtaaccgagtcgggccttaccccaatccatgttgctgccttcatggggcatgtaaatattgtatcacaactaatgcatcatggagcctcaccaaacaccaccaatgtgagaggagaaacagcactgcacatggcagctcgctccggccaagctgaagttgtgcggtatctggtacaagacggagctcaggtagaagctaaagctaaggatgaccaaacaccactccacatttcagcccgactggggaaagcagacatagtacaacagctgttgcagcaaggggcatctccaaatgcagccacaacttctgggtacaccccacttcacctttccgcccgagaggggcatgaggatgtggccgcgttccttttggatcatggagcgtctttatctataacaacaaagaaaggatttactcctcttcatgtggcagcaaaatatggaaagcttgaagtcgccaatctcctgctacagaaaagtgcatctccagatgctgctgggaaggtaagaggtcaccagccactctgaagcaggccacttccacgataacaaaatacacccttgctaatattcactaatagccactcaaattataactaaatatttaagtcccactaggatgaagagcacttgggaaataaaaggtaaatgctggggtccaagtactgtggaaaccggaatgtaaatatgccctatgtcgtatccaatctaatttcatttcctcaatctaagcctctggttttaagacacctttgacactggttgttgtttctgcacgtgttttcagagcgggctaacaccactgcatgtagctgcacattacgataatcagaaagtggcccttctgcttttggaccaaggagcctcacctcacgcagccgcaaagaatggttatacgccactgcacatcgctgccaaaaagaaccagatggacatagcgacaactctgctggaatatggtgctgatgccaacgcagttacccggcaaggaattgcttccgtccatctcgcagctcaggaagggcacgtggacatggtgtcgctgctcctcggtagaaatgcgaatgtgaacctgagcaataagagcggcctgaccccactccatttggctgctcaagaagatcgagtgaatgtggcagaagtcctcgtaaaccaaggggctcatgtggacgcccagacaaagatgggatacacaccactgcatgtgggctgccactatggaaatatcaagattgttaatttcctgctccagcattctgcaaaagttaatgccaaaacaaagaatgggtatacgccattacatcaagcagcacagcaggggcatacgcatataataaatgtcttacttcagaacaacgcctcccccaatgaactcactgtgaatgggaatactgcccttggcattgcccggcgcctcggctacatctcagtagtggacaccctgaagatagtgaccgaagaaaccatgaccacaactactgtcacagagaagcacaaaatgaatgttccagaaacgatgaatgaagttcttgatatgtctgatgatgaagttcgtaaagccaatgcccctgaaatgctcagtgatggcgaatatatctcagatgttgaagaaggtgaagatgcaatgaccggggacacagacaaatatcttgggccacaggaccttaaggaattgggtgatgattccctgcctgcagagggttacatgggctttagtctcggagcgcgttctgccagcctccgctccttcagttcggataggtcttacaccttgaacagaagctcctatgcacgggacagcatgatgattgaagaactccttgtgccatccaaagagcagcatctaacattcacaagggaatttgattcagattctcttagacattacagctgggctgcagacaccttagacaatgtcaatcttgtttcaagccccattcattctgggtttctggttagctttatggtggacgcgagagggggctccatgagaggaagccgtcatcacgggatgagaatcatcattcctccacgcaagtgtacggcccccactcgaatcacctgccgtttggtaaagagacataaactggccaacccaccccccatggtggaaggagagggattagccagtaggctggtagaaatgggtcctgcaggggcacaatttttaggccctgtcatagtggaaatccctcactttgggtccatgagaggaaaagagagagaactcattgttcttcgaagtgaaaatggtgaaacttggaaggagcatcagtttgacagcaaaaatgaagatttaaccgagttacttaatggcatggatgaagaacttgatagcccagaagagttagggaaaaagcgtatctgcaggattatcacgaaagatttcccccagtattttgcagtggtttcccggattaagcaggaaagcaaccagattggtcctgaaggtggaattctgagcagcaccacagtgccccttgttcaagcatctttcccagagggtgccctaactaaaagaattcgagtgggcctccaggcccagcctgttccagatgaaattgtgaaaaagatccttggaaacaaagcaacttttagcccaattgtcactgtggaaccaagaagacggaaattccataaaccaatcacaatgaccattccggtgcccccgccctcaggagaaggtgtatccaatggatacaaaggggacactacacccaatctgcgtcttctctgtagcattacagggggcacttcgcctgctcagtgggaagacatcacaggaacaactcctttgacgtttataaaagattgtgtctcctttacaaccaatgtttcagccagattttggcttgcagactgccatcaagttttagaaactgtggggttagccacgcaactgtacagagaattgatatgtgttccatatatggccaagtttgttgtttttgccaaaatgaatgatcccgtagaatcttccttgcgatgtttctgcatgacagatgacaaagtggacaaaactttagagcaacaagagaattttgaggaagtcgcaagaagcaaagatattgaggttctggaaggaaaacctatttatgttgattgttatggaaatttggccccacttaccaaaggaggacagcaacttgtttttaacttttattctttcaaagaaaatagactgccattttccatcaagattagagacaccagccaagagccctgtggtcgtctgtcttttctgaaagaaccaaagacaacaaaaggactgcctcaaacagcggtttgcaacttaaatatcactctgccagcacataaaaaggagacagagtcagatcaagatgatgagattgagaaaacagatagacgacagagcttcgcatccttagctttacgtaagcgctacagctacttgactgagcctggaatgattgaacggagtacaggagcaacaagatccctccccaccacttactcatacaagccattcttttctacaagaccataccagtcctggacaacagctccgattacagtgcctgggccagccaagtcaggcttcacttccttatcaagttcttcctctaatacgccatcagcttctccgttaaaatcaatatggtctgtttcgacaccttctccaatcaaatccacattaggcgcgtcaactacatcttcagttaaatccattagtgacgtggcatctccaattagatccttacggacaatgtcttcgccgataaaaactgtggtgtcacaatctccatacaatatccaggtttcctctggtaccctggctagagctccagcagtcacggaagctacgcccttaaaagggctggcatccaattctacgttttcctctcgaacctctccagtgactacagcagggtctcttttggagaggtcatcaattactatgacaccccctgcctcccccaaatcaaacattaatatgtattcctcaagtttgccatttaagtcaattattacatcagcagcaccgctaatatcttcacctttaaagtcagtggtgtctccagttaaatcacgagttgatgtcatttcatcagccaaaattacaatggcatcttctctctcatcacctgtgaagcagatgcctggacatgcagaggtagcattagtcaatggatctatttcccctctaaaatatgcatcatcctcaactttaattaatggatgcaaagccactgccacgttacaggaaaaaatttcttctgctacaaactctgtgagctctgtggtcagtgcagccactgacacagttgagaaagtgttttctaccacgactgcaatgccattttccccactcaggtcatatgtttctgcagcaccatcagcttttcagtctctaagaactccttccgcaagtgcactctatacatcccttgggtcgtcaatatctgcaactacctcatctgtaacttcatcaattataacagtgccagtatactctgtagtcaatgttttgccagaaccagcattaaagaaacttccagactctaattcatttacaaaatcagcagcagccttgctgtcacccattaaaacattgactacggagacacatcctcagcctcacttcagtcgaacttcatctccagttaagtcatctttgttccttgcaccctctgcccttaagttgtctacaccatcttctttatcttccagtcaggagatactaaaagatgtagctgaaatgaaagaggacctaatgcggatgaccgcaatactacagacagatgtgcctgaggagaagccattccaacctgaactcccaaaggaagggagaatagatgatgaagaacctttcaaaattgtagagaaagtaaaggaagacttagtgaaagttagtgaaatccttaaaaaggatgtatgtgtagataataaaggatcacccaaatcaccaaagagtgacaaaggacactctcctgaagatgactggatagaatttagttcggaagaaatccgggaagccagacaacaagctgctgcgagccagtctccatctctgccagagagagtgcaagtaaaagcaaaagccgcctccgaaaaggattataacttgaccaaagttattgattacctaacaaatgatattgggagtagttcactgacaaacttaaaatacaagtttgaggatgcaaagaaggatggtgagggaggacagaaaagagttttaaaaccagcaattgctttgcaggaacacaaactcaaaatgcctccagcctccatgaggacttccacctctgagaaagaattgtgtaaaatggctgattccttttttggaacagatactattttagagtctcctgatgacttttctcaacacgaccaagataaaagtcccttgtctgacagtggctttgaaacaagaagtgaaaagacaccttcagccccacaaagcgctgaaacgactggtcctaaaccactttttcatgaagttcccatccctcctgttattacagaaacaagaactgaagtggttcatgttatcaggagctatgatccctcagctggggatgttccccagacccaaccagaggagcctgtgtcacctaaaccttcacctacttttatggaattggaaccaaagcccaccacctctagtattaaagaaaaggttaaagcatttcaaatgaaagccagtagtgaagaagatgaccacaatcgggttttaagcaaaggcatgcgtgttaaagaagagactcacataaccacaaccaccagaatggtttatcattctccaccaggcggtgaaggtgcatctgaaagaattgaagaaaccatgtcagtccatgacatcatgaaggcctttcagtccgggcgggatccttccaaagaactggcaggtctgtttgaacataagtcggcagtgtctccagatgttcacaagtctgctgctgaaacctcagcccagcatgcagagaaggacaaccaaatgaaacccaaactggagcgtataatagaagtccacatcgaaaaaggtaaccaagctgagcccactgaagtcattattagagaaaccaaaaagcatccagaaaaagaaatgtatgtatatcagaaagacttatcccggggagatattaacctaaaagattttctgccagaaaaacacgatgcttttccttgttcagaggaacagggtcagcaagaagaagaagaacttactgctgaagagtcattgccttcttatctggagtcttccagagtaaacactcctgtgtcccaagaagaagatagccgccctagttctgctcaactcatatctgatgactcttataaaacattgaagcttttgagtcaacactcaatagaataccatgacgatgagttgtcagaactaagaggggagtcttacaggtttgctgagaaaatgcttctgtcagaaaagctagatgtgtctcattctgatactgaggaatcggttacagaccatgcaggaccccctagctcagagttacaggggtctgataagcggtccagagaaaaaatagccactgcccccaaaaaagaaattctctccaaaatctataaagatgtttctgaaaatggtgtaggtaaagtgtctaaagatgagcattttgataaagtgacagtgttgcactattctggcaatgttagtagtccaaaacatgccatgtggatgcgctttactgaggacagattagacagaggtagagagaagttgatatatgaagatagggtggacaggactgtgaaggaggctgaagaaaaactgactgaagtgtcacagttttttcgtgacaaaactgaaaagctaaatgatgaactgcagtccccagagaaaaaggcacgccctaaaaatggcaaagaatattcttctcaaagccctaccagtagcagccctgagaaagtgctactgacagaactgctggcatccaatgatgagtgggttaaggcaagacagcatggccctgatggacaaggcttccccaaggccgaggagaaggcacccagtctgcccagcagcccagagaagatggttctctcccaacagactgaggacagcaagtccacagtggaagccaaaggaagtatttcacagagcaaagcaccagatgggccccagtctggattccagctcaaacaatctaaactcagttccattagattaaaatttgaacaaggcacacacgcaaaaagtaaggacatgtctcaagaagacagaaagtcagatggccagtccagaatcccagttaaaaaaatacaggagagcaagctacccgtctaccaagtttttgctagagaaaaacagcagaaggccatagacctcccagatgaaagtgtatctgtgcaaaaagattttatggtattaaaaaccaaagatgagcatgcccaaagcaacgaaattgttgtaaatgattctggctctgataatgtgaaaaaacagagaactgaaatgtcaagtaaagcaatgcctgactctttttctgagcagcaggctaaagacttggcatgtcatataacctcagatttagcaactaggggaccatgggacaaaaaggtctttagaacatgggagagttcgggagccactaacaataagtctcagaaagaaaaactttcgcatgtacttgttcatgatgtaagagagaatcacattggtcaccctgagagtaaaagtgttgatcaaaagaatgaatttatgtctgtgactgagagagaacgcaaattgttaacaaacggctctctctcagaaattaaagaaatgactgtaaaatctccctccaaaaaagtcttatatagggaatatgttgtgaaagaaggggaccatccaggcggattgcttgatcagccttccaggaggagcgagagctcagcagtgtcacacattcccgtcagagttgctgatgagaggagaatgctgtcttctaatattcccgatggtttttgtgaacagtcggcatttccaaaacatgaactatcacaaaaattgtcccagtcaagcatgagtaaagagacagttgagacacagcactttaattctatagaagatgaaaaagttacctattcagaaatcagcaaagtttccaaacaccagagttatgtaggtttatgcccacctctcgaggaaaccgaaacctcccccaccaaatctcctgattctttagagtttagcccaggaaaggaatctccctctagtgatgtattcgaccacagtcccattgatggattggaaaaactcgcaccactagcccagacagagggagggaaagagataaaaactttacccgtttatgtcagttttgtacaagtggggaagcaatatgaaaaggagatacaacaaggaggtgtaaaaaaaatcataagtcaggaatgtaagacagtacaagaaaccagggggaccttttatacaactagacagcaaaagcaacctccttctccccaaggtagtccagaagatgatactctagagcaagtatcctttctagacagctctgggaaaagccctttaaccccagaaacacccagttcagaggaagtgagttatgaatttacatctaagacacctgactcgctcatagcttatataccaggcaaacccagcccaattcccgaggtttctgaggagtcagaggaggaggaacaggccaagtcaacctcccttaagcagactacagtggaggaaacagcagttgagcgtgaaatgcctaatgacgtgagcaaagactctaaccaaagacccaaaaataacagagttgcctatattgaatttccccctcctccaccactggatgcggaccagattgagtcagataagaagcatcattatctcccagaaaaagaggttgacatgattgaagtcaatctgcaagatgagcatgacaagtaccagctggctgaacctgtcattagagtgcagccaccttcaccagttcctcccggggcagacgtcagtgattcaagcgatgacgaatctatttatcagccagtcccagttaaaaaatataccttcaaattaaaggaagtggacgatgaacaaaaagaaaaacccaaagcttctgctgaaaaggcttccaaccagaaagaactggaaagtaatggatctggaaaagataatgaatttggccttggccttgattcacctcagaatgaaattgcccagaatgggaacaacgaccagtccatcacagagtgttccattgccaccacagcagagttttctcatgacacggatgccacagagatcgactctctggatggctatgacctgcaagatgaagatgatggcttgacagagagtgattctaaactcccaattcaagccatggaaattaagaaagatatctggaacacagagggcattctgaagccagctgaccgctcttttagccaaagtaaacttgaagttatcgaggaggagggaaaggtgggaccagatgaggacaagccaccttctaaaagttcttcatctgaaaagactcctgataagactgatcagaagtcaggggcccagttcttcacactggaaggcagacatcctgacagatcagtgtttcctgatacttacttcagttacaaagtagatgaagaatttgccactccttttaaaacagtagctaccaaaggtctagattttgacccttggtctaataaccgaggggatgatgaagtttttgacagtaaatcacgggaagatgaaactaagccatttgggctggcggtagaagaccgctctccagcaacaacccctgatacaacgccagccagaacgccaactgatgaaagtaccccaactagtgagcctaaccccttcccatttcatgaaggaaaaatgtttgagatgactcgcagtggtgcaattgacatgagcaagagggattttgttgaagagaggctccaatttttccagattggtgagcatacttctgaagggaagtcaggggaccagggggaaggggataaaagtatggtcactgccacaccacagccacagtcaggggacaccactgtagaaaccaatctagagagaaatgtagagacacctacagtggaacctaaccccagcatcccgaccagcggagagtgtcaggaaggcacatccagtagtggctccctggagaaatcagcagcagccactaacacctctaaagttgaccccaagttgcgcacgcctataaaaatgggaatttctgcatccaccatgaccatgaagaaagaaggccctggagaaataacagataagatagaagcggtgatgaccagttgtcagggattagaaaatgaaactataacaatgatttcaaatacagccaatagccagatgggcgttaggccccatgaaaaacatgattttcaaaaagataactttaataacaacaacaatttggattcttccactatacagacagataacattatgagtaatatagttctgacagaacattctgcacccacttgtaccacagagaaagataacccagtgaaagtctcatcaggaaaaaagacaggggtactacaaggacactgtgtaagagataagcagaaagttcttggagaacagcaaaaaacaaaggaattgatagggattaggcaaaaatccaaacttcccataaaggccacttcaccaaaagataccttcccaccgaaccatatgtcaaacactaaagcaagtaaaatgaagcaggttagtcaatccgagaaaaccaaagcccttactacttcttcatgtgtagatgtaaagtccagaattccagtgaaaaacacacccagggataacataattgcagttagaaaagcatgtgccacacaaaagcaagggcagccagagaaaggcaaggccaaacagcttccatccaagttgccagtaaaggtaagatccacctgtgtcactaccaccaccaccactgccaccaccaccaccactaccaccactaccaccaccaccagctgcacagttaaagttaggaaaagtcagctcaaggaagtatgtaaacattccattgaatattttaagggaattagtggtgagaccttaaagcttgtggaccgcctctctgaagaagaaaaaaagatgcagtccgagttgtccgatgaggaagaaagtacctcaagaaacacgtcgttgtccgagacttcccggggtggccagccttcggttacaacgaagtctgctagagataagaaaacagaggcagcacctttaaaatcaaagagtgaaaaggccggcagtgagaaaaggagcagtagaaggactggtccacagagtccatgtgaacggacagatatcaggatggcaatagtagccgatcacctgggacttagttggacagaactggcaagggaactgaatttttcagtggatgaaatcaatcaaatacgtgtggaaaatccaaattctttaatttctcagagcttcatgttattaaaaaaatgggttaccagagacggaaaaaatgccacaactgatgccttaacttcggtcttgacaaaaattaatcgaatagatatagtgacactgctagaaggaccaatatttgattatggaaatatttcaggcaccagaagttttgcagatgagaacaatgttttccatgaccctgttgatggtaactactttacccccgccattcttctcaagtcatctgtgaccagttttgttacacagctaaatgacatttcccaagacagtgatcactacagttcatgctccatagctccaaggaatagtttaatgcatttatctatcatgcttcagagtcccctgaactgctggctatctcaacatctcctcttttctcttagtctttctgtgtttcctctcctctttccatttactttgtctgtatcctaatttcttctttttaggctacgcccggggtcctcta

SEQ ID NO: 444751 - DNA, 3044 bp, Homo sapiens
actctttgccgtggttttggatgttggaataccggcggtgatctgtcttttataaactcacctgatttaaaggaaagatgagtgaagaaccaaaggagaaaaatgcaaaacctgctcataggaaaaggaaaggaaaaaagtctgatgccaatgcaagttacttaagagcagctcgagctggacaccttgaaaaggccctcgactacataaaaaatggagttgacatcaacatttgcaatcagaatgggttgaacgctctccaccttgcttccaaagaaggccatgtagaggttgtttctgagctgctgcagagagaagccaatgtggatgcagctacaaagaaaggaaacacagcattgcacatcgcatctttggctgggcaagcagaggtggtaaaagtcttggttacaaatggagccaatgtcaatgcacaatctcagaatggtttcacgccattgtatatggcagcccaggaaaatcacctggaagttgtcaagtttcttcttgacaatggtgcaagccagagcctagccacagaggatggcttcacaccattggcagtggctttgcaacaaggtcacgaccaagtcgtttcgctcctgctagagaatgacaccaaaggaaaagtgcgtctcccagctcttcatatcgcggcccgaaaagacgacacgaaagccgccgccctgctgctgcagaatgacaacaatgcagatgtggaatcaaagagtggcttcactccgctccacatagctgctcactatggaaatatcaatgtagccacgttgctgttaaaccgagcggctgctgtggatttcaccgcaaggaatgacatcactcctttacatgttgcatcaaaaagaggaaatgcaaatatggtaaaactattgctcgatcgaggagctaaaatcgatgccaaaaccagggatggtctgacaccactgcactgtggagcaaggagtggccacgagcaggtggtagaaatgttgcttgatcgagctgcccccattctttcaaaaaccaagaatggattatctccattgcacatggccacacaaggggatcatttaaactgcgtccagcttctcctccagcataatgtacccgtggatgatgtcaccaatgactacctgactgccctacacgtggctgcccactgtggccattacaaagttgccaaggttctcttggataagaaagctaaccccaatgccaaagccctgaatggctttacccctcttcatattgcctgcaagaagaatcgaattaaagtaatggaactccttctgaaacacggtgcatccatccaagctgtaaccgagtcgggccttaccccaatccatgttgctgccttcatggggcatgtaaatattgtatcacaactaatgcatcatggagcctcaccaaacaccaccaatgtgagaggagaaacagcactgcacatggcagctcgctccggccaagctgaagttgtgcggtatctggtacaagacggagctcaggtagaagctaaagctaaggatgaccaaacaccactccacatttcagcccgactggggaaagcagacatagtacaacagctgttgcagcaaggggcatctccaaatgcagccacaacttctgggtacaccccacttcacctttccgcccgagaggggcatgaggatgtggccgcgttccttttggatcatggagcgtctttatctataacaacaaagaaaggatttactcctcttcatgtggcagcaaaatatggaaagcttgaagtcgccaatctcctgctacagaaaagtgcatctccagatgctgctgggaaggtaagaggtcaccagccactctgaagcaggccacttccacgataacaaaatacacccttgctaatattcactaatagccactcaaattataactaaatatttaagtcccactaggatgaagagcacttgggaaataaaaggtaaatgctggggtccaagtactgtggaaaccggaatgtaaatatgccctatgtcgtatccaatctaatttcatttcctcaatctaagcctctggttttaagacacctttgacactggttgttgtttctgcacgtgttttcagagcgggctaacaccactgcatgtagctgcacattacgataatcagaaagtggcccttctgcttttggaccaaggagcctcacctcacgcagccgcaaagaatggttatacgccactgcacatcgctgccaaaaagaaccagatggacatagcgacaactctgctggaatatggtgctgatgccaacgcagttacccggcaaggaattgcttccgtccatctcgcagctcaggaagggcacgtggacatggtgtcgctgctcctcggtagaaatgcgaatgtgaacctgagcaataagagcggcctgaccccactccatttggctgctcaagaagatcgagtgaatgtggcagaagtcctcgtaaaccaaggggctcatgtggacgcccagacaaaggtatacggccctcccttgccacacggaaaagaatgtgtccatttggtgactgcagtaaggaagaaactataattgtatcaggagaacaaaccctttaatcatctcttttctacgtagtattttaaatgtttatttatgcaagggacactaaagtctccggttgccgtattccagggacttttgtcttcaacggcctgggtacttgattctagctgcacagtaatttccccctatattaacactgttgagcctccttacaacaaatgtgtccttcggggcagagtgtgaaagcttgtacctttcttagtttttgtgatggatgttttaaatgcagacaaatagacaaatagaaaaacttgtaatttgtgacctctacgttcgttcagcatgatttatgaaacaggataaattaaggcttatttaaatattactcacttgctaaattcctaatggtctgtgcggtcatgcgtgtgttctccctctctcagacgagaaagctctcatttcaaaaagaaaaaaaaattgctaattaatcttatataatgccacaa

SEQ ID NO: 444752 - DNA, 3483 bp, Homo sapiens
actctttgccgtggttttggatgttggaataccggcggtgatctgtcttttataaactcacctgatttaaaggaaagatgagtgaagaaccaaaggagaaaaatgcaaaacctgctcataggaaaaggaaaggaaaaaagtctgatgccaatgcaagttacttaagagcagctcgagctggacaccttgaaaaggccctcgactacataaaaaatggagttgacatcaacatttgcaatcagaatgggttgaacgctctccaccttgcttccaaagaaggccatgtagaggttgtttctgagctgctgcagagagaagccaatgtggatgcagctacaaagaaaggaaacacagcattgcacatcgcatctttggctgggcaagcagaggtggtaaaagtcttggttacaaatggagccaatgtcaatgcacaatctcagaatggtttcacgccattgtatatggcagcccaggaaaatcacctggaagttgtcaagtttcttcttgacaatggtgcaagccagagcctagccacagaggatggcttcacaccattggcagtggctttgcaacaaggtcacgaccaagtcgtttcgctcctgctagagaatgacaccaaaggaaaagtgcgtctcccagctcttcatatcgcggcccgaaaagacgacacgaaagccgccgccctgctgctgcagaatgacaacaatgcagatgtggaatcaaagagtggcttcactccgctccacatagctgctcactatggaaatatcaatgtagccacgttgctgttaaaccgagcggctgctgtggatttcaccgcaaggaatgacatcactcctttacatgttgcatcaaaaagaggaaatgcaaatatggtaaaactattgctcgatcgaggagctaaaatcgatgccaaaaccagggatggtctgacaccactgcactgtggagcaaggagtggccacgagcaggtggtagaaatgttgcttgatcgagctgcccccattctttcaaaaaccaagaatggattatctccattgcacatggccacacaaggggatcatttaaactgcgtccagcttctcctccagcataatgtacccgtggatgatgtcaccaatgactacctgactgccctacacgtggctgcccactgtggccattacaaagttgccaaggttctcttggataagaaagctaaccccaatgccaaagccctgaatggctttacccctcttcatattgcctgcaagaagaatcgaattaaagtaatggaactccttctgaaacacggtgcatccatccaagctgtaaccgagtcgggccttaccccaatccatgttgctgccttcatggggcatgtaaatattgtatcacaactaatgcatcatggagcctcaccaaacaccaccaatgtgagaggagaaacagcactgcacatggcagctcgctccggccaagctgaagttgtgcggtatctggtacaagacggagctcaggtagaagctaaagctaaggatgaccaaacaccactccacatttcagcccgactggggaaagcagacatagtacaacagctgttgcagcaaggggcatctccaaatgcagccacaacttctgggtacaccccacttcacctttccgcccgagaggggcatgaggatgtggccgcgttccttttggatcatggagcgtctttatctataacaacaaagaaaggatttactcctcttcatgtggcagcaaaatatggaaagcttgaagtcgccaatctcctgctacagaaaagtgcatctccagatgctgctgggaaggtaagaggtcaccagccactctgaagcaggccacttccacgataacaaaatacacccttgctaatattcactaatagccactcaaattataactaaatatttaagtcccactaggatgaagagcacttgggaaataaaaggtaaatgctggggtccaagtactgtggaaaccggaatgtaaatatgccctatgtcgtatccaatctaatttcatttcctcaatctaagcctctggttttaagacacctttgacactggttgttgtttctgcacgtgttttcagagcgggctaacaccactgcatgtagctgcacattacgataatcagaaagtggcccttctgcttttggaccaaggagcctcacctcacgcagccgcaaagaatggttatacgccactgcacatcgctgccaaaaagaaccagatggacatagcgacaactctgctggaatatggtgctgatgccaacgcagttacccggcaaggaattgcttccgtccatctcgcagctcaggaagggcacgtggacatggtgtcgctgctcctcggtagaaatgcgaatgtgaacctgagcaataagagcggcctgaccccactccatttggctgctcaagaagatcgagtgaatgtggcagaagtcctcgtaaaccaaggggctcatgtggacgcccagacaaagatgggatacacaccactgcatgtgggctgccactatggaaatatcaagattgttaatttcctgctccagcattctgcaaaagttaatgccaaaacaaagaatgggtatacgccattacatcaagcagcacagcaggggcatacgcatataataaatgtcttacttcagaacaacgcctcccccaatgaactcactgtgaatgggaatactgcccttggcattgcccggcgcctcggctacatctcagtagtggacaccctgaagatagtgaccgaagaaaccatgaccacaactactgtcacagagaagcacaaaatgaatgttccagaaacgatgaatgaagttcttgatatgtctgatgatgaaggtaatagatgcacatggtacaaaattcccaaggtacaagagtttacggtgaaaagtgaagatgcaatgaccggggacacagacaaatatcttgggccacaggaccttaaggaattgggtgatgattccctgcctgcagagggttacatgggctttagtctcggagcgcgttctgccaggtacttcgttgttgctgtctttcatagttaatttaaaacaaccatgatttgtcataaatcaaaatcatgttcatttttcacattatcccaaaatgtgttctttggatgaagatgtgaatttagcgaaatgttctcgacgcaaatacacatgctctgctattttcttttgtggtttgcggttgttaatttcatgtgattgaacatgttaattgtgtgttctttttttttttcccactttgcagtcatgctgccagcacagtagcaaaagagctcactgacaaaactgggagaaccaatctgagtcacatatttcaaaattaagttttgttccatattgaaagaaagtattatttgctaataagtgagaaatatgtgtatagattgttcactattctctgttactgaaataataattcatgattaaaagagagcatttttgaaaaaa

SEQ ID NO: 444753 - DNA, 302 bp, Homo sapiens
ggttgtctgtttttgtttttttccttctcacttaaaaagtaaacttcatgattgggaaaaaaaaaaaaaaaagtcactttcatttaaagtcctttctctgtctctaggcccagcctgttccagatgaaattgtgaaaaagatccttggaaacaaagcaacttttagcccaattgtcactgtggaaccaagaagacggaaattccataaaccaatcacaatgaccattccggtgcccccgccctcaggagaaggtgtatccaatggatacaaaggggacactacacccaatctgcgtcttctc

SEQ ID NO: 444754 - DNA, 171 bp, Homo sapiens
catacttctgttttttgttttgctcagattttggcttgcagactgccatcaagttttagaaactgtggggttagccacgcaactgtacagagaattgatatgtgttccatatatggccaagtttgttgtttttgccaaaatgaatgatcccgtagaatcttccttgcgatg

SEQ ID NO: 444755 - DNA, 363 bp, Homo sapiens
agtgctgggattataggtatgggccactgtgcccagcctaagtctaaaaatctttataagatggtctctaaaaaaaatctgattgtaagtcattacctaaggagagttaagtcacagcctgtgtatggtcactactttgctatgaagccaagtatataaaaattaattcctgaggctgtacttgagcttgactataaaattcccttttctttttgtggcaattgagcattacttttatgaaacgtgtgataaaagtagaatatgcaatcttagtaactctctttcttttctacagaactggcaagggaactgaatttttcagtggatgaaatcaatcaaatacgtgtggaaaatccaaattct

SEQ ID NO: 444756 - DNA, 335 bp, Homo sapiens
tagggccttgtcctctaaggcatctagcaggtagcagcatcatgttaaaccaccccatagggaatggagggcctctattccctaagacttttctattgaatggcaagtaaggcttacactagttgtcttaaaaaaaaaaaaaaaaaaaaaaaaaaaaaagaaaaagaaaaagaaagctaaactcactatctactgtctctttccacaggatcataagtttttactgccagtattgagaaattcgtggaagaaatgtcagcaggaagtaaaaattcaccgagaagtgtgtgtgtgttcgctgcttccacacattaatggcatgattttttttatgc

SEQ ID NO: 444757 - DNA, 3444 bp, Homo sapiens
ggagctcttctcactcaagcccgagtttctatgttcagacatagtacattcatcactgtgtccttccaggatttggaagtctgacaaaacaccattccagtagctgcatctccaggttttgagtctagaaatgaatttaagatgtgttctcttggataagaaagctaaccccaatgccaaagccctgaatggctttacccctcttcatattgcctgcaagaagaatcgaattaaagtaatggaactccttctgaaacacggtgcatccatccaagctgtaaccgagtcgggccttaccccaatccatgttgctgccttcatggggcatgtaaatattgtatcacaactaatgcatcatggagcctcaccaaacaccaccaatgtgagaggagaaacagcactgcacatggcagctcgctccggccaagctgaagttgtgcggtatctggtacaagacggagctcaggtagaagctaaagctaaggatgaccaaacaccactccacatttcagcccgactggggaaagcagacatagtacaacagctgttgcagcaaggggcatctccaaatgcagccacaacttctgggtacaccccacttcacctttccgcccgagaggggcatgaggatgtggccgcgttccttttggatcatggagcgtctttatctataacaacaaagaaaggatttactcctcttcatgtggcagcaaaatatggaaagcttgaagtcgccaatctcctgctacagaaaagtgcatctccagatgctgctgggaagagcgggctaacaccactgcatgtagctgcacattacgataatcagaaagtggcccttctgcttttggaccaaggagcctcacctcacgcagccgcaaagaatggttatacgccactgcacatcgctgccaaaaagaaccagatggacatagcgacaactctgctggaatatggtgctgatgccaacgcagttacccggcaaggaattgcttccgtccatctcgcagctcaggaagggcacgtggacatggtgtcgctgctcctcggtagaaatgcgaatgtgaacctgagcaataagagcggcctgaccccactccatttggctgctcaagaagatcgagtgaatgtggcagaagtcctcgtaaaccaaggggctcatgtggacgcccagacaaagatgggatacacaccactgcatgtgggctgccactatggaaatatcaagattgttaatttcctgctccagcattctgcaaaagttaatgccaaaacaaagaatgggtatacgccattacatcaagcagcacagcaggggcatacgcatataataaatgtcttacttcagaacaacgcctcccccaatgaactcactgtgaatgggaatactgcccttggcattgcccggcgcctcggctacatctcagtagtggacaccctgaagatagtgaccgaagaaaccatgaccacaactactgtcacagagaagcacaaaatgaatgttccagaaacgatgaatgaagttcttgatatgtctgatgatgaaggtgaagatgcaatgaccggggacacagacaaatatcttgggccacaggaccttaaggaattgggtgatgattccctgcctgcagagggttacatgggctttagtctcggagcgcgttctgccagcctccgctccttcagttcggataggtcttacaccttgaacagaagctcctatgcacgggacagcatgatgattgaagaactccttgtgccatccaaagagcagcatctaacattcacaagggaatttgattcagattctcttagacattacagctgggctgcagacaccttagacaatgtcaatcttgtttcaagccccattcattctgggtttctggttagctttatggtggacgcgagagggggctccatgagaggaagccgtcatcacgggatgagaatcatcattcctccacgcaagtgtacggcccccactcgaatcacctgccgtttggtaaagagacataaactggccaacccaccccccatggtggaaggagagggattagccagtaggctggtagaaatgggtcctgcaggggcacaatttttaggccctgtcatagtggaaatccctcactttgggtccatgagaggaaaagagagagaactcattgttcttcgaagtgaaaatggtgaaacttggaaggagcatcagtttgacagcaaaaatgaagatttaaccgagttacttaatggcatggatgaagaacttgatagcccagaagagttagggaaaaagcgtatctgcaggattatcacgaaagatttcccccagtattttgcagtggtttcccggattaagcaggaaagcaaccagattggtcctgaaggtggaattctgagcagcaccacagtgccccttgttcaagcatctttcccagagggtgccctaactaaaagaattcgagtgggcctccaggcccagcctgttccagatgaaattgtgaaaaagatccttggaaacaaagcaacttttagcccaattgtcactgtggaaccaagaagacggaaattccataaaccaatcacaatgaccattccggtgcccccgccctcaggagaaggtgtatccaatggatacaaaggggacactacacccaatctgcgtcttctctgtagcattacagggggcacttcgcctgctcagtgggaagacatcacaggaacaactcctttgacgtttataaaagattgtgtctcctttacaaccaatgtttcagccagattttggcttgcagactgccatcaagttttagaaactgtggggttagccacgcaactgtacagagaattgatatgtgttccatatatggccaagtttgttgtttttgccaaaatgaatgatcccgtagaatcttccttgcgatgtttctgcatgacagatgacaaagtggacaaaactttagagcaacaagagaattttgaggaagtcgcaagaagcaaagatattgaggttctggaaggaaaacctatttatgttgattgttatggaaatttggccccacttaccaaaggaggacagcaacttgtttttaacttttattctttcaaagaaaatagactgccattttccatcaagattagagacaccagccaagagccctgtggtcgtctgtcttttctgaaagaaccaaagacaacaaaaggactgcctcaaacagcggtttgcaacttaaatatcactctgccagcacataaaaagattgagaaaacagatagacgacagagcttcgcatccttagctttacgtaagcgctacagctacttgactgagcctggaatgagtgagtttcctgacacgtccactaatccgggtcaatgttttaggagaagagacattttttctatgcgctctaaattatgatgtggtttcgaaaataaacgccctgggcc

SEQ ID NO: 444758 - DNA, 7354 bp, Homo sapiens
actctttgccgtggttttggatgttggaataccggcggtgatctgtcttttataaactcacctgatttaaaggaaagatgagtgaagaaccaaaggagaaaaatgcaaaacctgctcataggaaaaggaaaggaaaaaagtctgatgccaatgcaagttacttaagagcagctcgagctggacaccttgaaaaggccctcgactacataaaaaatggagttgacatcaacatttgcaatcagaatgggttgaacgctctccaccttgcttccaaagaaggccatgtagaggttgtttctgagctgctgcagagagaagccaatgtggatgcagctacaaagaaaggaaacacagcattgcacatcgcatctttggctgggcaagcagaggtggtaaaagtcttggttacaaatggagccaatgtcaatgcacaatctcagaatggtttcacgccattgtatatggcagcccaggaaaatcacctggaagttgtcaagtttcttcttgacaatggtgcaagccagagcctagccacagaggatggcttcacaccattggcagtggctttgcaacaaggtcacgaccaagtcgtttcgctcctgctagagaatgacaccaaaggaaaagtgcgtctcccagctcttcatatcgcggcccgaaaagacgacacgaaagccgccgccctgctgctgcagaatgacaacaatgcagatgtggaatcaaagagtggcttcactccgctccacatagctgctcactatggaaatatcaatgtagccacgttgctgttaaaccgagcggctgctgtggatttcaccgcaaggaatgacatcactcctttacatgttgcatcaaaaagaggaaatgcaaatatggtaaaactattgctcgatcgaggagctaaaatcgatgccaaaaccagggatggtctgacaccactgcactgtggagcaaggagtggccacgagcaggtggtagaaatgttgcttgatcgagctgcccccattctttcaaaaaccaagaatggattatctccattgcacatggccacacaaggggatcatttaaactgcgtccagcttctcctccagcataatgtacccgtggatgatgtcaccaatgactacctgactgccctacacgtggctgcccactgtggccattacaaagttgccaaggttctcttggataagaaagctaaccccaatgccaaagccctgaatggctttacccctcttcatattgcctgcaagaagaatcgaattaaagtaatggaactccttctgaaacacggtgcatccatccaagctgtaaccgagtcgggccttaccccaatccatgttgctgccttcatggggcatgtaaatattgtatcacaactaatgcatcatggagcctcaccaaacaccaccaatgtgagaggagaaacagcactgcacatggcagctcgctccggccaagctgaagttgtgcggtatctggtacaagacggagctcaggtagaagctaaagctaaggatgaccaaacaccactccacatttcagcccgactggggaaagcagacatagtacaacagctgttgcagcaaggggcatctccaaatgcagccacaacttctgggtacaccccacttcacctttccgcccgagaggggcatgaggatgtggccgcgttccttttggatcatggagcgtctttatctataacaacaaagaaaggatttactcctcttcatgtggcagcaaaatatggaaagcttgaagtcgccaatctcctgctacagaaaagtgcatctccagatgctgctgggaaggtaagaggtcaccagccactctgaagcaggccacttccacgataacaaaatacacccttgctaatattcactaatagccactcaaattataactaaatatttaagtcccactaggatgaagagcacttgggaaataaaaggtaaatgctggggtccaagtactgtggaaaccggaatgtaaatatgccctatgtcgtatccaatctaatttcatttcctcaatctaagcctctggttttaagacacctttgacactggttgttgtttctgcacgtgttttcagagcgggctaacaccactgcatgtagctgcacattacgataatcagaaagtggcccttctgcttttggaccaaggagcctcacctcacgcagccgcaaagaatggttatacgccactgcacatcgctgccaaaaagaaccagatggacatagcgacaactctgctggaatatggtgctgatgccaacgcagttacccggcaaggaattgcttccgtccatctcgcagctcaggaagggcacgtggacatggtgtcgctgctcctcggtagaaatgcgaatgtgaacctgagcaataagagcggcctgaccccactccatttggctgctcaagaagatcgagtgaatgtggcagaagtcctcgtaaaccaaggggctcatgtggacgcccagacaaagatgggatacacaccactgcatgtgggctgccactatggaaatatcaagattgttaatttcctgctccagcattctgcaaaagttaatgccaaaacaaagaatgggtatacgccattacatcaagcagcacagcaggggcatacgcatataataaatgtcttacttcagaacaacgcctcccccaatgaactcactgtgaatgggaatactgcccttggcattgcccggcgcctcggctacatctcagtagtggacaccctgaagatagtgaccgaagaaaccatgaccacaactactgtcacagagaagcacaaaatgaatgttccagaaacgatgaatgaagttcttgatatgtctgatgatgaagttcgtaaagccaatgcccctgaaatgctcagtgatggcgaatatatctcagatgttgaagaaggtgaagatgcaatgaccggggacacagacaaatatcttgggccacaggaccttaaggaattgggtgatgattccctgcctgcagagggttacatgggctttagtctcggagcgcgttctgccagcctccgctccttcagttcggataggtcttacaccttgaacagaagctcctatgcacgggacagcatgatgattgaagaactccttgtgccatccaaagagcagcatctaacattcacaagggaatttgattcagattctcttagacattacagctgggctgcagacaccttagacaatgtcaatcttgtttcaagccccattcattctgggtttctggttagctttatggtggacgcgagagggggctccatgagaggaagccgtcatcacgggatgagaatcatcattcctccacgcaagtgtacggcccccactcgaatcacctgccgtttggtaaagagacataaactggccaacccaccccccatggtggaaggagagggattagccagtaggctggtagaaatgggtcctgcaggggcacaatttttaggccctgtcatagtggaaatccctcactttgggtccatgagaggaaaagagagagaactcattgttcttcgaagtgaaaatggtgaaacttggaaggagcatcagtttgacagcaaaaatgaagatttaaccgagttacttaatggcatggatgaagaacttgatagcccagaagagttagggaaaaagcgtatctgcaggattatcacgaaagatttcccccagtattttgcagtggtttcccggattaagcaggaaagcaaccagattggtcctgaaggtggaattctgagcagcaccacagtgccccttgttcaagcatctttcccagagggtgccctaactaaaagaattcgagtgggcctccaggcccagcctgttccagatgaaattgtgaaaaagatccttggaaacaaagcaacttttagcccaattgtcactgtggaaccaagaagacggaaattccataaaccaatcacaatgaccattccggtgcccccgccctcaggagaaggtgtatccaatggatacaaaggggacactacacccaatctgcgtcttctctgtagcattacagggggcacttcgcctgctcagtgggaagacatcacaggaacaactcctttgacgtttataaaagattgtgtctcctttacaaccaatgtttcagccagattttggcttgcagactgccatcaagttttagaaactgtggggttagccacgcaactgtacagagaattgatatgtgttccatatatggccaagtttgttgtttttgccaaaatgaatgatcccgtagaatcttccttgcgatgtttctgcatgacagatgacaaagtggacaaaactttagagcaacaagagaattttgaggaagtcgcaagaagcaaagatattgaggttctggaaggaaaacctatttatgttgattgttatggaaatttggccccacttaccaaaggaggacagcaacttgtttttaacttttattctttcaaagaaaatagactgccattttccatcaagattagagacaccagccaagagccctgtggtcgtctgtcttttctgaaagaaccaaagacaacaaaaggactgcctcaaacagcggtttgcaacttaaatatcactctgccagcacataaaaagattgagaaaacagatagacgacagagcttcgcatccttagctttacgtaagcgctacagctacttgactgagcctggaatgagtccacagagtccatgtgaacggacagatatcaggatggcaatagtagccgatcacctgggacttagttggacagaactggcaagggaactgaatttttcagtggatgaaatcaatcaaatacgtgtggaaaatccaaattctttaatttctcagagcttcatgttattaaaaaaatgggttaccagagacggaaaaaatgccacaactgatgccttaacttcggtcttgacaaaaattaatcgaatagatatagtgacactgctagaaggaccaatatttgattatggaaatatttcaggcaccagaagttttgcagatgagaacaatgttttccatgaccctgttgatggttatccttcccttcaagtggaactggaaacccccacagggttgcactacacaccacctacccctttccagcaagatgattattttagtgatatctctagcatagaatctccccttagaacccctagtagactgagtgatgggctagtgccttcccaggggaacatagagcattccgcagatggacctccagtcgtaactgcagaagacgcttccttagaagacagcaaactggaagactcagtgcctttaacagaaatgcctgaagcagtggatgtagatgagagccagttggagaatgtatgtctgagttggcagaatgagacatcaagtggaaacctagagtcctgcgctcaagctcgaagagtaactggtgggttactagatcgactggatgacagccctgaccagtgtagagattccattacctcatatctcaaaggagaagctggcaaatttgaagcaaatggaagccatacagaaatcactccagaagcaaagacaaaatcttactttccagaatcccaaaatgatgtaggaaaacagagtaccaaggaaactctgaaaccaaaaatacatggatctggtcatgttgaagaaccagcatcaccactagcagcatatcagaaatctctagaagaaaccagcaagcttataatagaagagactaaaccctgtgtgcctgtcagtatgaaaaagatgagtaggacttctccagcagatggcaagccaaggcttagcctccatgaagaagaggggtccagtgggtctgagcaaaagcagggagaaggttttaaggtgaaaacgaagaaagaaatccggcatgtggaaaagaagagccactcgtaacagcgaacggtcagtcaaggatcataagtttttactgccagtattgagaaattcgtggaagaaatgtcagcaggaagtaaaaattcaccgagaagtgtgtgtgtgttcgctgcttccacacattaatggcatgattttttttatgcaaaaagaaaagaaaagaaaaccacccacattttaatttagcatgagccaatttacagagcatggaaatcactttcatttccggattggcgcgtgtgcaattagcaatgcagtgtatatacaagaagccatgctgttaacagtttatctcaagtaatttggtgtcatttacaaaaggaagaaattcctgccatcagaagggacagaaggagatggaatgatcaaatcacagagaaacactaaaattactaaatctacaacagctcgccttatttttcttggacccaaactgtcagggtataaacactatttgtttcttttttaaaacatcgatagttttgctgtaaataataacactgtataaattctaacagaaaaatagaataaaatgttgataaggcactgcctcttagaacacaaacagaatattgcaaatgcatttaacaaataggggtctcaagtgacttcaccctagaagaggagggagggattctgggtgggggtgactcttcactgattcttgtatattagcaattataatgtttgtatatgcaaaactgctagcttgattttaaaaaaaaacaaatctttaaaatctgctgcaaatttaaataattcccaaaatgaggaattctgtagttctgtgaaaaatttttttcttcagaatactaatattttgatgcatgtgtatcaccttattttgattaaatcttttccaattttgcaaacactacagtatactgcaacacaaaagattttatctgtaaacacaaagcccttcatctaatatttgttgctattgccaatttttcaatgaaatgacctaaaaacaacaaaaaaaaataacctatacggtagttgctttagggggtggggggatgctatctgttagtgcttaaaagggggtaaatgcttgccgctttagaggtggatggtgctcataaaaggccccagtcgggggtatttaaaaaggactgaacagaaatccttagctagtagaatggcagcacgctgtaaaattattactgtattgtgtactggctataagatgtagacacctttcagtaagccaatcatttgtaaccattctagcagtgtcatattaggttaataaggctgctgtgttttaaagggcatttttatttgggttttggtgaaattctttaatttgttgattatattcacataaaatcagcattcattgacacatagctctaatgacatatgtatgaaaaaccatacactggatgacctagtcgattatttaagcataaaataaattgtgttaaactcttca

SEQ ID NO: 444759 - DNA, 5905 bp, Homo sapiens
cagtcagcagaagggagaaagattaggtatcctggtatgttatgctcacaccctgtcaataagaaggctcttgaactcttatctgtgagtcttggactttaaatgcagacttcactgctcatcatcaatagaataattaatcagttctggaaagcagtgcccttatgtcatatctttttgtttgtttgttgtttggtttgggttttgtgtgtgttttccttatgtcatttctattgttcattatttttatgttttttttttttcagaaaggatttactcctcttcatgtggcagcaaaatatggaaagcttgaagtcgccaatctcctgctacagaaaagtgcatctccagatgctgctgggaaggtaagaggtcaccagccactctgaagcaggccacttccacgataacaaaatacacccttgctaatattcactaatagccactcaaattataactaaatatttaagtcccactaggatgaagagcacttgggaaataaaaggtaaatgctggggtccaagtactgtggaaaccggaatgtaaatatgccctatgtcgtatccaatctaatttcatttcctcaatctaagcctctggttttaagacacctttgacactggttgttgtttctgcacgtgttttcagagcgggctaacaccactgcatgtagctgcacattacgataatcagaaagtggcccttctgcttttggaccaaggagcctcacctcacgcagccgcaaagaatggttatacgccactgcacatcgctgccaaaaagaaccagatggacatagcgacaactctgctggaatatggtgctgatgccaacgcagttacccggcaaggaattgcttccgtccatctcgcagctcaggaagggcacgtggacatggtgtcgctgctcctcggtagaaatgcgaatgtgaacctgagcaataagagcggcctgaccccactccatttggctgctcaagaagatcgagtgaatgtggcagaagtcctcgtaaaccaaggggctcatgtggacgcccagacaaagatgggatacacaccactgcatgtgggctgccactatggaaatatcaagattgttaatttcctgctccagcattctgcaaaagttaatgccaaaacaaagaatgggtatacgccattacatcaagcagcacagcaggggcatacgcatataataaatgtcttacttcagaacaacgcctcccccaatgaactcactgtgaatgggaatactgcccttggcattgcccggcgcctcggctacatctcagtagtggacaccctgaagatagtgaccgaagaaaccatgaccacaactactgtcacagagaagcacaaaatgaatgttccagaaacgatgaatgaagttcttgatatgtctgatgatgaagttcgtaaagccaatgcccctgaaatgctcagtgatggcgaatatatctcagatgttgaagaaggtgaagatgcaatgaccggggacacagacaaatatcttgggccacaggaccttaaggaattgggtgatgattccctgcctgcagagggttacatgggctttagtctcggagcgcgttctgccagcctccgctccttcagttcggataggtcttacaccttgaacagaagctcctatgcacgggacagcatgatgattgaagaactccttgtgccatccaaagagcagcatctaacattcacaagggaatttgattcagattctcttagacattacagctgggctgcagacaccttagacaatgtcaatcttgtttcaagccccattcattctgggtttctggttagctttatggtggacgcgagagggggctccatgagaggaagccgtcatcacgggatgagaatcatcattcctccacgcaagtgtacggcccccactcgaatcacctgccgtttggtaaagagacataaactggccaacccaccccccatggtggaaggagagggattagccagtaggctggtagaaatgggtcctgcaggggcacaatttttaggccctgtcatagtggaaatccctcactttgggtccatgagaggaaaagagagagaactcattgttcttcgaagtgaaaatggtgaaacttggaaggagcatcagtttgacagcaaaaatgaagatttaaccgagttacttaatggcatggatgaagaacttgatagcccagaagagttagggaaaaagcgtatctgcaggattatcacgaaagatttcccccagtattttgcagtggtttcccggattaagcaggaaagcaaccagattggtcctgaaggtggaattctgagcagcaccacagtgccccttgttcaagcatctttcccagagggtgccctaactaaaagaattcgagtgggcctccaggcccagcctgttccagatgaaattgtgaaaaagatccttggaaacaaagcaacttttagcccaattgtcactgtggaaccaagaagacggaaattccataaaccaatcacaatgaccattccggtgcccccgccctcaggagaaggtgtatccaatggatacaaaggggacactacacccaatctgcgtcttctctgtagcattacagggggcacttcgcctgctcagtgggaagacatcacaggaacaactcctttgacgtttataaaagattgtgtctcctttacaaccaatgtttcagccagattttggcttgcagactgccatcaagttttagaaactgtggggttagccacgcaactgtacagagaattgatatgtgttccatatatggccaagtttgttgtttttgccaaaatgaatgatcccgtagaatcttccttgcgatgtttctgcatgacagatgacaaagtggacaaaactttagagcaacaagagaattttgaggaagtcgcaagaagcaaagatattgaggttctggaaggaaaacctatttatgttgattgttatggaaatttggccccacttaccaaaggaggacagcaacttgtttttaacttttattctttcaaagaaaatagactgccattttccatcaagattagagacaccagccaagagccctgtggtcgtctgtcttttctgaaagaaccaaagacaacaaaaggactgcctcaaacagcggtttgcaacttaaatatcactctgccagcacataaaaagattgagaaaacagatagacgacagagcttcgcatccttagctttacgtaagcgctacagctacttgactgagcctggaatgagtccacagagtccatgtgaacggacagatatcaggatggcaatagtagccgatcacctgggacttagttggacagaactggcaagggaactgaatttttcagtggatgaaatcaatcaaatacgtgtggaaaatccaaattctttaatttctcagagcttcatgttattaaaaaaatgggttaccagagacggaaaaaatgccacaactgatgccttaacttcggtcttgacaaaaattaatcgaatagatatagtgacactgctagaaggaccaatatttgattatggaaatatttcaggcaccagaagttttgcagatgagaacaatgttttccatgaccctgttgatggttatccttcccttcaagtggaactggaaacccccacagggttgcactacacaccacctacccctttccagcaagatgattattttagtgatatctctagcatagaatctccccttagaacccctagtagactgagtgatgggctagtgccttcccaggggaacatagagcattccgcagatggacctccagtcgtaactgcagaagacgcttccttagaagacagcaaactggaagactcagtgcctttaacagaaatgcctgaagcagtggatgtagatgagagccagttggagaatgtatgtctgagttggcagaatgagacatcaagtggaaacctagagtcctgcgctcaagctcgaagagtaactggtgggttactagatcgactggatgacagccctgaccagtgtagagattccattacctcatatctcaaaggagaagctggcaaatttgaagcaaatggaagccatacagaaatcactccagaagcaaagacaaaatcttactttccagaatcccaaaatgatgtaggaaaacagagtaccaaggaaactctgaaaccaaaaatacatggatctggtcatgttgaagaaccagcatcaccactagcagcatatcagaaatctctagaagaaaccagcaagcttataatagaagagactaaaccctgtgtgcctgtcagtatgaaaaagatgagtaggacttctccagcagatggcaagccaaggcttagcctccatgaagaagaggggtccagtgggtctgagcaaaagcagggagaaggttttaaggtgaaaacgaagaaagaaatccggcatgtggaaaagaagagccactcgtaacagcgaacggtcagtcaaggatcataagtttttactgccagtattgagaaattcgtggaagaaatgtcagcaggaagtaaaaattcaccgagaagtgtgtgtgtgttcgctgcttccacacattaatggcatgattttttttatgcaaaaagaaaagaaaagaaaaccacccacattttaatttagcatgagccaatttacagagcatggaaatcactttcatttccggattggcgcgtgtgcaattagcaatgcagtgtatatacaagaagccatgctgttaacagtttatctcaagtaatttggtgtcatttacaaaaggaagaaattcctgccatcagaagggacagaaggagatggaatgatcaaatcacagagaaacactaaaattactaaatctacaacagctcgccttatttttcttggacccaaactgtcagggtataaacactatttgtttcttttttaaaacatcgatagttttgctgtaaataataacactgtataaattctaacagaaaaatagaataaaatgttgataaggcactgcctcttagaacacaaacagaatattgcaaatgcatttaacaaataggggtctcaagtgacttcaccctagaagaggagggagggattctgggtgggggtgactcttcactgattcttgtatattagcaattataatgtttgtatatgcaaaactgctagcttgattttaaaaaaaaacaaatctttaaaatctgctgcaaatttaaataattcccaaaatgaggaattctgtagttctgtgaaaaatttttttcttcagaatactaatattttgatgcatgtgtatcaccttattttgattaaatcttttccaattttgcaaacactacagtatactgcaacacaaaagattttatctgtaaacacaaagcccttcatctaatatttgttgctattgccaatttttcaatgaaatgacctaaaaacaacaaaaaaaaataacctatacggtagttgctttagggggtggggggatgctatctgttagtgcttaaaagggggtaaatgcttgccgctttagaggtggatggtgctcataaaaggccccagtcgggggtatttaaaaaggactgaacagaaatccttagctagtagaatggcagcacgctgtaaaattattactgtattgtgtactggctataagatgtagacacctttcagtaagccaatcatttgtaaccattctagcagtgtcatattaggttaataaggctgctgtgttttaaagggcatttttatttgggttttggtgaaattctttaatttgttgattatattcacataaaatcagcattcattgacacatagctctaatgacatatgtatgaaaaaccatacactggatgacctagtcgattatttaagcataaaataaattgtgttaaactcttca

SEQ ID NO: 444760 - DNA, 7621 bp, Homo sapiens
actctttgccgtggttttggatgttggaataccggcggtgatctgtcttttataaactcacctgatttaaaggaaagatgagtgaagaaccaaaggagaaaaatgcaaaacctgctcataggaaaaggaaaggaaaaaagtctgatgccaatgcaagttacttaagagcagctcgagctggacaccttgaaaaggccctcgactacataaaaaatggagttgacatcaacatttgcaatcagaatgggttgaacgctctccaccttgcttccaaagaaggccatgtagaggttgtttctgagctgctgcagagagaagccaatgtggatgcagctacaaagaaaggaaacacagcattgcacatcgcatctttggctgggcaagcagaggtggtaaaagtcttggttacaaatggagccaatgtcaatgcacaatctcagaatggtttcacgccattgtatatggcagcccaggaaaatcacctggaagttgtcaagtttcttcttgacaatggtgcaagccagagcctagccacagaggatggcttcacaccattggcagtggctttgcaacaaggtcacgaccaagtcgtttcgctcctgctagagaatgacaccaaaggaaaagtgcgtctcccagctcttcatatcgcggcccgaaaagacgacacgaaagccgccgccctgctgctgcagaatgacaacaatgcagatgtggaatcaaagagtggcttcactccgctccacatagctgctcactatggaaatatcaatgtagccacgttgctgttaaaccgagcggctgctgtggatttcaccgcaaggaatgacatcactcctttacatgttgcatcaaaaagaggaaatgcaaatatggtaaaactattgctcgatcgaggagctaaaatcgatgccaaaaccagggatggtctgacaccactgcactgtggagcaaggagtggccacgagcaggtggtagaaatgttgcttgatcgagctgcccccattctttcaaaaaccaagaatggattatctccattgcacatggccacacaaggggatcatttaaactgcgtccagcttctcctccagcataatgtacccgtggatgatgtcaccaatgactacctgactgccctacacgtggctgcccactgtggccattacaaagttgccaaggttctcttggataagaaagctaaccccaatgccaaagccctgaatggctttacccctcttcatattgcctgcaagaagaatcgaattaaagtaatggaactccttctgaaacacggtgcatccatccaagctgtaaccgagtcgggccttaccccaatccatgttgctgccttcatggggcatgtaaatattgtatcacaactaatgcatcatggagcctcaccaaacaccaccaatgtgagaggagaaacagcactgcacatggcagctcgctccggccaagctgaagttgtgcggtatctggtacaagacggagctcaggtagaagctaaagctaaggatgaccaaacaccactccacatttcagcccgactggggaaagcagacatagtacaacagctgttgcagcaaggggcatctccaaatgcagccacaacttctgggtacaccccacttcacctttccgcccgagaggggcatgaggatgtggccgcgttccttttggatcatggagcgtctttatctataacaacaaagaaaggatttactcctcttcatgtggcagcaaaatatggaaagcttgaagtcgccaatctcctgctacagaaaagtgcatctccagatgctgctgggaaggtaagaggtcaccagccactctgaagcaggccacttccacgataacaaaatacacccttgctaatattcactaatagccactcaaattataactaaatatttaagtcccactaggatgaagagcacttgggaaataaaaggtaaatgctggggtccaagtactgtggaaaccggaatgtaaatatgccctatgtcgtatccaatctaatttcatttcctcaatctaagcctctggttttaagacacctttgacactggttgttgtttctgcacgtgttttcagagcgggctaacaccactgcatgtagctgcacattacgataatcagaaagtggcccttctgcttttggaccaaggagcctcacctcacgcagccgcaaagaatggttatacgccactgcacatcgctgccaaaaagaaccagatggacatagcgacaactctgctggaatatggtgctgatgccaacgcagttacccggcaaggaattgcttccgtccatctcgcagctcaggaagggcacgtggacatggtgtcgctgctcctcggtagaaatgcgaatgtgaacctgagcaataagagcggcctgaccccactccatttggctgctcaagaagatcgagtgaatgtggcagaagtcctcgtaaaccaaggggctcatgtggacgcccagacaaagatgggatacacaccactgcatgtgggctgccactatggaaatatcaagattgttaatttcctgctccagcattctgcaaaagttaatgccaaaacaaagaatgggtatacgccattacatcaagcagcacagcaggggcatacgcatataataaatgtcttacttcagaacaacgcctcccccaatgaactcactgtgaatgggaatactgcccttggcattgcccggcgcctcggctacatctcagtagtggacaccctgaagatagtgaccgaagaaaccatgaccacaactactgtcacagagaagcacaaaatgaatgttccagaaacgatgaatgaagttcttgatatgtctgatgatgaagttcgtaaagccaatgcccctgaaatgctcagtgatggcgaatatatctcagatgttgaagaaggtgaagatgcaatgaccggggacacagacaaatatcttgggccacaggaccttaaggaattgggtgatgattccctgcctgcagagggttacatgggctttagtctcggagcgcgttctgccagcctccgctccttcagttcggataggtcttacaccttgaacagaagctcctatgcacgggacagcatgatgattgaagaactccttgtgccatccaaagagcagcatctaacattcacaagggaatttgattcagattctcttagacattacagctgggctgcagacaccttagacaatgtcaatcttgtttcaagccccattcattctgggtttctggttagctttatggtggacgcgagagggggctccatgagaggaagccgtcatcacgggatgagaatcatcattcctccacgcaagtgtacggcccccactcgaatcacctgccgtttggtaaagagacataaactggccaacccaccccccatggtggaaggagagggattagccagtaggctggtagaaatgggtcctgcaggggcacaatttttaggccctgtcatagtggaaatccctcactttgggtccatgagaggaaaagagagagaactcattgttcttcgaagtgaaaatggtgaaacttggaaggagcatcagtttgacagcaaaaatgaagatttaaccgagttacttaatggcatggatgaagaacttgatagcccagaagagttagggaaaaagcgtatctgcaggattatcacgaaagatttcccccagtattttgcagtggtttcccggattaagcaggaaagcaaccagattggtcctgaaggtggaattctgagcagcaccacagtgccccttgttcaagcatctttcccagagggtgccctaactaaaagaattcgagtgggcctccaggcccagcctgttccagatgaaattgtgaaaaagatccttggaaacaaagcaacttttagcccaattgtcactgtggaaccaagaagacggaaattccataaaccaatcacaatgaccattccggtgcccccgccctcaggagaaggtgtatccaatggatacaaaggggacactacacccaatctgcgtcttctctgtagcattacagggggcacttcgcctgctcagtgggaagacatcacaggaacaactcctttgacgtttataaaagattgtgtctcctttacaaccaatgtttcagccagattttggcttgcagactgccatcaagttttagaaactgtggggttagccacgcaactgtacagagaattgatatgtgttccatatatggccaagtttgttgtttttgccaaaatgaatgatcccgtagaatcttccttgcgatgtttctgcatgacagatgacaaagtggacaaaactttagagcaacaagagaattttgaggaagtcgcaagaagcaaagatattgaggttctggaaggaaaacctatttatgttgattgttatggaaatttggccccacttaccaaaggaggacagcaacttgtttttaacttttattctttcaaagaaaatagactgccattttccatcaagattagagacaccagccaagagccctgtggtcgtctgtcttttctgaaagaaccaaagacaacaaaaggactgcctcaaacagcggtttgcaacttaaatatcactctgccagcacataaaaagattgagaaaacagatagacgacagagcttcgcatccttagctttacgtaagcgctacagctacttgactgagcctggaatgagtccacagagtccatgtgaacggacagatatcaggatggcaatagtagccgatcacctgggacttagttggacagaactggcaagggaactgaatttttcagtggatgaaatcaatcaaatacgtgtggaaaatccaaattctttaatttctcagagcttcatgttattaaaaaaatgggttaccagagacggaaaaaatgccacaactgatgccttaacttcggtcttgacaaaaattaatcgaatagatatagtgacactgctagaaggaccaatatttgattatggaaatatttcaggcaccagaagttttgcagatgagaacaatgttttccatgaccctgttgatggttatccttcccttcaagtggaactggaaacccccacagggttgcactacacaccacctacccctttccagcaagatgattattttagtgatatctctagcatagaatctccccttagaacccctagtagactgagtgatgggctagtgccttcccaggggaacatagagcattccgcagatggacctccagtcgtaactgcagaagacgcttccttagaagacagcaaactggaagactcagtgcctttaacagaaatgcctgaagcagtggatgtagatgagagccagttggagaatgtatgtctgagtgagtatcctcaataccttggaaatttggctgggtccccaaaagatgttaaaccagcagagcctagaaaactaggagtaagctctgagcagcaggagaaaggaaaatctggtcctgatgaggagatgatggaagagaaactcaaatctctatttgaggacattcaacttgaagaaggagtagagtctgaggagatgacagaagaaaaagtacaggctattcttaagcgtgttcagcaagcagaactggaaatgtcttcaattacaggttggcagaatgagacatcaagtggaaacctagagtcctgcgctcaagctcgaagagtaactggtgggttactagatcgactggatgacagccctgaccagtgtagagattccattacctcatatctcaaaggagaagctggcaaatttgaagcaaatggaagccatacagaaatcactccagaagcaaagacaaaatcttactttccagaatcccaaaatgatgtaggaaaacagagtaccaaggaaactctgaaaccaaaaatacatggatctggtcatgttgaagaaccagcatcaccactagcagcatatcagaaatctctagaagaaaccagcaagcttataatagaagagactaaaccctgtgtgcctgtcagtatgaaaaagatgagtaggacttctccagcagatggcaagccaaggcttagcctccatgaagaagaggggtccagtgggtctgagcaaaagcagggagaaggttttaaggtgaaaacgaagaaagaaatccggcatgtggaaaagaagagccactcgtaacagcgaacggtcagtcaaggatcataagtttttactgccagtattgagaaattcgtggaagaaatgtcagcaggaagtaaaaattcaccgagaagtgtgtgtgtgttcgctgcttccacacattaatggcatgattttttttatgcaaaaagaaaagaaaagaaaaccacccacattttaatttagcatgagccaatttacagagcatggaaatcactttcatttccggattggcgcgtgtgcaattagcaatgcagtgtatatacaagaagccatgctgttaacagtttatctcaagtaatttggtgtcatttacaaaaggaagaaattcctgccatcagaagggacagaaggagatggaatgatcaaatcacagagaaacactaaaattactaaatctacaacagctcgccttatttttcttggacccaaactgtcagggtataaacactatttgtttcttttttaaaacatcgatagttttgctgtaaataataacactgtataaattctaacagaaaaatagaataaaatgttgataaggcactgcctcttagaacacaaacagaatattgcaaatgcatttaacaaataggggtctcaagtgacttcaccctagaagaggagggagggattctgggtgggggtgactcttcactgattcttgtatattagcaattataatgtttgtatatgcaaaactgctagcttgattttaaaaaaaaacaaatctttaaaatctgctgcaaatttaaataattcccaaaatgaggaattctgtagttctgtgaaaaatttttttcttcagaatactaatattttgatgcatgtgtatcaccttattttgattaaatcttttccaattttgcaaacactacagtatactgcaacacaaaagattttatctgtaaacacaaagcccttcatctaatatttgttgctattgccaatttttcaatgaaatgacctaaaaacaacaaaaaaaaataacctatacggtagttgctttagggggtggggggatgctatctgttagtgcttaaaagggggtaaatgcttgccgctttagaggtggatggtgctcataaaaggccccagtcgggggtatttaaaaaggactgaacagaaatccttagctagtagaatggcagcacgctgtaaaattattactgtattgtgtactggctataagatgtagacacctttcagtaagccaatcatttgtaaccattctagcagtgtcatattaggttaataaggctgctgtgttttaaagggcatttttatttgggttttggtgaaattctttaatttgttgattatattcacataaaatcagcattcattgacacatagctctaatgacatatgtatgaaaaaccatacactggatgacctagtcgattatttaagcataaaataaattgtgttaaactcttca

SEQ ID NO: 444761 - DNA, 7594 bp, Homo sapiens
actctttgccgtggttttggatgttggaataccggcggtgatctgtcttttataaactcacctgatttaaaggaaagatgagtgaagaaccaaaggagaaaaatgcaaaacctgctcataggaaaaggaaaggaaaaaagtctgatgccaatgcaagttacttaagagcagctcgagctggacaccttgaaaaggccctcgactacataaaaaatggagttgacatcaacatttgcaatcagaatgggttgaacgctctccaccttgcttccaaagaaggccatgtagaggttgtttctgagctgctgcagagagaagccaatgtggatgcagctacaaagaaaggaaacacagcattgcacatcgcatctttggctgggcaagcagaggtggtaaaagtcttggttacaaatggagccaatgtcaatgcacaatctcagaatggtttcacgccattgtatatggcagcccaggaaaatcacctggaagttgtcaagtttcttcttgacaatggtgcaagccagagcctagccacagaggatggcttcacaccattggcagtggctttgcaacaaggtcacgaccaagtcgtttcgctcctgctagagaatgacaccaaaggaaaagtgcgtctcccagctcttcatatcgcggcccgaaaagacgacacgaaagccgccgccctgctgctgcagaatgacaacaatgcagatgtggaatcaaagagtggcttcactccgctccacatagctgctcactatggaaatatcaatgtagccacgttgctgttaaaccgagcggctgctgtggatttcaccgcaaggaatgacatcactcctttacatgttgcatcaaaaagaggaaatgcaaatatggtaaaactattgctcgatcgaggagctaaaatcgatgccaaaaccagggatggtctgacaccactgcactgtggagcaaggagtggccacgagcaggtggtagaaatgttgcttgatcgagctgcccccattctttcaaaaaccaagaatggattatctccattgcacatggccacacaaggggatcatttaaactgcgtccagcttctcctccagcataatgtacccgtggatgatgtcaccaatgactacctgactgccctacacgtggctgcccactgtggccattacaaagttgccaaggttctcttggataagaaagctaaccccaatgccaaagccctgaatggctttacccctcttcatattgcctgcaagaagaatcgaattaaagtaatggaactccttctgaaacacggtgcatccatccaagctgtaaccgagtcgggccttaccccaatccatgttgctgccttcatggggcatgtaaatattgtatcacaactaatgcatcatggagcctcaccaaacaccaccaatgtgagaggagaaacagcactgcacatggcagctcgctccggccaagctgaagttgtgcggtatctggtacaagacggagctcaggtagaagctaaagctaaggatgaccaaacaccactccacatttcagcccgactggggaaagcagacatagtacaacagctgttgcagcaaggggcatctccaaatgcagccacaacttctgggtacaccccacttcacctttccgcccgagaggggcatgaggatgtggccgcgttccttttggatcatggagcgtctttatctataacaacaaagaaaggatttactcctcttcatgtggcagcaaaatatggaaagcttgaagtcgccaatctcctgctacagaaaagtgcatctccagatgctgctgggaaggtaagaggtcaccagccactctgaagcaggccacttccacgataacaaaatacacccttgctaatattcactaatagccactcaaattataactaaatatttaagtcccactaggatgaagagcacttgggaaataaaaggtaaatgctggggtccaagtactgtggaaaccggaatgtaaatatgccctatgtcgtatccaatctaatttcatttcctcaatctaagcctctggttttaagacacctttgacactggttgttgtttctgcacgtgttttcagagcgggctaacaccactgcatgtagctgcacattacgataatcagaaagtggcccttctgcttttggaccaaggagcctcacctcacgcagccgcaaagaatggttatacgccactgcacatcgctgccaaaaagaaccagatggacatagcgacaactctgctggaatatggtgctgatgccaacgcagttacccggcaaggaattgcttccgtccatctcgcagctcaggaagggcacgtggacatggtgtcgctgctcctcggtagaaatgcgaatgtgaacctgagcaataagagcggcctgaccccactccatttggctgctcaagaagatcgagtgaatgtggcagaagtcctcgtaaaccaaggggctcatgtggacgcccagacaaagatgggatacacaccactgcatgtgggctgccactatggaaatatcaagattgttaatttcctgctccagcattctgcaaaagttaatgccaaaacaaagaatgggtatacgccattacatcaagcagcacagcaggggcatacgcatataataaatgtcttacttcagaacaacgcctcccccaatgaactcactgtgaatgggaatactgcccttggcattgcccggcgcctcggctacatctcagtagtggacaccctgaagatagtgaccgaagaaaccatgaccacaactactgtcacagagaagcacaaaatgaatgttccagaaacgatgaatgaagttcttgatatgtctgatgatgaagttcgtaaagccaatgcccctgaaatgctcagtgatggcgaatatatctcagatgttgaagaaggtgaagatgcaatgaccggggacacagacaaatatcttgggccacaggaccttaaggaattgggtgatgattccctgcctgcagagggttacatgggctttagtctcggagcgcgttctgccagcctccgctccttcagttcggataggtcttacaccttgaacagaagctcctatgcacgggacagcatgatgattgaagaactccttgtgccatccaaagagcagcatctaacattcacaagggaatttgattcagattctcttagacattacagctgggctgcagacaccttagacaatgtcaatcttgtttcaagccccattcattctgggtttctggttagctttatggtggacgcgagagggggctccatgagaggaagccgtcatcacgggatgagaatcatcattcctccacgcaagtgtacggcccccactcgaatcacctgccgtttggtaaagagacataaactggccaacccaccccccatggtggaaggagagggattagccagtaggctggtagaaatgggtcctgcaggggcacaatttttaggccctgtcatagtggaaatccctcactttgggtccatgagaggaaaagagagagaactcattgttcttcgaagtgaaaatggtgaaacttggaaggagcatcagtttgacagcaaaaatgaagatttaaccgagttacttaatggcatggatgaagaacttgatagcccagaagagttagggaaaaagcgtatctgcaggattatcacgaaagatttcccccagtattttgcagtggtttcccggattaagcaggaaagcaaccagattggtcctgaaggtggaattctgagcagcaccacagtgccccttgttcaagcatctttcccagagggtgccctaactaaaagaattcgagtgggcctccaggcccagcctgttccagatgaaattgtgaaaaagatccttggaaacaaagcaacttttagcccaattgtcactgtggaaccaagaagacggaaattccataaaccaatcacaatgaccattccggtgcccccgccctcaggagaaggtgtatccaatggatacaaaggggacactacacccaatctgcgtcttctctgtagcattacagggggcacttcgcctgctcagtgggaagacatcacaggaacaactcctttgacgtttataaaagattgtgtctcctttacaaccaatgtttcagccagattttggcttgcagactgccatcaagttttagaaactgtggggttagccacgcaactgtacagagaattgatatgtgttccatatatggccaagtttgttgtttttgccaaaatgaatgatcccgtagaatcttccttgcgatgtttctgcatgacagatgacaaagtggacaaaactttagagcaacaagagaattttgaggaagtcgcaagaagcaaagatattgaggttctggaaggaaaacctatttatgttgattgttatggaaatttggccccacttaccaaaggaggacagcaacttgtttttaacttttattctttcaaagaaaatagactgccattttccatcaagattagagacaccagccaagagccctgtggtcgtctgtcttttctgaaagaaccaaagacaacaaaaggactgcctcaaacagcggtttgcaacttaaatatcactctgccagcacataaaaagattgagaaaacagatagacgacagagcttcgcatccttagctttacgtaagcgctacagctacttgactgagcctggaatgagtccacagagtccatgtgaacggacagatatcaggatggcaatagtagccgatcacctgggacttagttggacagaactggcaagggaactgaatttttcagtggatgaaatcaatcaaatacgtgtggaaaatccaaattctttaatttctcagagcttcatgttattaaaaaaatgggttaccagagacggaaaaaatgccacaactgatgccttaacttcggtcttgacaaaaattaatcgaatagatatagtgacactgctagaaggaccaatatttgattatggaaatatttcaggcaccagaagttttgcagatgagaacaatgttttccatgaccctgttgatggttatccttcccttcaagtggaactggaaacccccacagggttgcactacacaccacctacccctttccagcaagatgattattttagtgatatctctagcatagaatctccccttagaacccctagtagactgagtgatgggctagtgccttcccaggggaacatagagcattccgcagatggacctccagtcgtaactgcagaagacgcttccttagaagacagcaaactggaagactcagtgcctttaacagaaatgcctgaagcagtggatgtagatgagagccagttggagaatgtatgtctgagtgagtatcctcaataccttggaaatttggctgggtccccaaaagatgttaaaccagcagagcctagaaaactaggagtaagctctgagcagcaggagaaaggaaaatctggtcctgatgaggagatgatggaagagaaactcaaatctctatttgaggacattcaacttgaagaaggagtagagtctgaggagatgacagaagaaaaagtacaggctattcttaagcgtgttcagcaagcagaactggaaatgtcttcaattacaggttggcagaatgagacatcaagtggaaacctagagtcctgcgctcaagctcgaagagtaactggtgggttactagatcgactggatgacagctcatatctcaaaggagaagctggcaaatttgaagcaaatggaagccatacagaaatcactccagaagcaaagacaaaatcttactttccagaatcccaaaatgatgtaggaaaacagagtaccaaggaaactctgaaaccaaaaatacatggatctggtcatgttgaagaaccagcatcaccactagcagcatatcagaaatctctagaagaaaccagcaagcttataatagaagagactaaaccctgtgtgcctgtcagtatgaaaaagatgagtaggacttctccagcagatggcaagccaaggcttagcctccatgaagaagaggggtccagtgggtctgagcaaaagcagggagaaggttttaaggtgaaaacgaagaaagaaatccggcatgtggaaaagaagagccactcgtaacagcgaacggtcagtcaaggatcataagtttttactgccagtattgagaaattcgtggaagaaatgtcagcaggaagtaaaaattcaccgagaagtgtgtgtgtgttcgctgcttccacacattaatggcatgattttttttatgcaaaaagaaaagaaaagaaaaccacccacattttaatttagcatgagccaatttacagagcatggaaatcactttcatttccggattggcgcgtgtgcaattagcaatgcagtgtatatacaagaagccatgctgttaacagtttatctcaagtaatttggtgtcatttacaaaaggaagaaattcctgccatcagaagggacagaaggagatggaatgatcaaatcacagagaaacactaaaattactaaatctacaacagctcgccttatttttcttggacccaaactgtcagggtataaacactatttgtttcttttttaaaacatcgatagttttgctgtaaataataacactgtataaattctaacagaaaaatagaataaaatgttgataaggcactgcctcttagaacacaaacagaatattgcaaatgcatttaacaaataggggtctcaagtgacttcaccctagaagaggagggagggattctgggtgggggtgactcttcactgattcttgtatattagcaattataatgtttgtatatgcaaaactgctagcttgattttaaaaaaaaacaaatctttaaaatctgctgcaaatttaaataattcccaaaatgaggaattctgtagttctgtgaaaaatttttttcttcagaatactaatattttgatgcatgtgtatcaccttattttgattaaatcttttccaattttgcaaacactacagtatactgcaacacaaaagattttatctgtaaacacaaagcccttcatctaatatttgttgctattgccaatttttcaatgaaatgacctaaaaacaacaaaaaaaaataacctatacggtagttgctttagggggtggggggatgctatctgttagtgcttaaaagggggtaaatgcttgccgctttagaggtggatggtgctcataaaaggccccagtcgggggtatttaaaaaggactgaacagaaatccttagctagtagaatggcagcacgctgtaaaattattactgtattgtgtactggctataagatgtagacacctttcagtaagccaatcatttgtaaccattctagcagtgtcatattaggttaataaggctgctgtgttttaaagggcatttttatttgggttttggtgaaattctttaatttgttgattatattcacataaaatcagcattcattgacacatagctctaatgacatatgtatgaaaaaccatacactggatgacctagtcgattatttaagcataaaataaattgtgttaaactcttca

SEQ ID NO: 444762 - DNA, 3095 bp, Homo sapiens
  misc_feature (61)..(61): n is a, c, g, or t
  misc_feature (80)..(80): n is a, c, g, or t
  misc_feature (97)..(97): n is a, c, g, or t
  misc_feature (203)..(203): n is a, c, g, or t
  misc_feature (283)..(283): n is a, c, g, or t
  misc_feature (316)..(316): n is a, c, g, or t
cgaggcggtgatcgcgtaggccgatgacgagcgaggcgatgtccgacgagcaccgcgcganaggagcgcggctgccgcgngacgggcggacgagganatgcgtcggaggggcatcgggcgcgtggcggacgaccggcgtgattacgggcggcgacgtagggcgatgacctgcgtgaataggggcggaagcgcgggacgatagncggcgggaacaccgcggatacgggacgcaagaagtgatggcggagtggtgcggcggttagtagaggcgcggcgggacganagtgggcgtgggccgcaatcggggtggcgacanaggatatcgtgaggcggatggggcatggcgggcggccggaaatgcggggggtatgggcggtggagacggggggcgagcgggagatacggggtgaacggaaggcggcggtaatggcacgaacggaagcggcagacaataaacggcgaggagggacgggcggggaataaactggggtgggggtgctggggggtgcggagagagccaatgggcgatatgcgggggtaatcctgggcgtgggcgaaagacgggggcggcacacaagggggcggcgacgcgccacctacccctttccagcaagatgattattttagtgatatctctagcatagaatctccccttagaacccctagtagactgagtgatgggctagtgccttcccaggggaacatagagcattccgcagatggacctccagtcgtaactgcagaagacgcttccttagaagacagcaaactggaagactcagtgcctttaacagaaatgcctgaagcagtggatgtagatgagagccagttggagaatgtatgtctgagtgagtatcctcaataccttggaaatttggctgggtccccaaaagatgttaaaccagcagagcctagaaaactaggagtaagctctgagcagcaggagaaaggaaaatctggtcctgatgaggagatgatggaagagaaactcaaatctctatttgaggacattcaacttgaagaaggagtagagtctgaggagatgacagaagaaaaagtacaggctattcttaagcgtgttcagcaagcagaactggaaatgtcttcaattacaggttggcagaatgagacatcaagtggaaacctagagtcctgcgctcaagctcgaagagtaactggtgggttactagatcgactggatgacagccctgaccagtgtagagattccattacctcatatctcaaaggagaagctggcaaatttgaagcaaatggaagccatacagaaatcactccagaagcaaagacaaaatcttactttccagaatcccaaaatgatgtaggaaaacagagtaccaaggaaactctgaaaccaaaaatacatggatctggtcatgttgaagaaccagcatcaccactagcagcatatcagaaatctctagaagaaaccagcaagcttataatagaagagactaaaccctgtgtgcctgtcagtatgaaaaagatgagtaggacttctccagcagatggcaagccaaggcttagcctccatgaagaagaggggtccagtgggtctgagcaaaagcagggagaaggttttaaggtgaaaacgaagaaagaaatccggcatgtggaaaagaagagccactcgtaacagcgaacggtcagtcaaggatcataagtttttactgccagtattgagaaattcgtggaagaaatgtcagcaggaagtaaaaattcaccgagaagtgtgtgtgtgttcgctgcttccacacattaatggcatgattttttttatgcaaaaagaaaagaaaagaaaaccacccacattttaatttagcatgagccaatttacagagcatggaaatcactttcatttccggattggcgcgtgtgcaattagcaatgcagtgtatatacaagaagccatgctgttaacagtttatctcaagtaatttggtgtcatttacaaaaggaagaaattcctgccatcagaagggacagaaggagatggaatgatcaaatcacagagaaacactaaaattactaaatctacaacagctcgccttatttttcttggacccaaactgtcagggtataaacactatttgtttcttttttaaaacatcgatagttttgctgtaaataataacactgtataaattctaacagaaaaatagaataaaatgttgataaggcactgcctcttagaacacaaacagaatattgcaaatgcatttaacaaataggggtctcaagtgacttcaccctagaagaggagggagggattctgggtgggggtgactcttcactgattcttgtatattagcaattataatgtttgtatatgcaaaactgctagcttgattttaaaaaaaaacaaatctttaaaatctgctgcaaatttaaataattcccaaaatgaggaattctgtagttctgtgaaaaatttttttcttcagaatactaatattttgatgcatgtgtatcaccttattttgattaaatcttttccaattttgcaaacactacagtatactgcaacacaaaagattttatctgtaaacacaaagcccttcatctaatatttgttgctattgccaatttttcaatgaaatgacctaaaaacaacaaaaaaaaataacctatacggtagttgctttagggggtggggggatgctatctgttagtgcttaaaagggggtaaatgcttgccgctttagaggtggatggtgctcataaaaggccccagtcgggggtatttaaaaaggactgaacagaaatccttagctagtagaatggcagcacgctgtaaaattattactgtattgtgtactggctataagatgtagacacctttcagtaagccaatcatttgtaaccattctagcagtgtcatattaggttaataaggctgctgtgttttaaagggcatttttatttgggttttggtgaaattctttaatttgttgattatattcacataaaatcagcattcattgacacatagctctaatgacatatgtatgaaaaaccatacactggatgacctagtcgattatttaagcataaaataaattgtgttaaactcttca

SEQ ID NO: 444763 - DNA, 4205 bp, Homo sapiens
  misc_feature (4101)..(4102): n is a, c, g, or t
  misc_feature (4105)..(4105): n is a, c, g, or t
  misc_feature (4107)..(4107): n is a, c, g, or t
  misc_feature (4113)..(4114): n is a, c, g, or t
  misc_feature (4119)..(4119): n is a, c, g, or t
  misc_feature (4122)..(4122): n is a, c, g, or t
  misc_feature (4127)..(4127): n is a, c, g, or t
  misc_feature (4131)..(4131): n is a, c, g, or t
actctttgccgtggttttggatgttggaataccggcggtgatctgtcttttataaactcacctgatttaaaggaaagatgagtgaagaaccaaaggagaaaaatgcaaaacctgctcataggaaaaggaaaggaaaaaagtctgatgccaatgcaagttacttaagagcagctcgagctggacaccttgaaaaggccctcgactacataaaaaatggagttgacatcaacatttgcaatcagaatgggttgaacgctctccaccttgcttccaaagaaggccatgtagaggttgtttctgagctgctgcagagagaagccaatgtggatgcagctacaaagaaaggaaacacagcattgcacatcgcatctttggctgggcaagcagaggtggtaaaagtcttggttacaaatggagccaatgtcaatgcacaatctcagaatggtttcacgccattgtatatggcagcccaggaaaatcacctggaagttgtcaagtttcttcttgacaatggtgcaagccagagcctagccacagaggatggcttcacaccattggcagtggctttgcaacaaggtcacgaccaagtcgtttcgctcctgctagagaatgacaccaaaggaaaagtgcgtctcccagctcttcatatcgcggcccgaaaagacgacacgaaagccgccgccctgctgctgcagaatgacaacaatgcagatgtggaatcaaagagtggcttcactccgctccacatagctgctcactatggaaatatcaatgtagccacgttgctgttaaaccgagcggctgctgtggatttcaccgcaaggaatgacatcactcctttacatgttgcatcaaaaagaggaaatgcaaatatggtaaaactattgctcgatcgaggagctaaaatcgatgccaaaaccagggatggtctgacaccactgcactgtggagcaaggagtggccacgagcaggtggtagaaatgttgcttgatcgagctgcccccattctttcaaaaaccaagaatggattatctccattgcacatggccacacaaggggatcatttaaactgcgtccagcttctcctccagcataatgtacccgtggatgatgtcaccaatgactacctgactgccctacacgtggctgcccactgtggccattacaaagttgccaaggttctcttggataagaaagctaaccccaatgccaaagccctgaatggctttacccctcttcatattgcctgcaagaagaatcgaattaaagtaatggaactccttctgaaacacggtgcatccatccaagctgtaaccgagtcgggccttaccccaatccatgttgctgccttcatggggcatgtaaatattgtatcacaactaatgcatcatggagcctcaccaaacaccaccaatgtgagaggagaaacagcactgcacatggcagctcgctccggccaagctgaagttgtgcggtatctggtacaagacggagctcaggtagaagctaaagctaaggatgaccaaacaccactccacatttcagcccgactggggaaagcagacatagtacaacagctgttgcagcaaggggcatctccaaatgcagccacaacttctgggtacaccccacttcacctttccgcccgagaggggcatgaggatgtggccgcgttccttttggatcatggagcgtctttatctataacaacaaagaaaggatttactcctcttcatgtggcagcaaaatatggaaagcttgaagtcgccaatctcctgctacagaaaagtgcatctccagatgctgctgggaaggtaagaggtcaccagccactctgaagcaggccacttccacgataacaaaatacacccttgctaatattcactaatagccactcaaattataactaaatatttaagtcccactaggatgaagagcacttgggaaataaaaggtaaatgctggggtccaagtactgtggaaaccggaatgtaaatatgccctatgtcgtatccaatctaatttcatttcctcaatctaagcctctggttttaagacacctttgacactggttgttgtttctgcacgtgttttcagagcgggctaacaccactgcatgtagctgcacattacgataatcagaaagtggcccttctgcttttggaccaaggagcctcacctcacgcagccgcaaagaatggttatacgccactgcacatcgctgccaaaaagaaccagatggacatagcgacaactctgctggaatatggtgctgatgccaacgcagttacccggcaaggaattgcttccgtccatctcgcagctcaggaagggcacgtggacatggtgtcgctgctcctcggtagaaatgcgaatgtgaacctgagcaataagagcggcctgaccccactccatttggctgctcaagaagatcgagtgaatgtggcagaagtcctcgtaaaccaaggggctcatgtggacgcccagacaaagatgggatacacaccactgcatgtgggctgccactatggaaatatcaagattgttaatttcctgctccagcattctgcaaaagttaatgccaaaacaaagaatgggtatacgccattacatcaagcagcacagcaggggcatacgcatataataaatgtcttacttcagaacaacgcctcccccaatgaactcactgtgaatgggaatactgcccttggcattgcccggcgcctcggctacatctcagtagtggacaccctgaagatagtgaccgaagaaaccatgaccacaactactgtcacagagaagcacaaaatgaatgttccagaaacgatgaatgaagttcttgatatgtctgatgatgaagttcgtaaagccaatgcccctgaaatgctcagtgatggcgaatatatctcagatgttgaagaaggtgaagatgcaatgaccggggacacagacaaatatcttgggccacaggaccttaaggaattgggtgatgattccctgcctgcagagggttacatgggctttagtctcggagcgcgttctgccagcctccgctccttcagttcggataggtcttacaccttgaacagaagctcctatgcacgggacagcatgatgattgaagaactccttgtgccatccaaagagcagcatctaacattcacaagggaatttgattcagattctcttagacattacagctgggctgcagacaccttagacaatgtcaatcttgtttcaagccccattcattctgggtttctggttagctttatggtggacgcgagagggggctccatgagaggaagccgtcatcacgggatgagaatcatcattcctccacgcaagtgtacggcccccactcgaatcacctgccgtttggtaaagagacataaactggccaacccaccccccatggtggaaggagagggattagccagtaggctggtagaaatgggtcctgcaggggcacaatttttaggccctgtcatagtggaaatccctcactttgggtccatgagaggaaaagagagagaactcattgttcttcgaagtgaaaatggtgaaacttggaaggagcatcagtttgacagcaaaaatgaagatttaaccgagttacttaatggcatggatgaagaacttgatagcccagaagagttagggaaaaagcgtatctgcaggattatcacgaaagatttcccccagtattttgcagtggtttcccggattaagcaggaaagcaaccagattggtcctgaaggtggaattctgagcagcaccacagtgccccttgttcaagcatctttcccagagggtgccctaactaaaagaattcgagtgggcctccaggcccagagtggttgtgtgatcgccatcttagggaaaagatgttctcgtccgtggcgcacctggcgcgggcgaaccccttcaacacgccacatctgcagctggtgcacgatggtctcggggacctccgcagcagctcccaaggggccacgggccagcccgcggcctcgcaactgggagcgcgcgtggaagagtacagttgtgaatttggtccggaagtatatgcactggtggcttggggggctaagtggggtnnccnantggtgnncctgnttntgatncgtnggtggccccaatagggtttacggtccgccaaagggggtcgtggaaaggcgcctgaccggctgtgggtgagcagg

SEQ ID NO: 444764 - DNA, 4192 bp, Homo sapiens
actctttgccgtggttttggatgttggaataccggcggtgatctgtcttttataaactcacctgatttaaaggaaagatgagtgaagaaccaaaggagaaaaatgcaaaacctgctcataggaaaaggaaaggaaaaaagtctgatgccaatgcaagttacttaagagcagctcgagctggacaccttgaaaaggccctcgactacataaaaaatggagttgacatcaacatttgcaatcagaatgggttgaacgctctccaccttgcttccaaagaaggccatgtagaggttgtttctgagctgctgcagagagaagccaatgtggatgcagctacaaagaaaggaaacacagcattgcacatcgcatctttggctgggcaagcagaggtggtaaaagtcttggttacaaatggagccaatgtcaatgcacaatctcagaatggtttcacgccattgtatatggcagcccaggaaaatcacctggaagttgtcaagtttcttcttgacaatggtgcaagccagagcctagccacagaggatggcttcacaccattggcagtggctttgcaacaaggtcacgaccaagtcgtttcgctcctgctagagaatgacaccaaaggaaaagtgcgtctcccagctcttcatatcgcggcccgaaaagacgacacgaaagccgccgccctgctgctgcagaatgacaacaatgcagatgtggaatcaaagagtggcttcactccgctccacatagctgctcactatggaaatatcaatgtagccacgttgctgttaaaccgagcggctgctgtggatttcaccgcaaggaatgacatcactcctttacatgttgcatcaaaaagaggaaatgcaaatatggtaaaactattgctcgatcgaggagctaaaatcgatgccaaaaccagggatggtctgacaccactgcactgtggagcaaggagtggccacgagcaggtggtagaaatgttgcttgatcgagctgcccccattctttcaaaaaccaagaatggattatctccattgcacatggccacacaaggggatcatttaaactgcgtccagcttctcctccagcataatgtacccgtggatgatgtcaccaatgactacctgactgccctacacgtggctgcccactgtggccattacaaagttgccaaggttctcttggataagaaagctaaccccaatgccaaagccctgaatggctttacccctcttcatattgcctgcaagaagaatcgaattaaagtaatggaactccttctgaaacacggtgcatccatccaagctgtaaccgagtcgggccttaccccaatccatgttgctgccttcatggggcatgtaaatattgtatcacaactaatgcatcatggagcctcaccaaacaccaccaatgtgagaggagaaacagcactgcacatggcagctcgctccggccaagctgaagttgtgcggtatctggtacaagacggagctcaggtagaagctaaagctaaggatgaccaaacaccactccacatttcagcccgactggggaaagcagacatagtacaacagctgttgcagcaaggggcatctccaaatgcagccacaacttctgggtacaccccacttcacctttccgcccgagaggggcatgaggatgtggccgcgttccttttggatcatggagcgtctttatctataacaacaaagaaaggatttactcctcttcatgtggcagcaaaatatggaaagcttgaagtcgccaatctcctgctacagaaaagtgcatctccagatgctgctgggaaggtaagaggtcaccagccactctgaagcaggccacttccacgataacaaaatacacccttgctaatattcactaatagccactcaaattataactaaatatttaagtcccactaggatgaagagcacttgggaaataaaaggtaaatgctggggtccaagtactgtggaaaccggaatgtaaatatgccctatgtcgtatccaatctaatttcatttcctcaatctaagcctctggttttaagacacctttgacactggttgttgtttctgcacgtgttttcagagcgggctaacaccactgcatgtagctgcacattacgataatcagaaagtggcccttctgcttttggaccaaggagcctcacctcacgcagccgcaaagaatggttatacgccactgcacatcgctgccaaaaagaaccagatggacatagcgacaactctgctggaatatggtgctgatgccaacgcagttacccggcaaggaattgcttccgtccatctcgcagctcaggaagggcacgtggacatggtgtcgctgctcctcggtagaaatgcgaatgtgaacctgagcaataagagcggcctgaccccactccatttggctgctcaagaagatcgagtgaatgtggcagaagtcctcgtaaaccaaggggctcatgtggacgcccagacaaagatgggatacacaccactgcatgtgggctgccactatggaaatatcaagattgttaatttcctgctccagcattctgcaaaagttaatgccaaaacaaagaatgggtatacgccattacatcaagcagcacagcaggggcatacgcatataataaatgtcttacttcagaacaacgcctcccccaatgaactcactgtgaatgggaatactgcccttggcattgcccggcgcctcggctacatctcagtagtggacaccctgaagatagtgaccgaagaaaccatgaccacaactactgtcacagagaagcacaaaatgaatgttccagaaacgatgaatgaagttcttgatatgtctgatgatgaagttcgtaaagccaatgcccctgaaatgctcagtgatggcgaatatatctcagatgttgaagaaggtgaagatgcaatgaccggggacacagacaaatatcttgggccacaggaccttaaggaattgggtgatgattccctgcctgcagagggttacatgggctttagtctcggagcgcgttctgccagcctccgctccttcagttcggataggtcttacaccttgaacagaagctcctatgcacgggacagcatgatgattgaagaactccttgtgccatccaaagagcagcatctaacattcacaagggaatttgattcagattctcttagacattacagctgggctgcagacaccttagacaatgtcaatcttgtttcaagccccattcattctgggtttctggttagctttatggtggacgcgagagggggctccatgagaggaagccgtcatcacgggatgagaatcatcattcctccacgcaagtgtacggcccccactcgaatcacctgccgtttggtaaagagacataaactggccaacccaccccccatggtggaaggagagggattagccagtaggctggtagaaatgggtcctgcaggggcacaatttttaggccctgtcatagtggaaatccctcactttgggtccatgagaggaaaagagagagaactcattgttcttcgaagtgaaaatggtgaaacttggaaggagcatcagtttgacagcaaaaatgaagatttaaccgagttacttaatggcatggatgaagaacttgatagcccagaagagttagggaaaaagcgtatctgcaggattatcacgaaagatttcccccagtattttgcagtggtttcccggattaagcaggaaagcaaccagattggtcctgaaggtggaattctgagcagcaccacagtgccccttgttcaagcatctttcccagagggtgccctaactaaaagaattcgagtgggcctccaggcccagcctgttccagatgaaattgtgaaaaagatccttggaaacaaagcaacttttagcccaattgtcactgtggaaccaagaagacggaaattccataaaccaatcacaatgaccattccggtgcccccgccctcaggagaaggtgtatccaatggatacaaaggggacactacacccaatctgcgtcttctctgtagcattacaggtttggttaagtcactgctgtacttcctattgattcacaaagattgtgtacaaagatatatttgtgtacaaagatataaaacctttgaaatatccatgccaacattataagagaaaataaaagaacaaaacattt

SEQ ID NO: 444765 - DNA, 355 bp, Homo sapiens
cgcgcccagcctcatctattttaatattacctttcttctagaaaatgatcccggtcatagaaaatgatcctggtatatttatgtcatataaaatcctttgtaaaatatgtatttaagtctttaaaaagcaagttcatttttaaatattcagtaaataatagcagaagtggcaaaaaaaatagcaaaggtggtatgggaatgactggggttttggaagttctgacccagggggtgatttatgaaggacagaatgcaggggaaggatttaaaagggacagcaggcaagaacactagggaagtaaggaaactatgagaagataaagggtccaacatccgaggcagacctagaccattc

SEQ ID NO: 444766 - DNA, 4721 bp, Homo sapiens
  misc_feature (711)..(711): n is a, c, g, or t
gaaggttgcagtgagccgagatcatgccattgtgctctaccctgggcaacagagcaagactccttctcaaaaaaaaaaaaaaaaatctaatcgttaaactttcaggaattttgtgagctgattgtaaacataacagttattacaaattaaagtatataaatgcacaagtacataaatgatcatatttaatacatcatttcctacttaatacatcatttcctactatctgtgcacttgaggttatttgcatctattggtagaaatactattaatacataatagtgtcctgctgcagtattgatagaacattaccccattgtaatcagtaaaatacaaactagaatttgatttattatttgttgattaaacttaagaaagtgaaggatagaatgttaatgcagattaaatttcaaagtgtgatgtgtctctgctagactaaatgcaatacaaaaaaattgaggaagttgctttgcaatattccaaaactcggccaggcatggtggctcacacctgtaatcccagcactttgggaggccaaggctggcagatcacttgaggtcaggagttcgagaccagcctgcccagtatagtgaaacctcatctctaccaaagatacaaaaactagccgggcgtggtggtgcatgcctatagtcccaactaattagccaggtgtcgtggcacgtgcctgtaatttcagctacttgggaggcngagacatgagaattgcttgaacccgggaggtggagtttacggtgagctgagatcgcgccactgcactccagcttgggtgacagagcgagactccgtctcaaaaaaaaaatttttttttaaactcttcattagttcggaaagatgttgatgtcattgatgaatgagcgaaactctaatatatgtctttattgtttcactttcatcttattcattaatgtaattgaaaatattatccacccttcatgttgctactacagtcagcccttcatatactgtgggttccacatccgtggattcacccaactgtagatggaaaatatttttttaaataataaaaatacaataataaacacattaaaaagtaatacattataaaaacttttatggcattgatattatattaggtattaaaaataatctagaaatgacctcaagtatagaggaggatatgcaaaggttgagtgcaaatacttcattttatacaagggacttgagcatgggaggattttggtatggggaggtgcaaatagcatactcatttgcgaaacatatgaccaaccattttgctaattggatgataattcatagtcaaattttgtgaaactgttgttggttgtagaattttaaaaactaatagtgggtttttcaagaaatagcaagtcatattgatattatagatataaactgaaaatcaggttaaatatttaagtttaaaatgtatttccaaaattagataatcactaagagaactttttacattgacccttaaagtgttatgaattttacttacatatgtaaaattatttttcagattctgtttcctaaaatgccaaaacgacagggtgattttttgcattttttaaatgtgaagaaggtgaaaacagacacagaaaataatgaagtgagcaaaaatcactgcagattgtctaaggcaaaggaaccacatttcgagtatattgaacaaccaatcattgaagaaaagccatcactttcatcaaagaaagaaatagataatcttgtgcttccagattgttggaatgaaaaacaagcatttatgtttacagaacaatacaaatggcttgaaataaaagaaggtaaattaggatgtaaggattgttcagcagttcggcatttgggatcgaaagcagaaaagcatgtccatgtgtccaaggaatggattgcatatttagtaacccctaatggcagtaataaaactactaggcaagcttctctacgaaaaaaaattagggaacatgatgtttctaaagcccatggtaaaattcaggatttgttaaaggaatcaactaatgattcaatttgtaatttagtgcataaacaaaataataaaaatattgatgctactgtaaaagttttcaatactgtttacagtttagtaaaacataacagacctttatctgatattgagggggcaagagaattacaggaaaaaaatggagaggtaaattgtttaaatacacgttacagtgcaacaagaatagcagaacatattgcaaaagaaatgaagatgaagatatttaagaatattatagaagagaatgccaaaatctgtatcataattgatgaggcatctacagtttcaaagaaaaccaccctagtgatttatctccagtgcacaattcagtcagctcctgcacctgttatgttatttgtggctttaaaagaattggtgtcaactatagcagagtgtattgtcaatacattattgactactttaaatgattgtggttttacaaatgaatatttgaaagcaaatttaattgcattttgttctgatggtgctaatacaatcctgggaagaaagtctggagtagctacaaaattgttagaaaattttcctgaaatcatcatttggaactgtttaaatcatcgattacaattgtcacttgatgattctatatccgaaataaaacaaattaatcatttaaaaatatttattgataaaatttattctatttatcatcaacctaataaaaatcaaaccaagcttctaggaactgtagctaaagaacttgaaactgaaattattaaaattggtcgagtaatgggaccaagatgggcggcatgtagtttacaagctgctactgctgtatggcatgcatatcctatattatatatgcatttttctcattcttactctggtttggcgaagagattagctaacattaatttcttacaagaccttgctttaatgattgacattcttgaagaattttcagtactttcaactgcattacagtcaagatcaactaatattaagaaagcacaaaaattgatcaaacgtaccataagagctttggaaaatttaaaaattggtactggaaagtatgaatctcaaattgaagatttgatcaagtcagataagtttaaagatattccatttaataaaaacaataaatttaatgctcttcctaggagtatattactagacaatataattcagcacatgaacctacgccttttatctgacagaaaccatgaagatatttttaattactttgatttgctggaaccttccacatggccttatgaagaaataacttcaccatggatagctggtgaaaaaacattatttcatttgtgtaaaattttaaaatatgaagttgatttgaatgattttcgggaatttgtaaataataatataaaatcaaacaatgtttcaattcctacaactatatacaaagctaaaaagatagttagcaccattgcaatcaatagtgctgaagctgaaaggggtttcaatttaatgaacataatttgtacaagggtgagaaatagtttaacaatagatcatgtatcagatttaatgacaataaatttactggggaaagaattagcagattgggatgcaacaccgtttgtaaaatcttggtcaaattgcaaccacaggttggctacagatacaagagttcggcaaaagtcaacaaaagtcttccatgagaatcaattggctatatggaacttaaaatagaatattgtatacgttttttgtcatctgtaaattatgtactacacatcctttatatacataaaggtctttttttttttttggaaagccagttaaacttttatcagcatgttgctgtttaaaaggcgttctttaagaagataatcttgaagattggttttagaagctatagttttttagagattggcccatgtttgctagagtgggtcataatacatattccatgaagttctgtacagaacaaacaccgtttataattttgtactgttttactttaagtaaggatgcaaaaaatagcaggactcagctaagttctaagccctggaggttatattaaataaaagagaaatggaataaaaactgtaaaaaaaaaaaaaaaaaaaaaaaaaaaaaaaacaaaaaaaaaaacaaaaaaaaaaaagaaagagagacgacgaaacaaaaaaaactatgaaagaaaggacccaaacaatagtaaaggaaaccatacattatcgtggcagaactaggggcgacatcaaaggggcaaactcgtaaagtaaagcacgaagggtcccggcggcacgaacacaacaccgctccagctagtgaacaacaagacgaagactgagagacgcaggtcggcaacacaaacatcaactaatattgagagagcggaaacccaatactagtggcacgcactacagaccacataaacaatatagtccatacgaaccactctcgactgtaggaactgaatcaacaaaaacaaattaatttgacagatcgtgcattaaaaggtggcgtgacaacaacctgtacgcctgcaatgagcagcaaactacggcaggacgaacatagattcggcacatctcgaaaggcgcatagtgtagactacaagaagtaaaaactattatttacaagcaccgacgatatctgtattaaaattaaacactcactacacacatacttagaacaaacgacgtcaacgaacacagcaagccgacagctacttgtatagctagatactgaacgccagacgctg

SEQ ID NO: 444767 - DNA, 3744 bp, Homo sapiens
ggaatgagagaaagaggctccggggagatagcggaccagtgagggctgcccctcttttgaagcggttttcgtctctttccgccagtggcctcccagctcacgcaggggcgggtcccggtagcgcgaggcggtgcagggcgggaaggggagtggtggcggctgcggcagtagggacagcaggagcagtggtgctgtcagcgcggccgtcggagacatgggagacccggggtcggaagtgagtagtcgagtgagggtcctggcgttctcagaggcgaaccgcgaagggtttgtgttttctgcggtctgaggcctggtgctccgtcgcagcctcggggcgatacctcttcagtgtcttgggccgagcccagctctggggcctgataatagaatctgtccctccagctggccctgaggcatctgagtcaacaacggatgaaaatgaagacgacattcagtttgtcagtgaaggaccatcgagacctgttcttgaatacatcgatctggtctgtggtgatgatgaaaaccctagcgcctattatagtgatattctgtttcctaaaatgccaaaacgacagggtgattttttgcattttttaaatgtgaagaaggtgaaaacagacacagaaaataatgaagtgagcaaaaatcactgcagattgtctaaggcaaaggaaccacatttcgagtatattgaacaaccaatcattgaagaaaagccatcactttcatcaaagaaagaaatagataatcttgtgcttccagattgttggaatgaaaaacaagcatttatgtttacagaacaatacaaatggcttgaaataaaagaaggtaaattaggatgtaaggattgttcagcagttcggcatttgggatcgaaagcagaaaagcatgtccatgtgtccaaggaatggattgcatatttagtaacccctaatggcagtaataaaactactaggcaagcttctctacgaaaaaaaattagggaacatgatgtttctaaagcccatggtaaaattcaggatttgttaaaggaatcaactaatgattcaatttgtaatttagtgcataaacaaaataataaaaatattgatgctactgtaaaagttttcaatactgtttacagtttagtaaaacataacagacctttatctgatattgagggggcaagagaattacaggaaaaaaatggagaggtaaattgtttaaatacacgttacagtgcaacaagaatagcagaacatattgcaaaagaaatgaagatgaagatatttaagaatattatagaagagaatgccaaaatctgtatcataattgatgaggcatctacagtttcaaagaaaaccaccctagtgatttatctccagtgcacaattcagtcagctcctgcacctgttatgttatttgtggctttaaaagaattggtgtcaactatagcagagtgtattgtcaatacattattgactactttaaatgattgtggttttacaaatgaatatttgaaagcaaatttaattgcattttgttctgatggtgctaatacaatcctgggaagaaagtctggagtagctacaaaattgttagaaaattttcctgaaatcatcatttggaactgtttaaatcatcgattacaattgtcacttgatgattctatatccgaaataaaacaaattaatcatttaaaaatatttattgataaaatttattctatttatcatcaacctaataaaaatcaaaccaagcttctaggaactgtagctaaagaacttgaaactgaaattattaaaattggtcgagtaatgggaccaagatgggcggcatgtagtttacaagctgctactgctgtatggcatgcatatcctatattatatatgcatttttctcattcttactctggtttggcgaagagattagctaacattaatttcttacaagaccttgctttaatgattgacattcttgaagaattttcagtactttcaactgcattacagtcaagatcaactaatattaagaaagcacaaaaattgatcaaacgtaccataagagctttggaaaatttaaaaattggtactggaaagtatgaatctcaaattgaagatttgatcaagtcagataagtttaaagatattccatttaataaaaacaataaatttaatgctcttcctaggagtatattactagacaatataattcagcacatgaacctacgccttttatctgacagaaaccatgaagatatttttaattactttgatttgctggaaccttccacatggccttatgaagaaataacttcaccatggatagctggtgaaaaaacattatttcatttgtgtaaaattttaaaatatgaagttgatttgaatgattttcgggaatttgtaaataataatataaaatcaaacaatgtttcaattcctacaactatatacaaagctaaaaagatagttagcaccattgcaatcaatagtgctgaagctgaaaggggtttcaatttaatgaacataatttgtacaagggtgagaaatagtttaacaatagatcatgtatcagatttaatgacaataaatttactggggaaagaattagcagattgggatgcaacaccgtttgtaaaatcttggtcaaattgcaaccacaggttggctacagatacaagagttcggcaaaagtcaacaaaagtcttccatgagaatcaattggctatatggaacttaaaatagaatattgtatacgttttttgtcatctgtaaattatgtactacacatcctttatatacataaaggtctttttttttttttggaaagccagttaaacttttatcagcatgttgctgtttaaaaggcgttctttaagaagataatcttgaagattggttttagaagctatagttttttagagattggcccatgtttgctagagtgggtcataatacatattccatgaagttctgtacagaacaaacaccgtttataattttgtactgttttactttaagtaaggatgcaaaaaatagcaggactcagctaagttctaagccctggaggttatattaaataaaagagaaatggaataaaaactgtaaaaaaaaaaaaaaaaaaaaaaaaaaaaaaaacaaaaaaaaaaacaaaaaaaaaaaagaaagagagacgacgaaacaaaaaaaactatgaaagaaaggacccaaacaatagtaaaggaaaccatacattatcgtggcagaactaggggcgacatcaaaggggcaaactcgtaaagtaaagcacgaagggtcccggcggcacgaacacaacaccgctccagctagtgaacaacaagacgaagactgagagacgcaggtcggcaacacaaacatcaactaatattgagagagcggaaacccaatactagtggcacgcactacagaccacataaacaatatagtccatacgaaccactctcgactgtaggaactgaatcaacaaaaacaaattaatttgacagatcgtgcattaaaaggtggcgtgacaacaacctgtacgcctgcaatgagcagcaaactacggcaggacgaacatagattcggcacatctcgaaaggcgcatagtgtagactacaagaagtaaaaactattatttacaagcaccgacgatatctgtattaaaattaaacactcactacacacatacttagaacaaacgacgtcaacgaacacagcaagccgacagctacttgtatagctagatactgaacgccagacgctg

SEQ ID NO: 444768 - DNA, 675 bp, Homo sapiens
atttgtacaagggtgagaaatagtttaacaatagatcatgtatcagatttaatgacaataaatttactggggaaagaattagcagattgggatgcaacaccgtttgtaaaatcttggtcaaattgcaaccacaggttggctacagatacaagagttcggcaaaagtcaacaaaagtcttccatgagaatcaattggctatatggaacttaaaatagaatattgtatacgttttttgtcatctgtaaattatgtactacacatcctttatatacataaaggtctttttttttttttggaaagccagttaaacttttatcagcatgttgctgtttaaaaggcgttctttaagaagataatcttgaagattggttttagaagctatagttttttagagattggcccatgtttgctagagtgggtcataatacatattccatgaagttctgtacagaacaaacaccgtttataattttgtactgttttactttaagtaaggatgcaaaaaatagcaggactcagctaagttctaagccctggaggttatattaaataaaagagaaatggaataaaaactgtaagccttttggctcttgtctttctcatttccatatctgtgctatctagtatggtagccactagctacatgtggctgatcagcttagggctaaaagtaa

SEQ ID NO: 444769 - DNA, 1533 bp, Homo sapiens
ggaatgagagaaagaggctccggggagatagcggaccagtgagggctgcccctcttttgaagcggttttcgtctctttccgccagtggcctcccagctcacgcaggggcgggtcccggtagcgcgaggcggtgcagggcgggaaggggagtggtggcggctgcggcagtagggacagcaggagcagtggtgctgtcagcgcggccgtcggagacatgggagacccggggtcggaaataatagaatctgtccctccagctggccctgaggcatctgagtcaacaacggatgaaaatgaagacgacattcagtttgtcagtgaaggaccatcgagacctgttcttgaatacatcgatctggtctgtggtgatgatgaaaaccctagcgcctattatagtgatattctgtttcctaaaatgccaaaacgacagggtgattttttgcattttttaaatgtgaagaaggtgaaaacagacacagaaaataatgaagtgagcaaaaatcactgcagattgtctaaggcaaaggaaccacatttcgagtatattgaacaaccaatcattgaagaaaagccatcactttcatcaaagaaagaaatagataatcttgtgcttccagattgttggaatgaaaaacaagcatttatgtttacagaacaatacaaatggcttgaaataaaagaaggtaaattaggatgtaaggattgttcagcagttcggcatttgggatcgaaagcagaaaagcatgtccatgtgtccaaggaatggattgcatatttagtaacccctaatggcagtaataaaactactaggcaagcttctctacgaaaaaaaattagggaacatgatgtttctaaagcccatggtaaaattcaggatttgttaaaggaatcaactaatgattcaatttgtaatttagtgcataaacaaaataataaaaatattgatgctactgtaaaagttttcaatactgtttacagtttagtaaaacataacagacctttatctgatattgagggggcaagagaattacaggaaaaaaatggagaggtaaattgtttaaatacacgttacagtgcaacaagaatagcagaacatattgcaaaagaaatgaagatgaagatatttaagaatattatagaagagaatgccaaaatctgtatcataattgatgaggcatctacagtttcaaagaaaaccaccctagtgatttatctccagtgcacaattcagtcagctcctgcacctgttatgttatttgtggctttaaaagaattggtgtcaactatagcagagtgtattgtcaatacattattgactactttaaatgattgtggttttacaaatgaatatttgaaagcaaatttaattgcattttgttctgatggtgctaatacaatcctgggaagaaagtctggagtagctacaaaattgttagaaaattttcctgaaatcatcatttggaactgtttaaatcatcgattacaattgtcacttgatgattctatatccgaaataaaacaaattaatcattt

SEQ ID NO: 444770 - DNA, 3577 bp, Homo sapiens
ggaatgagagaaagaggctccggggagatagcggaccagtgagggctgcccctcttttgaagcggttttcgtctctttccgccagtggcctcccagctcacgcaggggcgggtcccggtagcgcgaggcggtgcagggcgggaaggggagtggtggcggctgcggcagtagggacagcaggagcagtggtgctgtcagcgcggccgtcggagacatgggagacccggggtcggaactggccctgaggcatctgagtcaacaacggatgaaaatgaagacgacattcagtttgtcagtgaaggaccatcgagacctgttcttgaatacatcgatctggtctgtggtgatgatgaaaaccctagcgcctattatagtgatattctgtttcctaaaatgccaaaacgacagggtgattttttgcattttttaaatgtgaagaaggtgaaaacagacacagaaaataatgaagtgagcaaaaatcactgcagattgtctaaggcaaaggaaccacatttcgagtatattgaacaaccaatcattgaagaaaagccatcactttcatcaaagaaagaaatagataatcttgtgcttccagattgttggaatgaaaaacaagcatttatgtttacagaacaatacaaatggcttgaaataaaagaaggtaaattaggatgtaaggattgttcagcagttcggcatttgggatcgaaagcagaaaagcatgtccatgtgtccaaggaatggattgcatatttagtaacccctaatggcagtaataaaactactaggcaagcttctctacgaaaaaaaattagggaacatgatgtttctaaagcccatggtaaaattcaggatttgttaaaggaatcaactaatgattcaatttgtaatttagtgcataaacaaaataataaaaatattgatgctactgtaaaagttttcaatactgtttacagtttagtaaaacataacagacctttatctgatattgagggggcaagagaattacaggaaaaaaatggagaggtaaattgtttaaatacacgttacagtgcaacaagaatagcagaacatattgcaaaagaaatgaagatgaagatatttaagaatattatagaagagaatgccaaaatctgtatcataattgatgaggcatctacagtttcaaagaaaaccaccctagtgatttatctccagtgcacaattcagtcagctcctgcacctgttatgttatttgtggctttaaaagaattggtgtcaactatagcagagtgtattgtcaatacattattgactactttaaatgattgtggttttacaaatgaatatttgaaagcaaatttaattgcattttgttctgatggtgctaatacaatcctgggaagaaagtctggagtagctacaaaattgttagaaaattttcctgaaatcatcatttggaactgtttaaatcatcgattacaattgtcacttgatgattctatatccgaaataaaacaaattaatcatttaaaaatatttattgataaaatttattctatttatcatcaacctaataaaaatcaaaccaagcttctaggaactgtagctaaagaacttgaaactgaaattattaaaattggtcgagtaatgggaccaagatgggcggcatgtagtttacaagctgctactgctgtatggcatgcatatcctatattatatatgcatttttctcattcttactctggtttggcgaagagattagctaacattaatttcttacaagaccttgctttaatgattgacattcttgaagaattttcagtactttcaactgcattacagtcaagatcaactaatattaagaaagcacaaaaattgatcaaacgtaccataagagctttggaaaatttaaaaattggtactggaaagtatgaatctcaaattgaagatttgatcaagtcagataagtttaaagatattccatttaataaaaacaataaatttaatgctcttcctaggagtatattactagacaatataattcagcacatgaacctacgccttttatctgacagaaaccatgaagatatttttaattactttgatttgctggaaccttccacatggccttatgaagaaataacttcaccatggatagctggtgaaaaaacattatttcatttgtgtaaaattttaaaatatgaagttgatttgaatgattttcgggaatttgtaaataataatataaaatcaaacaatgtttcaattcctacaactatatacaaagctaaaaagatagttagcaccattgcaatcaatagtgctgaagctgaaaggggtttcaatttaatgaacataatttgtacaagggtgagaaatagtttaacaatagatcatgtatcagatttaatgacaataaatttactggggaaagaattagcagattgggatgcaacaccgtttgtaaaatcttggtcaaattgcaaccacaggttggctacagatacaagagttcggcaaaagtcaacaaaagtcttccatgagaatcaattggctatatggaacttaaaatagaatattgtatacgttttttgtcatctgtaaattatgtactacacatcctttatatacataaaggtctttttttttttttggaaagccagttaaacttttatcagcatgttgctgtttaaaaggcgttctttaagaagataatcttgaagattggttttagaagctatagttttttagagattggcccatgtttgctagagtgggtcataatacatattccatgaagttctgtacagaacaaacaccgtttataattttgtactgttttactttaagtaaggatgcaaaaaatagcaggactcagctaagttctaagccctggaggttatattaaataaaagagaaatggaataaaaactgtaaaaaaaaaaaaaaaaaaaaaaaaaaaaaaaacaaaaaaaaaaacaaaaaaaaaaaagaaagagagacgacgaaacaaaaaaaactatgaaagaaaggacccaaacaatagtaaaggaaaccatacattatcgtggcagaactaggggcgacatcaaaggggcaaactcgtaaagtaaagcacgaagggtcccggcggcacgaacacaacaccgctccagctagtgaacaacaagacgaagactgagagacgcaggtcggcaacacaaacatcaactaatattgagagagcggaaacccaatactagtggcacgcactacagaccacataaacaatatagtccatacgaaccactctcgactgtaggaactgaatcaacaaaaacaaattaatttgacagatcgtgcattaaaaggtggcgtgacaacaacctgtacgcctgcaatgagcagcaaactacggcaggacgaacatagattcggcacatctcgaaaggcgcatagtgtagactacaagaagtaaaaactattatttacaagcaccgacgatatctgtattaaaattaaacactcactacacacatacttagaacaaacgacgtcaacgaacacagcaagccgacagctacttgtatagctagatactgaacgccagacgctg

SEQ ID NO: 444771 - DNA, 2438 bp, Homo sapiens
  misc_feature (2)..(2): n is a, c, g, or t
  misc_feature (7)..(8): n is a, c, g, or t
gncacgnngtcgccttgtgcgcttgcgcgcgtccaggcgctcccgtgaggcagtgcgaggcgcgcggggcacggagggcggtggcggcgggctcctgcgagaagcaagcggaacttcctgagcgtgcttaggtgtcacagctgggtgaccctccgaaggaaggttttgccgctggcgcgtctggtgtatcgcggccttggggccgcggatccctggggcttgccgctgcctctggggttcgcgcggccctggcgtcggggctgcctcagcgctggctgaaggccggcccgaagcacccttaattgtggccgcgcgcttccctgctgctcctgctgttctccgcgtcgcggtggtggactctggaggtggagccttgcccggcgagacgttgaggaggaatcattatagattctaaaaatatattttcccttctctgtggacttggtataaaacgtagctttttttctgcttggatttattttctaaaaatcaacaccgtaaacccatatcagatacaacaaaattggggtagttaaaaccatgagttgtggaaatgagtttgtggaaacattaaaaaaaattggttatcccaaagctgataatcttaatggagaagactttgactggttgtttgagggcgttgaagatgaatcgtttctgaagtggttttgtgggaatgtgaatgaacagaacgtgttgtctgaaagagaattggaagcttttagcattcttcagaaatcaggcaagcctattctagaaggggcggcattggatgaagctcttaaaacgtgtaaaacttctgatttgaagacacctagactggatgataaagagctggagaaattagaggatgaggttcaaactctactgaaattaaagaacctaaaaattcagcgacgtaataaatgtcaattgatggcttcagtaactagccacaaatctctgaggttaaatgctaaagaagaagaagccactaaaaagctgaagcagagtcaaggaattctaaatgcaatgatcactaagatcagtaatgaacttcaggctcttactgatgaagttacacaattgatgatgttcttcagacattctaatttaggtcaagggacaaatccactggtatttttatcgcaattttccttggaaaaatacctaagtcaggaagagcaaagcacagcagcattaactttgtataccaaaaaacagttctttcagggtatacatgaagtagttgaaagttcaaatgaagacaattttcaacttttagatatacagacaccatctatttgtgataatcaagaaatccttgaggagagacgactagagatggctagactgcagctcgcatacatttgtgctcaacatcagttaattcacttaaaagcaagtaattcgagcatgaagtcaagtataaaatgggcagaggagagtcttcacagcctaaccagcaaggctgtggacaaagaaaatttggatgctaaaatttctagcttgaccagtgagattatgaaacttgaaaaagaggtcactcaaataaaagacagaagtttacctgctgtggtaagagagaatgcccagttattgaatatgccagtggtaaagggagattttgatctgcagattgctaaacaagattattatacagcaagacaagagttagttttaaatcaattaataaaacaaaaggcatcatttgaacttctacagttatcatatgaaattgaattaagaaagcatcgggacatatatcgtcaacttgaaaatttggttcaagaacttagtcaaagtaacatgatgctctacaagcaattagaaatgttaacagatccatcagtttctcaacagataaatccaaggaataccattgatactaaggattattctactcataggctttaccaagttttggagggagagaataagaaaaaagaattgtttctaactcatggaaaccttgaggaagtggctgagaaattgaaacagaatatttctttagtacaagatcagttggcagtatctgctcaagaacattctttctttctgtccaaacggaataaggatgtggacatgctttgtgatactttgtatcaaggaggaaatcagcttttgcttagtgatcaggagttaacagagcagtttcataaagttgaatctcaactgaataagctaaatcatctcctcactgatattcttgctgatgtgaagacaaaaagaaaaactttggcaaataataaattacatcaaatggaaagagaattctatgtatattttttaaaagatgaagattatctgaaagatattgtggagaatttagaaactcaatcaaagattaaggctgttagtcttgaagattgaaaattactgaaaactgaatctttattacgtgtcctcttttatttattagaagactgtgtataataaacactactaaatttttaaaa

SEQ ID NO: 444772 - DNA, 698 bp, Homo sapiens
aggcagtgcgaggcgcgcggggcacggagggcggtggcggcgggctcctgcgagaagcaagcggaacttcctgaggtgactgacgcgggcctcggttctgggcgcaggggtgtggggctggaggagtggccgcgatccccgtctgcacccaggtgcctcttttttttcctgcgctcctgggggctccttccaggtgctccagcagctgcccggggatcagggcccggtccgctgggcgaggagctggggcgggggctgtgcggggcctgtcacccccgtcttctgcagctcggtgtcgacggcgattcggtgggcttgtgcgtttgttttgtcagcgtgcttaggtgtcacagctgggtgaccctccgaaggaaggttttgccgctggcgcgtctggtgtatcgcggccttggggccgcggatccctggggcttgccgctgcctctggggttcgcgcggccctggcgtcggggctgcctcagcgctggctgaaggccggcccgaagcacccttaattgtggccgcgcgcttccctgctgctcctgctgttctccgcgtcgcggtggtggactctggaggtggagccttgcccggcgagacgttgaggtaaatatttagttgatcttcagaagatgtgccatgcttatttgcgtcttcttacgtacggagggcagggaagagaggctgcctagcctcct

SEQ ID NO: 444773 - DNA, 2384 bp, Homo sapiens
  misc_feature (2)..(2): n is a, c, g, or t
  misc_feature (7)..(8): n is a, c, g, or t
gncacgnngtcgccttgtgcgcttgcgcgcgtccaggcgctcccgtgaggcagtgcgaggcgcgcggggcacggagggcggtggcggcgggctcctgcgagaagcaagcggaacttcctgagcgtgcttaggtgtcacagctgggtgaccctccgaaggaaggttttgccgctggcgcgtctggtgtatcgcggccttggggccgcggatccctggggcttgccgctgcctctggggttcgcgcggccctggcgtcggggctgcctcagcgctggctgaaggccggcccgaagcacccttaattgtggccgcgcgcttccctgctgctcctgctgttctccgcgtcgcggtggtggactctggaggtggagccttgcccggcgagacgttgaggaggaatcattatagattctaaaaatatattttcccttctctgtggacttggtataaaacgtagctttttttctgcttggatttattttctaaaaatcaacaccgtaaacccatatcagatacaacaaaattggggtagttaaaaccatgagttgtggaaatgagtttgtggaaacattaaaaaaaattggttatcccaaagctgataatcttaatggagaagactttgactggttgtttgagggcgttgaagatgaatcgtttctgaagtggttttgtgggaatgtgaatgaacagaacgtgttgtctgaaagagaattggaagcttttagcattcttcagaaatcaggcaagcctattctagaaggggcggcattggatgaagctcttaaaacgtgtaaaacttctgatttgaagacacctagactggatgataaagagctggagaaattagaggatgaggttcaaactctactgaaattaaagaacctaaaaattcagcgacgtaataaatgtcaattgatggcttcagtaactagccacaaatctctgaggttaaatgctaaagaagaagaagccactaaaaagctgaagcagagtcaaggaattctaaatgcaatgatcactaagatcagtaatgaacttcaggctcttactgatgaagttacacaattgatgatgttcttcagacattctaatttaggtcaagggacaaatccactggtatttttatcgcaattttccttggaaaaatacctaagtcaggaagagcaaagcacagcagcattaactttgtataccaaaaaacagttctttcagggtatacatgaagtagttgaaagttcaaatgaagacaattttcaacttttagatatacagacaccatctatttgtgataatcaagaaatccttgaggagagacgactagagatggctagactgcagctcgcatacatttgtgctcaacatcagttaattcacttaaaagcaagtaattcgagcatgaagtcaagtataaaatgggcagaggagagtcttcacagcctaaccagcaaggctgtggacaaagaaaatttggatgctaaaatttctagcttgaccagtgagattatgaaacttgaaaaagaggtcactcaaataaaagacagaagtttacctgctgtggtaagagagaatgcccagttattgaatatgccagtggtaaagggagattttgatctgcagattgctaaacaagattattatacagcaagacaagagttagttttaaatcaattaataaaacaaaaggcatcatttgaacttctacagttatcatatgaaattgaattaagaaagcatcgggacatatatcgtcaacttgaaaatttggttcaagaacttagtcaaagtaacatgatgctctacaagcaattagaaatgttaacagatccatcagtttctcaacagataaatccaaggaataccattgatactaaggattattctactcataggctttaccaagttttggagggagagaataagaaaaagaatatttctttagtacaagatcagttggcagtatctgctcaagaacattctttctttctgtccaaacggaataaggatgtggacatgctttgtgatactttgtatcaaggaggaaatcagcttttgcttagtgatcaggagttaacagagcagtttcataaagttgaatctcaactgaataagctaaatcatctcctcactgatattcttgctgatgtgaagacaaaaagaaaaactttggcaaataataaattacatcaaatggaaagagaattctatgtatattttttaaaagatgaagattatctgaaagatattgtggagaatttagaaactcaatcaaagattaaggctgttagtcttgaagattgaaaattactgaaaactgaatctttattacgtgtcctcttttatttattagaagactgtgtataataaacactactaaatttttaaaa

SEQ ID NO: 444774 - DNA, 1413 bp, Homo sapiens
cccacgcgtccgaaacattgctgctgatatgtttcatgtcttgtacacagttcatgtgtttcttcctactgtttctggtaagaagccactatgaataaaaagcaccaataaaacatcatacatgataatattgtagaacaccactgtccctaggacaatgtagagatgccaagtacacactgcttaaatcagaacaaggggggaaaagcatgaactgtgtacaagacatgaaacattgctgctgatatgttgttttttcacatgcttttgagttttcactttttaaacgagagccagcaagcaaaatagatgtggctgggtctgcctgtccgggcggctctttgcaccgagctctcaaatcctgtgtattgagggttcctttttggtactcaggattggagctacagctgggcccccctctctcccattcgtttgaagagacactgagggaaacaagggtttcttttgaggtgtccttggctgccttttacgggatgggagccttctccggatcttttgttcttctgcacctcttgtagctactgccggtgcaaggttgtagatgttattccccaggagcctgggctggggggctgagctgggctgaatgcaaaagcatgcaaccagaaggcgggcaaggggaggaaaagcaggcctggcctcattggtcccctggagatgtctgtagcagtcagctccagcttgggcctggggaagcagcctgaccaaggcgctcaggtgtgcctgttacaagaagaacctgcagaaggataatttgcacatggagctgtgataacactaatgttgattttttttttttttacaagtcatcagagatgtttgcaaagtgagttttatttttttgtaattcctttatctttacttaaaggtgaatgtgtattcctctgggaggaataggaagaaaacaggaatgttaataatgtcgaacagaaaacttcctcccttattaatatataatcctcatgtatttatgcctaatgtaagctgacttttaaaaagctttcttttgttgcatgccctgtgcaggcatctgtattgtacatgcatgcctttcgtcctgttttcctgtataaagttagtgaacaaagaaatatttttgcctagttcatgttgccaagcaatgcatattttttaaatttgtcatatatggaaagagcatgtttgttacatgtaaaagctttactgatatacagatatactaatgtttgaagatgctgttctttgcaagtgtacagttttcaaatgttgttaccagtgaaacacccttgtggtttaaacttgctacaatgtatttattattcatttcctcccatgtaactaagaatcatggctatatttcatatcaacgttatattgaaagtgaagggaaatgattaatacaaggttttgtaa

SEQ ID NO: 444775 - DNA, 271 bp, Homo sapiens
attgtccccagcccccagatcagttcaagaagacgtcactgctgggacacacaggctgagttgtgccagctcattgccagctgagagtttcttttctctccccctcgctttggagtacattgtaagaatcttaaaaaaaaaaaaaaaaaaaaaaaaaaatcagagccctgaaatagtttggggcccttgggggcttccttttataaacaccccccccatttccctaagaaaaagtggcaagggaaaaacagcacaacgccaccaacatgcg

SEQ ID NO: 444776 - DNA, 6394 bp, Homo sapiens
actcaataatgatgagctgtgcccagtggacacctgaggagggaagaaaaggagaaggacaaagtggagagggaggagatggagcaatctcttatgtgatcattccatcaactcacaaatttttcacctaacacctggttcaactgtaatgtgctcagctccgtataacctggacagcagctgtgccctcacccctaaactcagcaaaatattatggtcctctaatcaagagaattttgctcctgttactgcatgtcttgtgggttcatcgtcagaccagtgagttgataccaaacttcaccaaacggttctccggagcaaccgtttagaggaatcattaaccaatggcaacaggaatccaaggataaagtgatttccctcctgttaactcatctgcctttgctgaagccaggaaacctcgacgcgaaagtagaatatatgaaactgctgcccaaaatcctggctcactctattgaacacaaccagcacattgaggagagcaggcagctgctgtcctatgctttgatacatccagccacttcgttagaagaccgtagtgctttagccatgtggctgaatcacttggaggaccgcacgtcgaccagctttggtggccagaaccgaggccgctcagactctgtggattatggacagacacactactatcaccaaagacagaactctgatgacaagctcaatgggtggcagaactctcgggattctgggatttgcatcaatgcctccaactggcaggacaaaagcatggggtgtgagaatggccatgtgcccctctactcctcctcatctgtccccaccacaatcaatacgattggaaccagcacaagtacaaatgttccagcctggctgaaaagcctccgcctgcacaaatatgccgcgcttttctcccagatgacctatgaggagatgatggccctcaccgagtgccagctggaggcgcagaatgttaccaaaggtgcaagacacaaaattgtcatcagtattcagaagctcaaagaaagacaaaatctcctgaagtctttggaaagggacatcatcgaggggggcagcctgcgcatcccgctccaggaactgcaccagatgatcctgactccgatcaaggcctacagctccccgagcaccacccccgaggctcgccgccgggagccccaggccccgcgtcagccctcactgatgggccccgagagccagagccccgactgcaaagatggggccgcagccactggcgccacggccaccccctcggccggggccagcggggggctccagccgcaccagctgagcagctgcgatggggagctggccgtcgcccccctgccagagggggacctccccgggcagttcacacgcgtcatggggaaagtgtgcacacagctcttggtctccagacctgatgaggaaaatataagttcctatttacagctcatagacaagtgtctaattcatgaggcatttacagagacacagaaaaaaagattgttgtcatggaaacagcaggtgcagaagctctttcggtctttccctcggaaaacccttctagacatatcaggatatcgacagcaaagaaatcgaggctttgggcaatccaactccctcccgacggctggctctgtgggcggtggcatgggcagacggaacccgcgccagtaccagatcccctctcggaacgtcccttccgcccgcctgggcctcttgggcaccagtggattcgtcagctccaaccagcgcaacaccacagctacccccaccatcatgaaacaaggaagacagaacctgtggtttgccaaccccgggggcagcaatagcatgccaagccgcacccacagctcagtccagaggacccgctcgctgcccgtgcacacttccccacagaacatgctgatgttccagcagccagaattccagcttcccgtgaccgaacctgacatcaacaacaggctggagtcgttgtgcctcagtatgaccgaacacgccctgggagacggggttgaccggacctccaccatctagaagctgaagatgagagtgaccgcgctggccgtgaaatcgactgctgcgggtccagtgtccgccatcttcagggttgcacagaatcctccaagatactttgcagccttttttccccctggtccctctcccgttttgattttgtgagagcgtaggtcatcctcgtaaacatatcagtagacctggggttggttattttgtcatttgtttctgtcatgggatggtttggtgtgtggggtggggaggggtctctagggaattatgagactgggaggggggtggagggaatgcaggtagctctctggatggaacggggacaggggaaagagtactgccatgaaagagataggagacacataagaggacagcagaagccctggccctggggaggcttctcggaaggcctggcttcacaggcaggccacagaaggatatcgcgggcacgtgcacccaaagcaagatagtggcttcccttttatatccaatctaatcctgattggatgtccctgaggcccctgctggaaacagccataggagagggcccatggcagtaggggaaagaaggaagaaattccctgcaacaaaacttcagctaaactttgatttgtgtattgtttacataataattttaaagggtacataatgtgtaaagagtttggatagaacctctcttcatactatggttttcgtaaaggatctgttgttgttacggattcattttttccctctatttttataagagcagcagagttgtcttctcaaaacggctgccaagctctgcttcttgggaagatggatgcagtcatgtaggcctgagctgtccgtctttcaccgttaggtgggaggagcgtatgggtggacttgaaggacatggacgtggctggaatgagcacagcattgggtgagcgcacaaggatgaggacatcatgtgatcagttatgggtttgctcgcagggcacccagagattctcaaagaatcctgcagcctctttctgtgctggatttgcttgtcacggagaggcctccctccctttccaccccacccatggggcattatcctgtcactcccagccttgctccacacacacacaggtgggtacaagttccactggaggagaaaaggcaaggatggactttttccccttgtgagaggtttgatacccagaaaatgagctcaaaacctttacattagggttgcttgtaggaactggagcctggaggctgcatctacttcacctgtcactgctgagggagaggaggggagaaaggcccagcaacagcgtacagaggggtcagtcagcaagtccagagagcacatgcagggagatgtttggcccacaccgcacagccccgccatctccagtgggcgatgaaagatgtaggaaaggttgatttcaagatggaaatgacagcgctatccgcacagtatgaattagggatttgctgtgttagttgatttatccatccacacagaggggaggaaaaagacactcgttacttggtgggagattgagaaactgtggtacctaccacaaagtaatagctctgtttatgaagggcaagaaaggctacatttcagaatttgacacagtggagggtattagaggaaatcaaagaggagttgtgtggaaaatcaggttgtgtaaatgaaggtatgaatgctcagccagaggcaagatcagggagatggtacaaggcctgtttgttacatggatgagtcgggtgcctggttgtgtgtgtgtgtgtgtgtgtgtgtgtgtgtgtgtgaagtcagagttgaaattcagaagatcagactatggaaatcactgcccttttttttttaaaagctaatgaactacatacagacctaaaaggccttaatgaaatccgaacaattttcttttactttcaagatcaaaaacatgcacccaacccagccttggatgccaccaccaggtttttgaagcccttttgagtctaagaaggtgagaacaatgtaaccatagaaagcctttcgtgagcagagaaggcttgaatccacaatttcattcgctgaattaaaaaaaaaaggttcagacctctccttgggtgactaagttctaaagatgcaaatccatgtgcagaaagagatggcattttttagttgattatttttaaccaagtgccattaacattcatcccccacatcccttttctaaacaagcttagtgttacttggggaatgtgttgggatggacgatcacatgtaaggcaggaagaataggtcaaaggttgaaggccaaaggtaagaccagagggtttgcgaatgtgggtttgtaggatactgagaaagtgaataaagaggagaaaaaaccatggtattacacatcttgctgagaaaggaaagcattcggatctgctgcaaaaacacatatatccataaagactcatgttattcagaaaacagattgtgaacacaatcacattcgcatgaatcctttaaaaggaagaagaccttaaagtatctgcaaatctgaatttctatttattccttcactgaatatagaaacaatggttatctgattattagagatattattttggatatgttacttattaacttgctatggctggtaaccatgataaagtctgttattaataacaacataattctttttttaaagaagaaaagcttatttttcattgacagtgtatagatttatctacttagttgtgttttgctattagtgttttaattttttttttaagttgagtgtttgataaattttaagaccctgtccccaccttgttttgagtcctgtgttgactacaggtatatagctcaatttaaaaatcctaaagcaaaagaattttatttataaaagaatcaaacagttgcatgcatgaggctgtgaagtcagatatttagtaataaaagcagcagtgcctttttttgtatttacccattgacccccaccaaatgcaactgttttatattaagaaaatagtaacaattttaaaatctcagagtaaaatctatttcactacatgcttttccccccttgttctgatttaagcagtgtgtacttggcatctctacattgtcctagggacagtggtgttctacaatattatcatgtatgatgttttattggtgctttttattcatagtggcttcttaccagaaacagtaggaagaaacacatgaactgtgtacaagacatgaaacattgctgctgatatgttgttttttcacatgcttttgagttttcactttttaaacgagagccagcaagcaaaatagatgtggctgggtctgcctgtccgggcggctctttgcaccgagctctcaaatcctgtgtattgagggttcctttttggtactcaggattggagctacagctgggcccccctctctcccattcgtttgaagagacactgagggaaacaagggtttcttttgaggtgtccttggctgccttttacgggatgggagccttctccggatcttttgttcttctgcacctcttgtagctactgccggtgcaaggttgtagatgttattccccaggagcctgggctggggggctgagctgggctgaatgcaaaagcatgcaaccagaaggcgggcaaggggaggaaaagcaggcctggcctcattggtcccctggagatgtctgtagcagtcagctccagcttgggcctggggaagcagcctgaccaaggcgctcaggtgtgcctgttacaagaagaacctgcagaaggataatttgcacatggagctgtgataacactaatgttgattttttttttttttacaagtcatcagagatgtttgcaaagtgagttttatttttttgtaattcctttatctttacttaaaggtgaatgtgtattcctctgggaggaataggaagaaaacaggaatgttaataatgtcgaacagaaaacttcctcccttattaatatataatcctcatgtatttatgcctaatgtaagctgacttttaaaaagctttcttttgttgcatgccctgtgcaggcatctgtattgtacatgcatgcctttcgtcctgttttcctgtataaagttagtgaacaaagaaatatttttgcctagttcatgttgccaagcaatgcatattttttaaatttgtcatatatggaaagagcatgtttgttacatgtaaaagctttactgatatacagatatactaatgtttgaagatgctgttctttgcaagtgtacagttttcaaatgttgttaccagtgaaacacccttgtggtttaaacttgctacaatgtatttattattcatttcctcccatgtaactaagaatcatggctatatttcatatcaacgttatattgaaagtgaagggaaatgattaatacaaggttttgtaa

SEQ ID NO: 444777 - DNA, 6855 bp, Homo sapiens
actcaataatgatgagctgtgcccagtggacacctgaggagggaagaaaaggagaaggacaaagtggagagggaggagatggagcaatctcttatgtgatcattccatcaactcacaaatttttcacctaacacctggttcaactgtaatgtgctcagctccgtataacctggacagcagctgtgccctcacccctaaactcagcaaaatattatggtcctctaatcaagagaattttgctcctgttactgcatgtcttgtgggttcatcgtcagaccagtgagttgataccaaacttcaccaaacggttctccggagcaaccgtttagaggaatcattaaccaatggcaacaggaatccaaggataaagtgatttccctcctgttaactcatctgcctttgctgaagccaggaaacctcgacgcgaaagtagaatatatgaaactgctgcccaaaatcctggctcactctattgaacacaaccagcacattgaggagagcaggcagctgctgtcctatgctttgatacatccagccacttcgttagaagaccgtagtgctttagccatgtggctgaatcacttggaggaccgcacgtcgaccagctttggtggccagaaccgaggccgctcagactctgtggattatggacagacacactactatcaccaaagacagaactctgatgacaagctcaatgggtggcagaactctcgggattctgggatttgcatcaatgcctccaactggcaggacaaaagcatggggtgtgagaatggccatgtgcccctctactcctcctcatctgtccccaccacaatcaatacgattggaaccagcacaagtacaattctctcaggccaggcacaccacagccctttgaaacgatctgtgtcccttaccccacccatgaatgtgccaaaccagcctctaggacatggatggatgtctcatgaggacttacgagctagaggaccccagtgcctcccatccgatcatgcccccctgtctccacaaagcagtgtagcctcttcaggaagtggtgggagtgaacacttagaagatcagaccactgctcgtaacacattccaagaagaaggtagtgggatgaaagatgttccagcctggctgaaaagcctccgcctgcacaaatatgccgcgcttttctcccagatgacctatgaggagatgatggccctcaccgagtgccagctggaggcgcagaatgttaccaaaggtgcaagacacaaaattgtcatcagtattcagaagctcaaagaaagacaaaatctcctgaagtctttggaaagggacatcatcgaggggggcagcctgcgcatcccgctccaggaactgcaccagatgatcctgactccgatcaaggcctacagctccccgagcaccacccccgaggctcgccgccgggagccccaggccccgcgtcagccctcactgatgggccccgagagccagagccccgactgcaaagatggggccgcagccactggcgccacggccaccccctcggccggggccagcggggggctccagccgcaccagctgagcagctgcgatggggagctggccgtcgcccccctgccagagggggacctccccgggcagttcacacgcgtcatggggaaagtgtgcacacagctcttggtctccagacctgatgaggaaaatataagttcctatttacagctcatagacaagtgtctaattcatgaggcatttacagagacacagaaaaaaagattgttgtcatggaaacagcaggtgcagaagctctttcggtctttccctcggaaaacccttctagacatatcaggatatcgacagcaaagaaatcgaggctttgggcaatccaactccctcccgacggctggctctgtgggcggtggcatgggcagacggaacccgcgccagtaccagatcccctctcggaacgtcccttccgcccgcctgggcctcttgggcaccagtggattcgtcagctccaaccagcgcaacaccacagctacccccaccatcatgaaacaaggaagacagaacctgtggtttgccaaccccgggggcagcaatagcatgccaagccgcacccacagctcagtccagaggacccgctcgctgcccgtgcacacttccccacagaacatgctgatgttccagcagccaggttcccaagttcacagtggactgtgtttaacagaccttagaggttggttgagcctgagtggagccccttccatgccagcgctgacagtccccaagtcctcccagggaggtacaccagacctttctcctgaaggtggaaccaggtggcaccctgcttatctcctccttgtcaccaacataaccctttatcgcctgcagaattccagcttcccgtgaccgaacctgacatcaacaacaggctggagtcgttgtgcctcagtatgaccgaacacgccctgggagacggggttgaccggacctccaccatctagaagctgaagatgagagtgaccgcgctggccgtgaaatcgactgctgcgggtccagtgtccgccatcttcagggttgcacagaatcctccaagatactttgcagccttttttccccctggtccctctcccgttttgattttgtgagagcgtaggtcatcctcgtaaacatatcagtagacctggggttggttattttgtcatttgtttctgtcatgggatggtttggtgtgtggggtggggaggggtctctagggaattatgagactgggaggggggtggagggaatgcaggtagctctctggatggaacggggacaggggaaagagtactgccatgaaagagataggagacacataagaggacagcagaagccctggccctggggaggcttctcggaaggcctggcttcacaggcaggccacagaaggatatcgcgggcacgtgcacccaaagcaagatagtggcttcccttttatatccaatctaatcctgattggatgtccctgaggcccctgctggaaacagccataggagagggcccatggcagtaggggaaagaaggaagaaattccctgcaacaaaacttcagctaaactttgatttgtgtattgtttacataataattttaaagggtacataatgtgtaaagagtttggatagaacctctcttcatactatggttttcgtaaaggatctgttgttgttacggattcattttttccctctatttttataagagcagcagagttgtcttctcaaaacggctgccaagctctgcttcttgggaagatggatgcagtcatgtaggcctgagctgtccgtctttcaccgttaggtgggaggagcgtatgggtggacttgaaggacatggacgtggctggaatgagcacagcattgggtgagcgcacaaggatgaggacatcatgtgatcagttatgggtttgctcgcagggcacccagagattctcaaagaatcctgcagcctctttctgtgctggatttgcttgtcacggagaggcctccctccctttccaccccacccatggggcattatcctgtcactcccagccttgctccacacacacacaggtgggtacaagttccactggaggagaaaaggcaaggatggactttttccccttgtgagaggtttgatacccagaaaatgagctcaaaacctttacattagggttgcttgtaggaactggagcctggaggctgcatctacttcacctgtcactgctgagggagaggaggggagaaaggcccagcaacagcgtacagaggggtcagtcagcaagtccagagagcacatgcagggagatgtttggcccacaccgcacagccccgccatctccagtgggcgatgaaagatgtaggaaaggttgatttcaagatggaaatgacagcgctatccgcacagtatgaattagggatttgctgtgttagttgatttatccatccacacagaggggaggaaaaagacactcgttacttggtgggagattgagaaactgtggtacctaccacaaagtaatagctctgtttatgaagggcaagaaaggctacatttcagaatttgacacagtggagggtattagaggaaatcaaagaggagttgtgtggaaaatcaggttgtgtaaatgaaggtatgaatgctcagccagaggcaagatcagggagatggtacaaggcctgtttgttacatggatgagtcgggtgcctggttgtgtgtgtgtgtgtgtgtgtgtgtgtgtgtgtgtgaagtcagagttgaaattcagaagatcagactatggaaatcactgcccttttttttttaaaagctaatgaactacatacagacctaaaaggccttaatgaaatccgaacaattttcttttactttcaagatcaaaaacatgcacccaacccagccttggatgccaccaccaggtttttgaagcccttttgagtctaagaaggtgagaacaatgtaaccatagaaagcctttcgtgagcagagaaggcttgaatccacaatttcattcgctgaattaaaaaaaaaaggttcagacctctccttgggtgactaagttctaaagatgcaaatccatgtgcagaaagagatggcattttttagttgattatttttaaccaagtgccattaacattcatcccccacatcccttttctaaacaagcttagtgttacttggggaatgtgttgggatggacgatcacatgtaaggcaggaagaataggtcaaaggttgaaggccaaaggtaagaccagagggtttgcgaatgtgggtttgtaggatactgagaaagtgaataaagaggagaaaaaaccatggtattacacatcttgctgagaaaggaaagcattcggatctgctgcaaaaacacatatatccataaagactcatgttattcagaaaacagattgtgaacacaatcacattcgcatgaatcctttaaaaggaagaagaccttaaagtatctgcaaatctgaatttctatttattccttcactgaatatagaaacaatggttatctgattattagagatattattttggatatgttacttattaacttgctatggctggtaaccatgataaagtctgttattaataacaacataattctttttttaaagaagaaaagcttatttttcattgacagtgtatagatttatctacttagttgtgttttgctattagtgttttaattttttttttaagttgagtgtttgataaattttaagaccctgtccccaccttgttttgagtcctgtgttgactacaggtatatagctcaatttaaaaatcctaaagcaaaagaattttatttataaaagaatcaaacagttgcatgcatgaggctgtgaagtcagatatttagtaataaaagcagcagtgcctttttttgtatttacccattgacccccaccaaatgcaactgttttatattaagaaaatagtaacaattttaaaatctcagagtaaaatctatttcactacatgcttttccccccttgttctgatttaagcagtgtgtacttggcatctctacattgtcctagggacagtggtgttctacaatattatcatgtatgatgttttattggtgctttttattcatagtggcttcttaccagaaacagtaggaagaaacacatgaactgtgtacaagacatgaaacattgctgctgatatgttgttttttcacatgcttttgagttttcactttttaaacgagagccagcaagcaaaatagatgtggctgggtctgcctgtccgggcggctctttgcaccgagctctcaaatcctgtgtattgagggttcctttttggtactcaggattggagctacagctgggcccccctctctcccattcgtttgaagagacactgagggaaacaagggtttcttttgaggtgtccttggctgccttttacgggatgggagccttctccggatcttttgttcttctgcacctcttgtagctactgccggtgcaaggttgtagatgttattccccaggagcctgggctggggggctgagctgggctgaatgcaaaagcatgcaaccagaaggcgggcaaggggaggaaaagcaggcctggcctcattggtcccctggagatgtctgtagcagtcagctccagcttgggcctggggaagcagcctgaccaaggcgctcaggtgtgcctgttacaagaagaacctgcagaaggataatttgcacatggagctgtgataacactaatgttgattttttttttttttacaagtcatcagagatgtttgcaaagtgagttttatttttttgtaattcctttatctttacttaaaggtgaatgtgtattcctctgggaggaataggaagaaaacaggaatgttaataatgtcgaacagaaaacttcctcccttattaatatataatcctcatgtatttatgcctaatgtaagctgacttttaaaaagctttcttttgttgcatgccctgtgcaggcatctgtattgtacatgcatgcctttcgtcctgttttcctgtataaagttagtgaacaaagaaatatttttgcctagttcatgttgccaagcaatgcatattttttaaatttgtcatatatggaaagagcatgtttgttacatgtaaaagctttactgatatacagatatactaatgtttgaagatgctgttctttgcaagtgtacagttttcaaatgttgttaccagtgaaacacccttgtggtttaaacttgctacaatgtatttattattcatttcctcccatgtaactaagaatcatggctatatttcatatcaacgttatattgaaagtgaagggaaatgattaatacaaggttttgtaa

SEQ ID NO: 444778 - DNA, 6766 bp, Homo sapiens
actcaataatgatgagctgtgcccagtggacacctgaggagggaagaaaaggagaaggacaaagtggagagggaggagatggagcaatctcttatgtgatcattccatcaactcacaaatttttcacctaacacctggttcaactgtaatgtgctcagctccgtataacctggacagcagctgtgccctcacccctaaactcagcaaaatattatggtcctctaatcaagagaattttgctcctgttactgcatgtcttgtgggttcatcgtcagaccagtgagttgataccaaacttcaccaaacggttctccggagcaaccgtttagaggaatcattaaccaatggcaacaggaatccaaggataaagtgatttccctcctgttaactcatctgcctttgctgaagccaggaaacctcgacgcgaaagtagaatatatgaaactgctgcccaaaatcctggctcactctattgaacacaaccagcacattgaggagagcaggcagctgctgtcctatgctttgatacatccagccacttcgttagaagaccgtagtgctttagccatgtggctgaatcacttggaggaccgcacgtcgaccagctttggtggccagaaccgaggccgctcagactctgtggattatggacagacacactactatcaccaaagacagaactctgatgacaagctcaatgggtggcagaactctcgggattctgggatttgcatcaatgcctccaactggcaggacaaaagcatggggtgtgagaatggccatgtgcccctctactcctcctcatctgtccccaccacaatcaatacgattggaaccagcacaagtacaattctctcaggccaggcacaccacagccctttgaaacgatctgtgtcccttaccccacccatgaatgtgccaaaccagcctctaggacatggatggatgtctcatgaggacttacgagctagaggaccccagtgcctcccatccgatcatgcccccctgtctccacaaagcagtgtagcctcttcaggaagtggtgggagtgaacacttagaagatcagaccactgctcgtaacacattccaagaagaaggtagtgggatgaaagatgttccagcctggctgaaaagcctccgcctgcacaaatatgccgcgcttttctcccagatgacctatgaggagatgatggccctcaccgagtgccagctggaggcgcagaatgttaccaaaggtgcaagacacaaaattgtcatcagtattcagaagctcaaagaaagacaaaatctcctgaagtctttggaaagggacatcatcgaggggggcagcctgcgcatcccgctccaggaactgcaccagatgatcctgactccgatcaaggcctacagctccccgagcaccacccccgaggctcgccgccgggagccccaggccccgcgtcagccctcactgatgggccccgagagccagagccccgactgcaaagatggggccgcagccactggcgccacggccaccccctcggccggggccagcggggggctccagccgcaccagctgagcagctgcgatggggagctggccgtcgcccccctgccagagggggacctccccgggcagttcacacgcgtcatggggaaagtgtgcacacagctcttggtctccagacctgatgaggaaaatataagttcctatttacagctcatagacaagtgtctaattcatgaggcatttacagagacacagaaaaaaagattgttgtcatggaaacagcaggtgcagaagctctttcggtctttccctcggaaaacccttctagacatatcaggatatcgacagcaaagaaatcgaggctttgggcaatccaactccctcccgacggctggctctgtgggcggtggcatgggcagacggaacccgcgccagtaccagatcccctctcggaacgtcccttccgcccgcctgggcctcttgggcaccagtggattcgtcagctccaaccagcgcaacaccacagctacccccaccatcatgaaacaaggaagacagaacctgtggtttgccaaccccgggggcagcaatagcatgccaagccgcacccacagctcagtccagaggacccgctcgctgcccgtgcacacttccccacagaacatgctgatgttccagcagccaggttcccaagttcacagtggactgtgtttaacagaccttagaggttggttgagcctgagtggagccccttccatgccagcgctgacagtccccaagtcctcccagggagaattccagcttcccgtgaccgaacctgacatcaacaacaggctggagtcgttgtgcctcagtatgaccgaacacgccctgggagacggggttgaccggacctccaccatctagaagctgaagatgagagtgaccgcgctggccgtgaaatcgactgctgcgggtccagtgtccgccatcttcagggttgcacagaatcctccaagatactttgcagccttttttccccctggtccctctcccgttttgattttgtgagagcgtaggtcatcctcgtaaacatatcagtagacctggggttggttattttgtcatttgtttctgtcatgggatggtttggtgtgtggggtggggaggggtctctagggaattatgagactgggaggggggtggagggaatgcaggtagctctctggatggaacggggacaggggaaagagtactgccatgaaagagataggagacacataagaggacagcagaagccctggccctggggaggcttctcggaaggcctggcttcacaggcaggccacagaaggatatcgcgggcacgtgcacccaaagcaagatagtggcttcccttttatatccaatctaatcctgattggatgtccctgaggcccctgctggaaacagccataggagagggcccatggcagtaggggaaagaaggaagaaattccctgcaacaaaacttcagctaaactttgatttgtgtattgtttacataataattttaaagggtacataatgtgtaaagagtttggatagaacctctcttcatactatggttttcgtaaaggatctgttgttgttacggattcattttttccctctatttttataagagcagcagagttgtcttctcaaaacggctgccaagctctgcttcttgggaagatggatgcagtcatgtaggcctgagctgtccgtctttcaccgttaggtgggaggagcgtatgggtggacttgaaggacatggacgtggctggaatgagcacagcattgggtgagcgcacaaggatgaggacatcatgtgatcagttatgggtttgctcgcagggcacccagagattctcaaagaatcctgcagcctctttctgtgctggatttgcttgtcacggagaggcctccctccctttccaccccacccatggggcattatcctgtcactcccagccttgctccacacacacacaggtgggtacaagttccactggaggagaaaaggcaaggatggactttttccccttgtgagaggtttgatacccagaaaatgagctcaaaacctttacattagggttgcttgtaggaactggagcctggaggctgcatctacttcacctgtcactgctgagggagaggaggggagaaaggcccagcaacagcgtacagaggggtcagtcagcaagtccagagagcacatgcagggagatgtttggcccacaccgcacagccccgccatctccagtgggcgatgaaagatgtaggaaaggttgatttcaagatggaaatgacagcgctatccgcacagtatgaattagggatttgctgtgttagttgatttatccatccacacagaggggaggaaaaagacactcgttacttggtgggagattgagaaactgtggtacctaccacaaagtaatagctctgtttatgaagggcaagaaaggctacatttcagaatttgacacagtggagggtattagaggaaatcaaagaggagttgtgtggaaaatcaggttgtgtaaatgaaggtatgaatgctcagccagaggcaagatcagggagatggtacaaggcctgtttgttacatggatgagtcgggtgcctggttgtgtgtgtgtgtgtgtgtgtgtgtgtgtgtgtgtgaagtcagagttgaaattcagaagatcagactatggaaatcactgcccttttttttttaaaagctaatgaactacatacagacctaaaaggccttaatgaaatccgaacaattttcttttactttcaagatcaaaaacatgcacccaacccagccttggatgccaccaccaggtttttgaagcccttttgagtctaagaaggtgagaacaatgtaaccatagaaagcctttcgtgagcagagaaggcttgaatccacaatttcattcgctgaattaaaaaaaaaaggttcagacctctccttgggtgactaagttctaaagatgcaaatccatgtgcagaaagagatggcattttttagttgattatttttaaccaagtgccattaacattcatcccccacatcccttttctaaacaagcttagtgttacttggggaatgtgttgggatggacgatcacatgtaaggcaggaagaataggtcaaaggttgaaggccaaaggtaagaccagagggtttgcgaatgtgggtttgtaggatactgagaaagtgaataaagaggagaaaaaaccatggtattacacatcttgctgagaaaggaaagcattcggatctgctgcaaaaacacatatatccataaagactcatgttattcagaaaacagattgtgaacacaatcacattcgcatgaatcctttaaaaggaagaagaccttaaagtatctgcaaatctgaatttctatttattccttcactgaatatagaaacaatggttatctgattattagagatattattttggatatgttacttattaacttgctatggctggtaaccatgataaagtctgttattaataacaacataattctttttttaaagaagaaaagcttatttttcattgacagtgtatagatttatctacttagttgtgttttgctattagtgttttaattttttttttaagttgagtgtttgataaattttaagaccctgtccccaccttgttttgagtcctgtgttgactacaggtatatagctcaatttaaaaatcctaaagcaaaagaattttatttataaaagaatcaaacagttgcatgcatgaggctgtgaagtcagatatttagtaataaaagcagcagtgcctttttttgtatttacccattgacccccaccaaatgcaactgttttatattaagaaaatagtaacaattttaaaatctcagagtaaaatctatttcactacatgcttttccccccttgttctgatttaagcagtgtgtacttggcatctctacattgtcctagggacagtggtgttctacaatattatcatgtatgatgttttattggtgctttttattcatagtggcttcttaccagaaacagtaggaagaaacacatgaactgtgtacaagacatgaaacattgctgctgatatgttgttttttcacatgcttttgagttttcactttttaaacgagagccagcaagcaaaatagatgtggctgggtctgcctgtccgggcggctctttgcaccgagctctcaaatcctgtgtattgagggttcctttttggtactcaggattggagctacagctgggcccccctctctcccattcgtttgaagagacactgagggaaacaagggtttcttttgaggtgtccttggctgccttttacgggatgggagccttctccggatcttttgttcttctgcacctcttgtagctactgccggtgcaaggttgtagatgttattccccaggagcctgggctggggggctgagctgggctgaatgcaaaagcatgcaaccagaaggcgggcaaggggaggaaaagcaggcctggcctcattggtcccctggagatgtctgtagcagtcagctccagcttgggcctggggaagcagcctgaccaaggcgctcaggtgtgcctgttacaagaagaacctgcagaaggataatttgcacatggagctgtgataacactaatgttgattttttttttttttacaagtcatcagagatgtttgcaaagtgagttttatttttttgtaattcctttatctttacttaaaggtgaatgtgtattcctctgggaggaataggaagaaaacaggaatgttaataatgtcgaacagaaaacttcctcccttattaatatataatcctcatgtatttatgcctaatgtaagctgacttttaaaaagctttcttttgttgcatgccctgtgcaggcatctgtattgtacatgcatgcctttcgtcctgttttcctgtataaagttagtgaacaaagaaatatttttgcctagttcatgttgccaagcaatgcatattttttaaatttgtcatatatggaaagagcatgtttgttacatgtaaaagctttactgatatacagatatactaatgtttgaagatgctgttctttgcaagtgtacagttttcaaatgttgttaccagtgaaacacccttgtggtttaaacttgctacaatgtatttattattcatttcctcccatgtaactaagaatcatggctatatttcatatcaacgttatattgaaagtgaagggaaatgattaatacaaggttttgtaa

SEQ ID NO: 444779 - DNA, 5654 bp, Homo sapiens
atcagtggtggctgtctgagttctgtgtgcagagctcttttgttcagttactgaacccttatcaagcagctgcctgggactcaatttgccccatccattggagattaaccgacatcatcgaggggggcagcctgcgcatcccgctccaggaactgcaccagatgatcctgactccgatcaaggcctacagctccccgagcaccacccccgaggctcgccgccgggagccccaggccccgcgtcagccctcactgatgggccccgagagccagagccccgactgcaaagatggggccgcagccactggcgccacggccaccccctcggccggggccagcggggggctccagccgcaccagctgagcagctgcgatggggagctggccgtcgcccccctgccagagggggacctccccgggcagttcacacgcgtcatggggaaagtgtgcacacagctcttggtctccagacctgatgaggaaaatataagttcctatttacagctcatagacaagtgtctaattcatgaggcatttacagagacacagaaaaaaagattgttgtcatggaaacagcaggtgcagaagctctttcggtctttccctcggaaaacccttctagacatatcaggatatcgacagcaaagaaatcgaggctttgggcaatccaactccctcccgacggctggctctgtgggcggtggcatgggcagacggaacccgcgccagtaccagatcccctctcggaacgtcccttccgcccgcctgggcctcttgggcaccagtggattcgtcagctccaaccagcgcaacaccacagctacccccaccatcatgaaacaaggaagacagaacctgtggtttgccaaccccgggggcagcaatagcatgccaagccgcacccacagctcagtccagaggacccgctcgctgcccgtgcacacttccccacagaacatgctgatgttccagcagccaggttcccaagttcacagtggactgtgtttaacagaccttagaggttggttgagcctgagtggagccccttccatgccagcgctgacagtccccaagtcctcccagggaggtacaccagacctttctcctgaaggtggaaccaggtggcaccctgcttatctcctccttgtcaccaacataaccctttatcgcctgcagaattccagcttcccgtgaccgaacctgacatcaacaacaggctggagtcgttgtgcctcagtatgaccgaacacgccctgggagacggggttgaccggacctccaccatctagaagctgaagatgagagtgaccgcgctggccgtgaaatcgactgctgcgggtccagtgtccgccatcttcagggttgcacagaatcctccaagatactttgcagccttttttccccctggtccctctcccgttttgattttgtgagagcgtaggtcatcctcgtaaacatatcagtagacctggggttggttattttgtcatttgtttctgtcatgggatggtttggtgtgtggggtggggaggggtctctagggaattatgagactgggaggggggtggagggaatgcaggtagctctctggatggaacggggacaggggaaagagtactgccatgaaagagataggagacacataagaggacagcagaagccctggccctggggaggcttctcggaaggcctggcttcacaggcaggccacagaaggatatcgcgggcacgtgcacccaaagcaagatagtggcttcccttttatatccaatctaatcctgattggatgtccctgaggcccctgctggaaacagccataggagagggcccatggcagtaggggaaagaaggaagaaattccctgcaacaaaacttcagctaaactttgatttgtgtattgtttacataataattttaaagggtacataatgtgtaaagagtttggatagaacctctcttcatactatggttttcgtaaaggatctgttgttgttacggattcattttttccctctatttttataagagcagcagagttgtcttctcaaaacggctgccaagctctgcttcttgggaagatggatgcagtcatgtaggcctgagctgtccgtctttcaccgttaggtgggaggagcgtatgggtggacttgaaggacatggacgtggctggaatgagcacagcattgggtgagcgcacaaggatgaggacatcatgtgatcagttatgggtttgctcgcagggcacccagagattctcaaagaatcctgcagcctctttctgtgctggatttgcttgtcacggagaggcctccctccctttccaccccacccatggggcattatcctgtcactcccagccttgctccacacacacacaggtgggtacaagttccactggaggagaaaaggcaaggatggactttttccccttgtgagaggtttgatacccagaaaatgagctcaaaacctttacattagggttgcttgtaggaactggagcctggaggctgcatctacttcacctgtcactgctgagggagaggaggggagaaaggcccagcaacagcgtacagaggggtcagtcagcaagtccagagagcacatgcagggagatgtttggcccacaccgcacagccccgccatctccagtgggcgatgaaagatgtaggaaaggttgatttcaagatggaaatgacagcgctatccgcacagtatgaattagggatttgctgtgttagttgatttatccatccacacagaggggaggaaaaagacactcgttacttggtgggagattgagaaactgtggtacctaccacaaagtaatagctctgtttatgaagggcaagaaaggctacatttcagaatttgacacagtggagggtattagaggaaatcaaagaggagttgtgtggaaaatcaggttgtgtaaatgaaggtatgaatgctcagccagaggcaagatcagggagatggtacaaggcctgtttgttacatggatgagtcgggtgcctggttgtgtgtgtgtgtgtgtgtgtgtgtgtgtgtgtgtgaagtcagagttgaaattcagaagatcagactatggaaatcactgcccttttttttttaaaagctaatgaactacatacagacctaaaaggccttaatgaaatccgaacaattttcttttactttcaagatcaaaaacatgcacccaacccagccttggatgccaccaccaggtttttgaagcccttttgagtctaagaaggtgagaacaatgtaaccatagaaagcctttcgtgagcagagaaggcttgaatccacaatttcattcgctgaattaaaaaaaaaaggttcagacctctccttgggtgactaagttctaaagatgcaaatccatgtgcagaaagagatggcattttttagttgattatttttaaccaagtgccattaacattcatcccccacatcccttttctaaacaagcttagtgttacttggggaatgtgttgggatggacgatcacatgtaaggcaggaagaataggtcaaaggttgaaggccaaaggtaagaccagagggtttgcgaatgtgggtttgtaggatactgagaaagtgaataaagaggagaaaaaaccatggtattacacatcttgctgagaaaggaaagcattcggatctgctgcaaaaacacatatatccataaagactcatgttattcagaaaacagattgtgaacacaatcacattcgcatgaatcctttaaaaggaagaagaccttaaagtatctgcaaatctgaatttctatttattccttcactgaatatagaaacaatggttatctgattattagagatattattttggatatgttacttattaacttgctatggctggtaaccatgataaagtctgttattaataacaacataattctttttttaaagaagaaaagcttatttttcattgacagtgtatagatttatctacttagttgtgttttgctattagtgttttaattttttttttaagttgagtgtttgataaattttaagaccctgtccccaccttgttttgagtcctgtgttgactacaggtatatagctcaatttaaaaatcctaaagcaaaagaattttatttataaaagaatcaaacagttgcatgcatgaggctgtgaagtcagatatttagtaataaaagcagcagtgcctttttttgtatttacccattgacccccaccaaatgcaactgttttatattaagaaaatagtaacaattttaaaatctcagagtaaaatctatttcactacatgcttttccccccttgttctgatttaagcagtgtgtacttggcatctctacattgtcctagggacagtggtgttctacaatattatcatgtatgatgttttattggtgctttttattcatagtggcttcttaccagaaacagtaggaagaaacacatgaactgtgtacaagacatgaaacattgctgctgatatgttgttttttcacatgcttttgagttttcactttttaaacgagagccagcaagcaaaatagatgtggctgggtctgcctgtccgggcggctctttgcaccgagctctcaaatcctgtgtattgagggttcctttttggtactcaggattggagctacagctgggcccccctctctcccattcgtttgaagagacactgagggaaacaagggtttcttttgaggtgtccttggctgccttttacgggatgggagccttctccggatcttttgttcttctgcacctcttgtagctactgccggtgcaaggttgtagatgttattccccaggagcctgggctggggggctgagctgggctgaatgcaaaagcatgcaaccagaaggcgggcaaggggaggaaaagcaggcctggcctcattggtcccctggagatgtctgtagcagtcagctccagcttgggcctggggaagcagcctgaccaaggcgctcaggtgtgcctgttacaagaagaacctgcagaaggataatttgcacatggagctgtgataacactaatgttgattttttttttttttacaagtcatcagagatgtttgcaaagtgagttttatttttttgtaattcctttatctttacttaaaggtgaatgtgtattcctctgggaggaataggaagaaaacaggaatgttaataatgtcgaacagaaaacttcctcccttattaatatataatcctcatgtatttatgcctaatgtaagctgacttttaaaaagctttcttttgttgcatgccctgtgcaggcatctgtattgtacatgcatgcctttcgtcctgttttcctgtataaagttagtgaacaaagaaatatttttgcctagttcatgttgccaagcaatgcatattttttaaatttgtcatatatggaaagagcatgtttgttacatgtaaaagctttactgatatacagatatactaatgtttgaagatgctgttctttgcaagtgtacagttttcaaatgttgttaccagtgaaacacccttgtggtttaaacttgctacaatgtatttattattcatttcctcccatgtaactaagaatcatggctatatttcatatcaacgttatattgaaagtgaagggaaatgattaatacaaggttttgtaa

SEQ ID NO: 444780 - DNA, 7064 bp, Homo sapiens
actcaataatgatgagctgtgcccagtggacacctgaggagggaagaaaaggagaaggacaaagtggagagggaggagatggagcaatctcttatgtgatcattccatcaactcacaaatttttcacctaacacctggttcaactgtaatgtgctcagctccgtataacctggacagcagctgtgccctcacccctaaactcagcaaaatattatggtcctctaatcaagagaattttgctcctgttactgcatgtcttgtgggttcatcgtcagaccagtgagttgataccaaacttcaccaaacggttctccggagcaaccgtttagaggaatcattaaccaatggcaacaggaatccaaggataaagtgatttccctcctgttaactcatctgcctttgctgaagccaggaaacctcgacgcgaaagtagaatatatgaaactgctgcccaaaatcctggctcactctattgaacacaaccagcacattgaggagagcaggcagctgctgtcctatgctttgatacatccagccacttcgttagaagaccgtagtgctttagccatgtggctgaatcacttggaggaccgcacgtcgaccagctttggtggccagaaccgaggccgctcagactctgtggattatggacagacacactactatcaccaaagacagaactctgatgacaagctcaatgggtggcagaactctcgggattctgggatttgcatcaatgcctccaactggcaggacaaaagcatggggtgtgagaatggccatgtgcccctctactcctcctcatctgtccccaccacaatcaatacgattggaaccagcacaagtacaaatgttccagcctggctgaaaagcctccgcctgcacaaatatgccgcgcttttctcccagatgacctatgaggagatgatggccctcaccgagtgccagctggaggcgcagaatgttaccaaaggtgcaagacacaaaattgtcatcagtattcagaagctcaaagaaagacaaaatctcctgaagtctttggaaagggacatcatcgaggggggcagcctgcgcatcccgctccaggaactgcaccagatgatcctgactccgatcaaggcctacagctccccgagcaccacccccgaggctcgccgccgggagccccaggccccgcgtcagccctcactgatgggccccgagagccagagccccgactgcaaagatggggccgcagccactggcgccacggccaccccctcggccggggccagcggggggctccagccgcaccagctgagcagctgcgatggggagctggccgtcgcccccctgccagagggggacctccccgggcagttcacacgcgtcatggggaaagtgtgcacacagctcttggtctccagacctgatgaggaaaatataagttcctatttacagctcatagacaagtgtctaattcatgaggcatttacagagacacagaaaaaaagattgttgtcatggaaacagcaggtgcagaagctctttcggtctttccctcggaaaacccttctagacatatcaggatatcgacagcaaagaaatcgaggctttgggcaatccaactccctcccgacggctggctctgtgggcggtggcatgggcagacggaacccgcgccagtaccagatcccctctcggaacgtcccttccgcccgcctgggcctcttgggcaccagtggattcgtcagctccaaccagcgcaacaccacagctacccccaccatcatgaaacaaggaagacagaacctgtggtttgccaaccccgggggcagcaatagcatgccaagccgcacccacagctcagtccagaggacccgctcgctgcccgtgcacacttccccacagaacatgctgatgttccagcagccagaattccagcttcccgtgaccgaacctgacatcaacaacaggctggagtcgttgtgcctcagtatgaccgaacacgccctgggagacggggttgaccggacctccaccatctagaagctgaagatgagagtgaccgcgctggccgtgaaatcgactgctgcgggtccagtgtccgccatcttcagggttgcacagaatcctccaagatactttgcagccttttttccccctggtccctctcccgttttgattttgtgagagcgtaggtcatcctcgtaaacatatcagtagacctggggttggttattttgtcatttgtttctgtcatgggatggtttggtgtgtggggtggggaggggtctctagggaattatgagactgggaggggggtggagggaatgcaggtagctctctggatggaacggggacaggggaaagagtactgccatgaaagagataggagacacataagaggacagcagaagccctggccctggggaggcttctcggaaggcctggcttcacaggcaggccacagaaggatatcgcgggcacgtgcacccaaagcaagatagtggcttcccttttatatccaatctaatcctgattggatgtccctgaggcccctgctggaaacagccataggagagggcccatggcagtaggggaaagaaggaagaaattccctgcaacaaaacttcagctaaactttgatttgtgtattgtttacataataattttaaagggtacataatgtgtaaagagtttggatagaacctctcttcatactatggttttcgtaaaggatctgttgttgttacggattcattttttccctctatttttataagagcagcagagttgtcttctcaaaacggctgccaagctctgcttcttgggaagatggatgcagtcatgtaggcctgagctgtccgtctttcaccgttaggtgggaggagcgtatgggtggacttgaaggacatggacgtggctggaatgagcacagcattgggtgagcgcacaaggatgaggacatcatgtgatcagttatgggtttgctcgcagggcacccagagattctcaaagaatcctgcagcctctttctgtgctggatttgcttgtcacggagaggcctccctccctttccaccccacccatggggcattatcctgtcactcccagccttgctccacacacacacaggtgggtacaagttccactggaggagaaaaggcaaggatggactttttccccttgtgagaggtttgatacccagaaaatgagctcaaaacctttacattagggttgcttgtaggaactggagcctggaggctgcatctacttcacctgtcactgctgagggagaggaggggagaaaggcccagcaacagcgtacagaggggtcagtcagcaagtccagagagcacatgcagggagatgtttggcccacaccgcacagccccgccatctccagtgggcgatgaaagatgtaggaaaggttgatttcaagatggaaatgacagcgctatccgcacagtatgaattagggatttgctgtgttagttgatttatccatccacacagaggggaggaaaaagacactcgttacttggtgggagattgagaaactgtggtacctaccacaaagtaatagctctgtttatgaagggcaagaaaggctacatttcagaatttgacacagtggagggtattagaggaaatcaaagaggagttgtgtggaaaatcaggttgtgtaaatgaaggtatgaatgctcagccagaggcaagatcagggagatggtacaaggcctgtttgttacatggatgagtcgggtgcctggttgtgtgtgtgtgtgtgtgtgtgtgtgtgtgtgtgtgaagtcagagttgaaattcagaagatcagactatggaaatcactgcccttttttttttaaaagctaatgaactacatacagacctaaaaggccttaatgaaatccgaacaattttcttttactttcaagatcaaaaacatgcacccaacccagccttggatgccaccaccaggtttttgaagcccttttgagtctaagaaggtgagaacaatgtaaccatagaaagcctttcgtgagcagagaaggcttgaatccacaatttcattcgctgaattaaaaaaaaaaggttcagacctctccttgggtgactaagttctaaagatgcaaatccatgtgcagaaagagatggcattttttagttgattatttttaaccaagtgccattaacattcatcccccacatcccttttctaaacaagcttagtgttacttggggaatgtgttgggatggacgatcacatgtaaggcaggaagaataggtcaaaggttgaaggccaaaggtaagaccagagggtttgcgaatgtgggtttgtaggatactgagaaagtgaataaagaggagaaaaaaccatggtattacacatcttgctgagaaaggaaagcattcggatctgctgcaaaaacacatatatccataaagactcatgttattcagaaaacagattgtgaacacaatcacattcgcatgaatcctttaaaaggaagaagaccttaaagtatctgcaaatctgaatttctatttattccttcactgaatatagaaacaatggttatctgattattagagatattattttggatatgttacttattaacttgctatggctggtaaccatgataaagtctgttattaataacaacataattctttttttaaagaagaaaagcttatttttcattgacagtgtatagatttatctacttagttgtgttttgctattagtgttttaattttttttttaagttgagtgtttgataaattttaagaccctgtccccaccttgttttgagtcctgtgttgactacaggtatatagctcaatttaaaaatcctaaagcaaaagaattttatttataaaagaatcaaacagttgcatgcatgaggctgtgaagtcagatatttagtaataaaagcagcagtgcctttttttgtatttacccattgacccccaccaaatgcaactgttttatattaagaaaatagtaacaattttaaaatctcagagtaaaatctatttcactacatgcttttccccccttgttctgatttaagcagtgtgtacttggcatctctacattgtcctagggacagtggtgttctacaatattatcatgtatgatgttttattggtgctttttattcatagtggcttcttaccagaaacagtaggaagaaacacatgaactgtgtacaagacatgaaacattgctgctgatatgttgttttttcacatgcttttgagttttcactttttaaacgagagccagcaagcaaaatagatgtggctgggtctgcctgtccgggcggctctttgcaccgagctctcaaatcctgtgtattgagggttcctttttggtactcaggattggagctacagctgggcccccctctctcccattcgtttgaagagacactgagggaaacaagggtttcttttgaggtgtccttggctgccttttacgggatgggagccttctccggatcttttgttcttctgcacctcttgtagctactgccggtgcaaggttgtagatgttattccccaggagcctgggctggggggctgagctgggctgaatgcaaaagcatgcaaccagaaggcgggcaaggggaggaaaagcaggcctggcctcattggtcccctggagatgtctgtagcagtcagctccagcttgggcctggggaagcagcctgaccaaggcgctcaggtgtgcctgttacaagaagaacctgcagaaggataatttgcacatggagctgtgataacactaatgttgattttttttttttttacaagtcatcagagatgtttgcaaagtgagttttatttttttgtaattcctttatctttacttaaaggtgaatgtgtattcctctgggaggaataggaagaaaacaggaatgttaataatgtcgaacagaaaacttcctcccttattaatatataatcctcatgtatttatgcctaatgtaagctgacttttaaaaagctttcttttgttgcatgccctgtgcaggcatctgtattgtacatgcatgcctttcgtcctgttttcctgtataaagttagtgaacaaagaaatatttttgcctagttcatgttgccaagcaatgcatattttttaaatttgtcatatatggaaagagcatgtttgttacatgtaaaagctttactgatatacagatatactaatgtttgaagatgctgttctttgcaagtgtacagttttcaaatgttgttaccagtgaaacacccttgtggtttaaacttgctacaatgtatttattattcatttcctcccatgtaactaagaatcatggctatatttcatatcaacgttatattgaaagtgaagggaaatgattaatacaaggttttgtaaaaaaaaaaaaaaaaaaaaaaaaaaaaaaaaaaaaaaaaaaaaaaaaaaaaaaaaaaaaaaaaaaaaaaaaaaaaaaaaaaaaaaaaaaaaacaaaaaaccaaagaggggggcgcgggccgcacaattacttatctctcccacgcgagggcagcggcacaaactactcgcaccacccgaacttttatatagaagagagagccggaccaccaccaagtagtgaaggtagtgtattaaaaaacaagaacacgagccgcggggcttgtaaacataaaacgcgtcgagggaggaagaacccctggctacactgacgctagtcagtgagagacgacaactatggggtgggggtagacatacgacgagggaagccacccacccaaagaagagaacagtacacgccgcctcagcggcacgactaaacacacatcgccaaggtgagacaggggtgaggcaccaccaagcacgaatgtagctggccgccggagtaaaaaaagcagtgcccaaagagcgaaattaatacatcagaacacaaaaaaaaaccagccggacaggagtaggacaagaacaaagcatcatcaaaaccatcgaccacagccacagccccacaaccaaacccacccgcgcccaaccggcagcaccaaaccccaagcaccgccccccaaccccacccac

SEQ ID NO: 444781 - DNA, 5302 bp, Homo sapiens
ttttaattatagttatttgctggcacacagctccctgtaggcttcataactgtcaaaatgtgagcagaggcggggtgcagtggctcacgcctgtaatcccagcactttgagaggccgaggcaggaggatcacttgagctcaggagttccagaccagcctgggcaacatggtagaccctgtctccaccaaaaatataaaaatctgtagtcccaactactcaagaggctgagttgggaagatcgcttgagcctgaaaagttgagaccagcctgggcgacatagtgagactccatctctaccaaaaaaaaaaaaaaaaaaaaaaaaaatcagagccctgaaatagtttgtgctcttcgttgcatacatttatagaactcccccatttcctagaaaagtggcagggaaaaagcaaaagcaacaaatgcgataaaaagagttctgcagatagggaaagaggtgtccagatgaagctgaggcttacagcaaggccaccactgaggaggtgaagagaaattacagtgaatggaatctaaaccctctctctataaataagcagatgctagcactggcctgcaagccccttttctagaagttagagttctcctgggatctttgcctcccaaattcttgctggcggctctgctctccaccccagtggggctgaactaacaagttccccttttgcttttctcaccagaacctgtggtttgccaaccccgggggcagcaatagcatgccaagccgcacccacagctcagtccagaggacccgctcgctgcccgtgcacacttccccacagaacatgctgatgttccagcagccagaattccagcttcccgtgaccgaacctgacatcaacaacaggctggagtcgttgtgcctcagtatgaccgaacacgccctgggagacggggttgaccggacctccaccatctagaagctgaagatgagagtgaccgcgctggccgtgaaatcgactgctgcgggtccagtgtccgccatcttcagggttgcacagaatcctccaagatactttgcagccttttttccccctggtccctctcccgttttgattttgtgagagcgtaggtcatcctcgtaaacatatcagtagacctggggttggttattttgtcatttgtttctgtcatgggatggtttggtgtgtggggtggggaggggtctctagggaattatgagactgggaggggggtggagggaatgcaggtagctctctggatggaacggggacaggggaaagagtactgccatgaaagagataggagacacataagaggacagcagaagccctggccctggggaggcttctcggaaggcctggcttcacaggcaggccacagaaggatatcgcgggcacgtgcacccaaagcaagatagtggcttcccttttatatccaatctaatcctgattggatgtccctgaggcccctgctggaaacagccataggagagggcccatggcagtaggggaaagaaggaagaaattccctgcaacaaaacttcagctaaactttgatttgtgtattgtttacataataattttaaagggtacataatgtgtaaagagtttggatagaacctctcttcatactatggttttcgtaaaggatctgttgttgttacggattcattttttccctctatttttataagagcagcagagttgtcttctcaaaacggctgccaagctctgcttcttgggaagatggatgcagtcatgtaggcctgagctgtccgtctttcaccgttaggtgggaggagcgtatgggtggacttgaaggacatggacgtggctggaatgagcacagcattgggtgagcgcacaaggatgaggacatcatgtgatcagttatgggtttgctcgcagggcacccagagattctcaaagaatcctgcagcctctttctgtgctggatttgcttgtcacggagaggcctccctccctttccaccccacccatggggcattatcctgtcactcccagccttgctccacacacacacaggtgggtacaagttccactggaggagaaaaggcaaggatggactttttccccttgtgagaggtttgatacccagaaaatgagctcaaaacctttacattagggttgcttgtaggaactggagcctggaggctgcatctacttcacctgtcactgctgagggagaggaggggagaaaggcccagcaacagcgtacagaggggtcagtcagcaagtccagagagcacatgcagggagatgtttggcccacaccgcacagccccgccatctccagtgggcgatgaaagatgtaggaaaggttgatttcaagatggaaatgacagcgctatccgcacagtatgaattagggatttgctgtgttagttgatttatccatccacacagaggggaggaaaaagacactcgttacttggtgggagattgagaaactgtggtacctaccacaaagtaatagctctgtttatgaagggcaagaaaggctacatttcagaatttgacacagtggagggtattagaggaaatcaaagaggagttgtgtggaaaatcaggttgtgtaaatgaaggtatgaatgctcagccagaggcaagatcagggagatggtacaaggcctgtttgttacatggatgagtcgggtgcctggttgtgtgtgtgtgtgtgtgtgtgtgtgtgtgtgtgtgaagtcagagttgaaattcagaagatcagactatggaaatcactgcccttttttttttaaaagctaatgaactacatacagacctaaaaggccttaatgaaatccgaacaattttcttttactttcaagatcaaaaacatgcacccaacccagccttggatgccaccaccaggtttttgaagcccttttgagtctaagaaggtgagaacaatgtaaccatagaaagcctttcgtgagcagagaaggcttgaatccacaatttcattcgctgaattaaaaaaaaaaggttcagacctctccttgggtgactaagttctaaagatgcaaatccatgtgcagaaagagatggcattttttagttgattatttttaaccaagtgccattaacattcatcccccacatcccttttctaaacaagcttagtgttacttggggaatgtgttgggatggacgatcacatgtaaggcaggaagaataggtcaaaggttgaaggccaaaggtaagaccagagggtttgcgaatgtgggtttgtaggatactgagaaagtgaataaagaggagaaaaaaccatggtattacacatcttgctgagaaaggaaagcattcggatctgctgcaaaaacacatatatccataaagactcatgttattcagaaaacagattgtgaacacaatcacattcgcatgaatcctttaaaaggaagaagaccttaaagtatctgcaaatctgaatttctatttattccttcactgaatatagaaacaatggttatctgattattagagatattattttggatatgttacttattaacttgctatggctggtaaccatgataaagtctgttattaataacaacataattctttttttaaagaagaaaagcttatttttcattgacagtgtatagatttatctacttagttgtgttttgctattagtgttttaattttttttttaagttgagtgtttgataaattttaagaccctgtccccaccttgttttgagtcctgtgttgactacaggtatatagctcaatttaaaaatcctaaagcaaaagaattttatttataaaagaatcaaacagttgcatgcatgaggctgtgaagtcagatatttagtaataaaagcagcagtgcctttttttgtatttacccattgacccccaccaaatgcaactgttttatattaagaaaatagtaacaattttaaaatctcagagtaaaatctatttcactacatgcttttccccccttgttctgatttaagcagtgtgtacttggcatctctacattgtcctagggacagtggtgttctacaatattatcatgtatgatgttttattggtgctttttattcatagtggcttcttaccagaaacagtaggaagaaacacatgaactgtgtacaagacatgaaacattgctgctgatatgttgttttttcacatgcttttgagttttcactttttaaacgagagccagcaagcaaaatagatgtggctgggtctgcctgtccgggcggctctttgcaccgagctctcaaatcctgtgtattgagggttcctttttggtactcaggattggagctacagctgggcccccctctctcccattcgtttgaagagacactgagggaaacaagggtttcttttgaggtgtccttggctgccttttacgggatgggagccttctccggatcttttgttcttctgcacctcttgtagctactgccggtgcaaggttgtagatgttattccccaggagcctgggctggggggctgagctgggctgaatgcaaaagcatgcaaccagaaggcgggcaaggggaggaaaagcaggcctggcctcattggtcccctggagatgtctgtagcagtcagctccagcttgggcctggggaagcagcctgaccaaggcgctcaggtgtgcctgttacaagaagaacctgcagaaggataatttgcacatggagctgtgataacactaatgttgattttttttttttttacaagtcatcagagatgtttgcaaagtgagttttatttttttgtaattcctttatctttacttaaaggtgaatgtgtattcctctgggaggaataggaagaaaacaggaatgttaataatgtcgaacagaaaacttcctcccttattaatatataatcctcatgtatttatgcctaatgtaagctgacttttaaaaagctttcttttgttgcatgccctgtgcaggcatctgtattgtacatgcatgcctttcgtcctgttttcctgtataaagttagtgaacaaagaaatatttttgcctagttcatgttgccaagcaatgcatattttttaaatttgtcatatatggaaagagcatgtttgttacatgtaaaagctttactgatatacagatatactaatgtttgaagatgctgttctttgcaagtgtacagttttcaaatgttgttaccagtgaaacacccttgtggtttaaacttgctacaatgtatttattattcatttcctcccatgtaactaagaatcatggctatatttcatatcaacgttatattgaaagtgaagggaaatgattaatacaaggttttgtaa

SEQ ID NO: 444782 - DNA, 4595 bp, Homo sapiens
cgctggagggttctgagcagaggaggcacagactgtgacatgaccagctatttttagtctccgttttgttccaggttcccaagttcacagtggactgtgtttaacagaccttagagaattccagcttcccgtgaccgaacctgacatcaacaacaggctggagtcgttgtgcctcagtatgaccgaacacgccctgggagacggggttgaccggacctccaccatctagaagctgaagatgagagtgaccgcgctggccgtgaaatcgactgctgcgggtccagtgtccgccatcttcagggttgcacagaatcctccaagatactttgcagccttttttccccctggtccctctcccgttttgattttgtgagagcgtaggtcatcctcgtaaacatatcagtagacctggggttggttattttgtcatttgtttctgtcatgggatggtttggtgtgtggggtggggaggggtctctagggaattatgagactgggaggggggtggagggaatgcaggtagctctctggatggaacggggacaggggaaagagtactgccatgaaagagataggagacacataagaggacagcagaagccctggccctggggaggcttctcggaaggcctggcttcacaggcaggccacagaaggatatcgcgggcacgtgcacccaaagcaagatagtggcttcccttttatatccaatctaatcctgattggatgtccctgaggcccctgctggaaacagccataggagagggcccatggcagtaggggaaagaaggaagaaattccctgcaacaaaacttcagctaaactttgatttgtgtattgtttacataataattttaaagggtacataatgtgtaaagagtttggatagaacctctcttcatactatggttttcgtaaaggatctgttgttgttacggattcattttttccctctatttttataagagcagcagagttgtcttctcaaaacggctgccaagctctgcttcttgggaagatggatgcagtcatgtaggcctgagctgtccgtctttcaccgttaggtgggaggagcgtatgggtggacttgaaggacatggacgtggctggaatgagcacagcattgggtgagcgcacaaggatgaggacatcatgtgatcagttatgggtttgctcgcagggcacccagagattctcaaagaatcctgcagcctctttctgtgctggatttgcttgtcacggagaggcctccctccctttccaccccacccatggggcattatcctgtcactcccagccttgctccacacacacacaggtgggtacaagttccactggaggagaaaaggcaaggatggactttttccccttgtgagaggtttgatacccagaaaatgagctcaaaacctttacattagggttgcttgtaggaactggagcctggaggctgcatctacttcacctgtcactgctgagggagaggaggggagaaaggcccagcaacagcgtacagaggggtcagtcagcaagtccagagagcacatgcagggagatgtttggcccacaccgcacagccccgccatctccagtgggcgatgaaagatgtaggaaaggttgatttcaagatggaaatgacagcgctatccgcacagtatgaattagggatttgctgtgttagttgatttatccatccacacagaggggaggaaaaagacactcgttacttggtgggagattgagaaactgtggtacctaccacaaagtaatagctctgtttatgaagggcaagaaaggctacatttcagaatttgacacagtggagggtattagaggaaatcaaagaggagttgtgtggaaaatcaggttgtgtaaatgaaggtatgaatgctcagccagaggcaagatcagggagatggtacaaggcctgtttgttacatggatgagtcgggtgcctggttgtgtgtgtgtgtgtgtgtgtgtgtgtgtgtgtgtgaagtcagagttgaaattcagaagatcagactatggaaatcactgcccttttttttttaaaagctaatgaactacatacagacctaaaaggccttaatgaaatccgaacaattttcttttactttcaagatcaaaaacatgcacccaacccagccttggatgccaccaccaggtttttgaagcccttttgagtctaagaaggtgagaacaatgtaaccatagaaagcctttcgtgagcagagaaggcttgaatccacaatttcattcgctgaattaaaaaaaaaaggttcagacctctccttgggtgactaagttctaaagatgcaaatccatgtgcagaaagagatggcattttttagttgattatttttaaccaagtgccattaacattcatcccccacatcccttttctaaacaagcttagtgttacttggggaatgtgttgggatggacgatcacatgtaaggcaggaagaataggtcaaaggttgaaggccaaaggtaagaccagagggtttgcgaatgtgggtttgtaggatactgagaaagtgaataaagaggagaaaaaaccatggtattacacatcttgctgagaaaggaaagcattcggatctgctgcaaaaacacatatatccataaagactcatgttattcagaaaacagattgtgaacacaatcacattcgcatgaatcctttaaaaggaagaagaccttaaagtatctgcaaatctgaatttctatttattccttcactgaatatagaaacaatggttatctgattattagagatattattttggatatgttacttattaacttgctatggctggtaaccatgataaagtctgttattaataacaacataattctttttttaaagaagaaaagcttatttttcattgacagtgtatagatttatctacttagttgtgttttgctattagtgttttaattttttttttaagttgagtgtttgataaattttaagaccctgtccccaccttgttttgagtcctgtgttgactacaggtatatagctcaatttaaaaatcctaaagcaaaagaattttatttataaaagaatcaaacagttgcatgcatgaggctgtgaagtcagatatttagtaataaaagcagcagtgcctttttttgtatttacccattgacccccaccaaatgcaactgttttatattaagaaaatagtaacaattttaaaatctcagagtaaaatctatttcactacatgcttttccccccttgttctgatttaagcagtgtgtacttggcatctctacattgtcctagggacagtggtgttctacaatattatcatgtatgatgttttattggtgctttttattcatagtggcttcttaccagaaacagtaggaagaaacacatgaactgtgtacaagacatgaaacattgctgctgatatgttgttttttcacatgcttttgagttttcactttttaaacgagagccagcaagcaaaatagatgtggctgggtctgcctgtccgggcggctctttgcaccgagctctcaaatcctgtgtattgagggttcctttttggtactcaggattggagctacagctgggcccccctctctcccattcgtttgaagagacactgagggaaacaagggtttcttttgaggtgtccttggctgccttttacgggatgggagccttctccggatcttttgttcttctgcacctcttgtagctactgccggtgcaaggttgtagatgttattccccaggagcctgggctggggggctgagctgggctgaatgcaaaagcatgcaaccagaaggcgggcaaggggaggaaaagcaggcctggcctcattggtcccctggagatgtctgtagcagtcagctccagcttgggcctggggaagcagcctgaccaaggcgctcaggtgtgcctgttacaagaagaacctgcagaaggataatttgcacatggagctgtgataacactaatgttgattttttttttttttacaagtcatcagagatgtttgcaaagtgagttttatttttttgtaattcctttatctttacttaaaggtgaatgtgtattcctctgggaggaataggaagaaaacaggaatgttaataatgtcgaacagaaaacttcctcccttattaatatataatcctcatgtatttatgcctaatgtaagctgacttttaaaaagctttcttttgttgcatgccctgtgcaggcatctgtattgtacatgcatgcctttcgtcctgttttcctgtataaagttagtgaacaaagaaatatttttgcctagttcatgttgccaagcaatgcatattttttaaatttgtcatatatggaaagagcatgtttgttacatgtaaaagctttactgatatacagatatactaatgtttgaagatgctgttctttgcaagtgtacagttttcaaatgttgttaccagtgaaacacccttgtggtttaaacttgctacaatgtatttattattcatttcctcccatgtaactaagaatcatggctatatttcatatcaacgttatattgaaagtgaagggaaatgattaatacaaggttttgtaa

SEQ ID NO: 444783 - DNA, 3465 bp, Homo sapiens
actcaataatgatgagctgtgcccagtggacacctgaggagggaagaaaaggagaaggacaaagtggagagggaggagatggagcaatctcttatgtgatcattccatcaactcacaaatttttcacctaacacctggttcaactgtaatgtgctcagctccgtataacctggacagcagctgtgccctcacccctaaactcagcaaaatattatggtcctctaatcaagagaattttgctcctgttactgcatgtcttgtgggttcatcgtcagaccagtgagttgataccaaacttcaccaaacggttctccggagcaaccgtttagaggaatcattaaccaatggcaacaggaatccaaggataaagtgatttccctcctgttaactcatctgcctttgctgaagccaggaaacctcgacgcgaaagtagaatatatgaaactgctgcccaaaatcctggctcactctattgaacacaaccagcacattgaggagagcaggcagctgctgtcctatgctttgatacatccagccacttcgttagaagaccgtagtgctttagccatgtggctgaatcacttggaggaccgcacgtcgaccagctttggtggccagaaccgaggccgctcagactctgtggattatggacagacacactactatcaccaaagacagaactctgatgacaagctcaatgggtggcagaactctcgggattctgggatttgcatcaatgcctccaactggcaggacaaaagcatggggtgtgagaatggccatgtgcccctctactcctcctcatctgtccccaccacaatcaatacgattggaaccagcacaagtacaaatgttccagcctggctgaaaagcctccgcctgcacaaatatgccgcgcttttctcccagatgacctatgaggagatgatggccctcaccgagtgccagctggaggcgcagaatgttaccaaaggtgcaagacacaaaattgtcatcagtattcagaagctcaaagaaagacaaaatctcctgaagtctttggaaagggacatcatcgaggggggcagcctgcgcatcccgctccaggaactgcaccagatgatcctgactccgatcaaggcctacagctccccgagcaccacccccgaggctcgccgccgggagccccaggccccgcgtcagccctcactgatgggccccgagagccagagccccgactgcaaagatggggccgcagccactggcgccacggccaccccctcggccggggccagcggggggctccagccgcaccagctgagcagctgcgatggggagctggccgtcgcccccctgccagagggggacctccccgggcagttcacacgcgtcatggggaaagtgtgcacacagctcttggtctccagacctgatgaggaaaatataagttcctatttacagctcatagacaagtgtctaattcatgaggcatttacagagacacagaaaaaaagattgttgtcatggaaacagcaggtgcagaagctctttcggtctttccctcggaaaacccttctagacatatcaggatatcgacagcaaagaaatcgaggctttgggcaatccaactccctcccgacggctggctctgtgggcggtggcatgggcagacggaacccgcgccagtaccagatcccctctcggaacgtcccttccgcccgcctgggcctcttgggcaccagtggattcgtcagctccaaccagcgcaacaccacagctacccccaccatcatgaaacaaggaagacagaacctgtggtttgccaaccccgggggcagcaatagcatgccaagccgcacccacagctcagtccagaggacccgctcgctgcccgtgcacacttccccacagaacatgctgatgttccagcagccagaattccagcttcccgtgaccgaacctgacatcaacaacaggctggagtcgttgtgcctcagtatgaccgaacacgccctgggagacggggttgaccggacctccaccatctagaagctgaagatgagagtgaccgcgctggccgtgaaatcgactgctgcgggtccagtgtccgccatcttcagggttgcacagaatcctccaagatactttgcagccttttttccccctggtccctctcccgttttgattttgtgagagcgtaggtcatcctcgtaaacatatcagtagacctggggttggttattttgtcatttgtttctgtcatgggatggtttggtgtgtggggtggggaggggtctctagggaattatgagactgggaggggggtggagggaatgcaggtagctctctggatggaacggggacaggggaaagagtactgccatgaaagagataggagacacataagaggacagcagaagccctggccctggggaggcttctcggaaggcctggcttcacaggcaggccacagaaggatatcgcgggcacgtgcacccaaagcaagatagtggcttcccttttatatccaatctaatcctgattggatgtccctgaggcccctgctggaaacagccataggagagggcccatggcagtaggggaaagaaggaagaaattccctgcaacaaaacttcagctaaactttgatttgtgtattgtttacataataattttaaagggtacataatgtgtaaagagtttggatagaacctctcttcatactatggttttcgtaaaggatctgttgttgttacggattcattttttccctctatttttataagagcagcagagttgtcttctcaaaacggctgccaagctctgcttcttgggaagatggatgcagtcatgtaggcctgagctgtccgtctttcaccgttaggtgggaggagcgtatgggtggacttgaaggacatggacgtggctggaatgagcacagcattgggtgagcgcacaaggatgaggacatcatgtgatcagttatgggtttgctcgcagggcacccagagattctcaaagaatcctgcagcctctttctgtgctggatttgcttgtcacggagaggcctccctccctttccaccccacccatggggcattatcctgtcactcccagccttgctccacacacacacaggtgggtacaagttccactggaggagaaaaggcaaggatggactttttccccttgtgagaggtttgatacccagaaaatgagctcaaaacctttacattagggttgcttgtaggaactggagcctggaggctgcatctacttcacctgtcactgctgagggagaggaggggagaaaggcccagcaacagcgtacagaggggtcagtcagcaagtccagagagcacatgcagggagatgtttggcccacaccgcacagccccgccatctccagtgggcgatgaaagatgtaggaaaggttgatttcaagatggaaagcggctgtgcagacattcaattgttattattata

SEQ ID NO: 444784 - DNA, 1149 bp, Homo sapiens
actcaataatgatgagctgtgcccagtggacacctgaggagggaagaaaaggagaaggacaaagtggagagggaggagatggagcaatctcttatgtgatcattccatcaactcacaaatttttcacctaacacctggttcaactgtaatgtgctcagctccgtataacctggacagcagctgtgccctcacccctaaactcagcaaaatattatggtcctctaatcaagagaattttgctcctgttactgcatgtcttgtgggttcatcgtcagaccagtgagttgataccaaacttcaccaaacggttctccggagcaaccgtttagaggaatcattaaccaatggcaacaggaatccaaggataaagtgatttccctcctgttaactcatctgcctttgctgaagccaggaaacctcgacgcgaaagtagaatatatgaaactgctgcccaaaatcctggctcactctattgaacacaaccagcacattgaggagagcaggcagctgctgtcctatgctttgatacatccagccacttcgttagaagaccgtagtgctttagccatgtggctgaatcacttggaggaccgcacgtcgaccagctttggtggccagaaccgaggccgctcagactctgtggattatggacagacacactactatcaccaaagacagaactctgatgacaagctcaatgggtggcagaactctcgggattctgggatttgcatcaatgcctccaactggcaggacaaaagcatggggtgtgagaatggccatgtgcccctctactcctcctcatctgtccccaccacaatcaatacgattggaaccagcacaagtacaagtaagttccccggaatccctttaacgtagtctggtttggcgatttgctgtgtatgtggcatgtcctgctgacagtgtctgctccatgcaccctgtgaccctgggagagaaggactgattggaattggctgtgggaaagagtcctttggaccccatatttgttgctctttgactctgcaaagatgaaaatacttgggaaggtaaaagtgactgatggtccaaatttgggttataaacagaccaaaaataaatagacaataaatgaaagaaggaaacttgccgtttccacaatcagaaatg

SEQ ID NO: 444785 - DNA, 6521 bp, Homo sapiens
gatgtttcgcgaccaggtcggggtgctggcgggctggtttaagggctggaacgagtgcgagcagactgttgcgctgctgtcgctgctcaagcgcgtgagccagacccaggcccgcttcctccagctctgcctggagcactcgctggccgactgcgccgagctgcacgtcctcgaacgcgaggccaacagccccggaatcattaaccaatggcaacaggaatccaaggataaagtgatttccctcctgttaactcatctgcctttgctgaagccaggaaacctcgacgcgaaagtagaatatatgaaactgctgcccaaaatcctggctcactctattgaacacaaccagcacattgaggagagcaggcagctgctgtcctatgctttgatacatccagccacttcgttagaagaccgtagtgctttagccatgtggctgaatcacttggaggaccgcacgtcgaccagctttggtggccagaaccgaggccgctcagactctgtggattatggacagacacactactatcaccaaagacagaactctgatgacaagctcaatgggtggcagaactctcgggattctgggatttgcatcaatgcctccaactggcaggacaaaagcatggggtgtgagaatggccatgtgcccctctactcctcctcatctgtccccaccacaatcaatacgattggaaccagcacaagtacaattctctcaggccaggcacaccacagccctttgaaacgatctgtgtcccttaccccacccatgaatgtgccaaaccagcctctaggacatggatggatgtctcatgaggacttacgagctagaggaccccagtgcctcccatccgatcatgcccccctgtctccacaaagcagtgtagcctcttcaggaagtggtgggagtgaacacttagaagatcagaccactgctcgtaacacattccaagaagaaggtagtgggatgaaagatgttccagcctggctgaaaagcctccgcctgcacaaatatgccgcgcttttctcccagatgacctatgaggagatgatggccctcaccgagtgccagctggaggcgcagaatgttaccaaaggtgcaagacacaaaattgtcatcagtattcagaagctcaaagaaagacaaaatctcctgaagtctttggaaagggacatcatcgaggggggcagcctgcgcatcccgctccaggaactgcaccagatgatcctgactccgatcaaggcctacagctccccgagcaccacccccgaggctcgccgccgggagccccaggccccgcgtcagccctcactgatgggccccgagagccagagccccgactgcaaagatggggccgcagccactggcgccacggccaccccctcggccggggccagcggggggctccagccgcaccagctgagcagctgcgatggggagctggccgtcgcccccctgccagagggggacctccccgggcagttcacacgcgtcatggggaaagtgtgcacacagctcttggtctccagacctgatgaggaaaatataagttcctatttacagctcatagacaagtgtctaattcatgaggcatttacagagacacagaaaaaaagattgttgtcatggaaacagcaggtgcagaagctctttcggtctttccctcggaaaacccttctagacatatcaggatatcgacagcaaagaaatcgaggctttgggcaatccaactccctcccgacggctggctctgtgggcggtggcatgggcagacggaacccgcgccagtaccagatcccctctcggaacgtcccttccgcccgcctgggcctcttgggcaccagtggattcgtcagctccaaccagcgcaacaccacagctacccccaccatcatgaaacaaggaagacagaacctgtggtttgccaaccccgggggcagcaatagcatgccaagccgcacccacagctcagtccagaggacccgctcgctgcccgtgcacacttccccacagaacatgctgatgttccagcagccagaattccagcttcccgtgaccgaacctgacatcaacaacaggctggagtcgttgtgcctcagtatgaccgaacacgccctgggagacggggttgaccggacctccaccatctagaagctgaagatgagagtgaccgcgctggccgtgaaatcgactgctgcgggtccagtgtccgccatcttcagggttgcacagaatcctccaagatactttgcagccttttttccccctggtccctctcccgttttgattttgtgagagcgtaggtcatcctcgtaaacatatcagtagacctggggttggttattttgtcatttgtttctgtcatgggatggtttggtgtgtggggtggggaggggtctctagggaattatgagactgggaggggggtggagggaatgcaggtagctctctggatggaacggggacaggggaaagagtactgccatgaaagagataggagacacataagaggacagcagaagccctggccctggggaggcttctcggaaggcctggcttcacaggcaggccacagaaggatatcgcgggcacgtgcacccaaagcaagatagtggcttcccttttatatccaatctaatcctgattggatgtccctgaggcccctgctggaaacagccataggagagggcccatggcagtaggggaaagaaggaagaaattccctgcaacaaaacttcagctaaactttgatttgtgtattgtttacataataattttaaagggtacataatgtgtaaagagtttggatagaacctctcttcatactatggttttcgtaaaggatctgttgttgttacggattcattttttccctctatttttataagagcagcagagttgtcttctcaaaacggctgccaagctctgcttcttgggaagatggatgcagtcatgtaggcctgagctgtccgtctttcaccgttaggtgggaggagcgtatgggtggacttgaaggacatggacgtggctggaatgagcacagcattgggtgagcgcacaaggatgaggacatcatgtgatcagttatgggtttgctcgcagggcacccagagattctcaaagaatcctgcagcctctttctgtgctggatttgcttgtcacggagaggcctccctccctttccaccccacccatggggcattatcctgtcactcccagccttgctccacacacacacaggtgggtacaagttccactggaggagaaaaggcaaggatggactttttccccttgtgagaggtttgatacccagaaaatgagctcaaaacctttacattagggttgcttgtaggaactggagcctggaggctgcatctacttcacctgtcactgctgagggagaggaggggagaaaggcccagcaacagcgtacagaggggtcagtcagcaagtccagagagcacatgcagggagatgtttggcccacaccgcacagccccgccatctccagtgggcgatgaaagatgtaggaaaggttgatttcaagatggaaatgacagcgctatccgcacagtatgaattagggatttgctgtgttagttgatttatccatccacacagaggggaggaaaaagacactcgttacttggtgggagattgagaaactgtggtacctaccacaaagtaatagctctgtttatgaagggcaagaaaggctacatttcagaatttgacacagtggagggtattagaggaaatcaaagaggagttgtgtggaaaatcaggttgtgtaaatgaaggtatgaatgctcagccagaggcaagatcagggagatggtacaaggcctgtttgttacatggatgagtcgggtgcctggttgtgtgtgtgtgtgtgtgtgtgtgtgtgtgtgtgtgaagtcagagttgaaattcagaagatcagactatggaaatcactgcccttttttttttaaaagctaatgaactacatacagacctaaaaggccttaatgaaatccgaacaattttcttttactttcaagatcaaaaacatgcacccaacccagccttggatgccaccaccaggtttttgaagcccttttgagtctaagaaggtgagaacaatgtaaccatagaaagcctttcgtgagcagagaaggcttgaatccacaatttcattcgctgaattaaaaaaaaaaggttcagacctctccttgggtgactaagttctaaagatgcaaatccatgtgcagaaagagatggcattttttagttgattatttttaaccaagtgccattaacattcatcccccacatcccttttctaaacaagcttagtgttacttggggaatgtgttgggatggacgatcacatgtaaggcaggaagaataggtcaaaggttgaaggccaaaggtaagaccagagggtttgcgaatgtgggtttgtaggatactgagaaagtgaataaagaggagaaaaaaccatggtattacacatcttgctgagaaaggaaagcattcggatctgctgcaaaaacacatatatccataaagactcatgttattcagaaaacagattgtgaacacaatcacattcgcatgaatcctttaaaaggaagaagaccttaaagtatctgcaaatctgaatttctatttattccttcactgaatatagaaacaatggttatctgattattagagatattattttggatatgttacttattaacttgctatggctggtaaccatgataaagtctgttattaataacaacataattctttttttaaagaagaaaagcttatttttcattgacagtgtatagatttatctacttagttgtgttttgctattagtgttttaattttttttttaagttgagtgtttgataaattttaagaccctgtccccaccttgttttgagtcctgtgttgactacaggtatatagctcaatttaaaaatcctaaagcaaaagaattttatttataaaagaatcaaacagttgcatgcatgaggctgtgaagtcagatatttagtaataaaagcagcagtgcctttttttgtatttacccattgacccccaccaaatgcaactgttttatattaagaaaatagtaacaattttaaaatctcagagtaaaatctatttcactacatgcttttccccccttgttctgatttaagcagtgtgtacttggcatctctacattgtcctagggacagtggtgttctacaatattatcatgtatgatgttttattggtgctttttattcatagtggcttcttaccagaaacagtaggaagaaacacatgaactgtgtacaagacatgaaacattgctgctgatatgttgttttttcacatgcttttgagttttcactttttaaacgagagccagcaagcaaaatagatgtggctgggtctgcctgtccgggcggctctttgcaccgagctctcaaatcctgtgtattgagggttcctttttggtactcaggattggagctacagctgggcccccctctctcccattcgtttgaagagacactgagggaaacaagggtttcttttgaggtgtccttggctgccttttacgggatgggagccttctccggatcttttgttcttctgcacctcttgtagctactgccggtgcaaggttgtagatgttattccccaggagcctgggctggggggctgagctgggctgaatgcaaaagcatgcaaccagaaggcgggcaaggggaggaaaagcaggcctggcctcattggtcccctggagatgtctgtagcagtcagctccagcttgggcctggggaagcagcctgaccaaggcgctcaggtgtgcctgttacaagaagaacctgcagaaggataatttgcacatggagctgtgataacactaatgttgattttttttttttttacaagtcatcagagatgtttgcaaagtgagttttatttttttgtaattcctttatctttacttaaaggtgaatgtgtattcctctgggaggaataggaagaaaacaggaatgttaataatgtcgaacagaaaacttcctcccttattaatatataatcctcatgtatttatgcctaatgtaagctgacttttaaaaagctttcttttgttgcatgccctgtgcaggcatctgtattgtacatgcatgcctttcgtcctgttttcctgtataaagttagtgaacaaagaaatatttttgcctagttcatgttgccaagcaatgcatattttttaaatttgtcatatatggaaagagcatgtttgttacatgtaaaagctttactgatatacagatatactaatgtttgaagatgctgttctttgcaagtgtacagttttcaaatgttgttaccagtgaaacacccttgtggtttaaacttgctacaatgtatttattattcatttcctcccatgtaactaagaatcatggctatatttcatatcaacgttatattgaaagtgaagggaaatgattaatacaaggttttgtaa

SEQ ID NO: 444786 - DNA, 3746 bp, Homo sapiens
actcaataatgatgagctgtgcccagtggacacctgaggagggaagaaaaggagaaggacaaagtggagagggaggagatggagcaatctcttatgtgatcattccatcaactcacaaatttttcacctaacacctggttcaactgtaatgtgctcagctccgtataacctggacagcagctgtgccctcacccctaaactcagcaaaatattatggtcctctaatcaagagaattttgctcctgttactgcatgtcttgtgggttcatcgtcagaccagtgagttgataccaaacttcaccaaacggttctccggagcaaccgtttagaggaatcattaaccaatggcaacaggaatccaaggataaagtgatttccctcctgttaactcatctgcctttgctgaagccaggaaacctcgacgcgaaagtagaatatatgaaactgctgcccaaaatcctggctcactctattgaacacaaccagcacattgaggagagcaggcagctgctgtcctatgctttgatacatccagccacttcgttagaagaccgtagtgctttagccatgtggctgaatcacttggaggaccgcacgtcgaccagctttggtggccagaaccgaggccgctcagactctgtggattatggacagacacactactatcaccaaagacagaactctgatgacaagctcaatgggtggcagaactctcgggattctgggatttgcatcaatgcctccaactggcaggacaaaagcatggggtgtgagaatggccatgtgcccctctactcctcctcatctgtccccaccacaatcaatacgattggaaccagcacaagtacaaatgttccagcctggctgaaaagcctccgcctgcacaaatatgccgcgcttttctcccagatgacctatgaggagatgatggccctcaccgagtgccagctggaggcgcagaatgttaccaaaggtgcaagacacaaaattgtcatcagtattcagaagctcaaagaaagacaaaatctcctgaagtctttggaaagggacatcatcgaggggggcagcctgcgcatcccgctccaggaactgcaccagatgatcctgactccgatcaaggcctacagctccccgagcaccacccccgaggctcgccgccgggagccccaggccccgcgtcagccctcactgatgggccccgagagccagagccccgactgcaaagatggggccgcagccactggcgccacggccaccccctcggccggggccagcggggggctccagccgcaccagctgagcagctgcgatggggagctggccgtcgcccccctgccagagggggacctccccgggcagttcacacgcgtcatggggaaagtgtgcacacagctcttggtctccagacctgatgaggaaaatataagttcctatttacagctcatagacaagtgtctaattcatgaggcatttacagagacacagaaaaaaagattgttgtcatggaaacagcaggtgcagaagctctttcggtctttccctcggaaaacccttctagacatatcaggatatcgacagcaaagaaatcgaggctttgggcaatccaactccctcccgacggctggctctgtgggcggtggcatgggcagacggaacccgcgccagtaccagatcccctctcggaacgtcccttccgcccgcctgggcctcttgggcaccagtggattcgtcagctccaaccagcgcaacaccacagctacccccaccatcatgaaacaaggaagacagaacctgtggtttgccaaccccgggggcagcaatagcatgccaagccgcacccacagctcagtccagaggacccgctcgctgcccgtgcacacttccccacagaacatgctgatgttccagcagccagaattccagcttcccgtgaccgaacctgacatcaacaacaggctggagtcgttgtgcctcagtatgaccgaacacgccctgggagacggggttgaccggacctccaccatctagaagctgaagatgagagtgaccgcgctggccgtgaaatcgactgctgcgggtccagtgtccgccatcttcagggttgcacagaatcctccaagatactttgcagccttttttccccctggtccctctcccgttttgattttgtgagagcgtaggtcatcctcgtaaacatatcagtagacctggggttggttattttgtcatttgtttctgtcatgggatggtttggtgtgtggggtggggaggggtctctagggaattatgagactgggaggggggtggagggaatgcaggtagctctctggatggaacggggacaggggaaagagtactgccatgaaagagataggagacacataagaggacagcagaagccctggccctggggaggcttctcggaaggcctggcttcacaggcaggccacagaaggatatcgcgggcacgtgcacccaaagcaagatagtggcttcccttttatatccaatctaatcctgattggatgtccctgaggcccctgctggaaacagccataggagagggcccatggcagtaggggaaagaaggaagaaattccctgcaacaaaacttcagctaaactttgatttgtgtattgtttacataataattttaaagggtacataatgtgtaaagagtttggatagaacctctcttcatactatggttttcgtaaaggatctgttgttgttacggattcattttttccctctctcccattcgtttgaagagacactgagggaaacaagggtttcttttgaggtgtccttggctgccttttacgggatgggagccttctccggatcttttgttcttctgcacctcttgtagctactgccggtgcaaggttgtagatgttattccccaggagcctgggctggggggctgagctgggctgaatgcaaaagcatgcaaccagaaggcgggcaaggggaggaaaagcaggcctggcctcattggtcccctggagatgtctgtagcagtcagctccagcttgggcctggggaagcagcctgaccaaggcgctcaggtgtgcctgttacaagaagaacctgcagaaggataatttgcacatggagctgtgataacactaatgttgattttttttttttttacaagtcatcagagatgtttgcaaagtgagttttatttttttgtaattcctttatctttacttaaaggtgaatgtgtattcctctgggaggaataggaagaaaacaggaatgttaataatgtcgaacagaaaacttcctcccttattaatatataatcctcatgtatttatgcctaatgtaagctgacttttaaaaagctttcttttgttgcatgccctgtgcaggcatctgtattgtacatgcatgcctttcgtcctgttttcctgtataaagttagtgaacaaagaaatatttttgcctagttcatgttgccaagcaatgcatattttttaaatttgtcatatatggaaagagcatgtttgttacatgtaaaagctttactgatatacagatatactaatgtttgaagatgctgttctttgcaagtgtacagttttcaaatgttgttaccagtgaaacacccttgtggtttaaacttgctacaatgtatttattattcatttcctcccatgtaactaagaatcatggctatatttcatatcaacgttatattgaaagtgaagggaaatgattaatacaaggttttgtaa

SEQ ID NO: 444787 - DNA, 5595 bp, Homo sapiens
atacgctaggtacgaggccgggtgggcaaatctctgaagtctttggaaagggacatcatcgaggggggcagcctgcgcatcccgctccaggaactgcaccagatgatcctgactccgatcaaggcctacagctccccgagcaccacccccgaggctcgccgccgggagccccaggccccgcgtcagccctcactgatgggccccgagagccagagccccgactgcaaagatggggccgcagccactggcgccacggccaccccctcggccggggccagcggggggctccagccgcaccagctgagcagctgcgatggggagctggccgtcgcccccctgccagagggggacctccccgggcagttcacacgcgtcatggggaaagtgtgcacacagctcttggtctccagacctgatgaggaaaatataagttcctatttacagctcatagacaagtgtctaattcatgaggcatttacagagacacagaaaaaaagattgttgtcatggaaacagcaggtgcagaagctctttcggtctttccctcggaaaacccttctagacatatcaggatatcgacagcaaagaaatcgaggctttgggcaatccaactccctcccgacggctggctctgtgggcggtggcatgggcagacggaacccgcgccagtaccagatcccctctcggaacgtcccttccgcccgcctgggcctcttgggcaccagtggattcgtcagctccaaccagcgcaacaccacagctacccccaccatcatgaaacaaggaagacagaacctgtggtttgccaaccccgggggcagcaatagcatgccaagccgcacccacagctcagtccagaggacccgctcgctgcccgtgcacacttccccacagaacatgctgatgttccagcagccaggttcccaagttcacagtggactgtgtttaacagaccttagaggttggttgagcctgagtggagccccttccatgccagcgctgacagtccccaagtcctcccagggaggtacaccagacctttctcctgaaggtggaaccaggtggcaccctgcttatctcctccttgtcaccaacataaccctttatcgcctgcagaattccagcttcccgtgaccgaacctgacatcaacaacaggctggagtcgttgtgcctcagtatgaccgaacacgccctgggagacggggttgaccggacctccaccatctagaagctgaagatgagagtgaccgcgctggccgtgaaatcgactgctgcgggtccagtgtccgccatcttcagggttgcacagaatcctccaagatactttgcagccttttttccccctggtccctctcccgttttgattttgtgagagcgtaggtcatcctcgtaaacatatcagtagacctggggttggttattttgtcatttgtttctgtcatgggatggtttggtgtgtggggtggggaggggtctctagggaattatgagactgggaggggggtggagggaatgcaggtagctctctggatggaacggggacaggggaaagagtactgccatgaaagagataggagacacataagaggacagcagaagccctggccctggggaggcttctcggaaggcctggcttcacaggcaggccacagaaggatatcgcgggcacgtgcacccaaagcaagatagtggcttcccttttatatccaatctaatcctgattggatgtccctgaggcccctgctggaaacagccataggagagggcccatggcagtaggggaaagaaggaagaaattccctgcaacaaaacttcagctaaactttgatttgtgtattgtttacataataattttaaagggtacataatgtgtaaagagtttggatagaacctctcttcatactatggttttcgtaaaggatctgttgttgttacggattcattttttccctctatttttataagagcagcagagttgtcttctcaaaacggctgccaagctctgcttcttgggaagatggatgcagtcatgtaggcctgagctgtccgtctttcaccgttaggtgggaggagcgtatgggtggacttgaaggacatggacgtggctggaatgagcacagcattgggtgagcgcacaaggatgaggacatcatgtgatcagttatgggtttgctcgcagggcacccagagattctcaaagaatcctgcagcctctttctgtgctggatttgcttgtcacggagaggcctccctccctttccaccccacccatggggcattatcctgtcactcccagccttgctccacacacacacaggtgggtacaagttccactggaggagaaaaggcaaggatggactttttccccttgtgagaggtttgatacccagaaaatgagctcaaaacctttacattagggttgcttgtaggaactggagcctggaggctgcatctacttcacctgtcactgctgagggagaggaggggagaaaggcccagcaacagcgtacagaggggtcagtcagcaagtccagagagcacatgcagggagatgtttggcccacaccgcacagccccgccatctccagtgggcgatgaaagatgtaggaaaggttgatttcaagatggaaatgacagcgctatccgcacagtatgaattagggatttgctgtgttagttgatttatccatccacacagaggggaggaaaaagacactcgttacttggtgggagattgagaaactgtggtacctaccacaaagtaatagctctgtttatgaagggcaagaaaggctacatttcagaatttgacacagtggagggtattagaggaaatcaaagaggagttgtgtggaaaatcaggttgtgtaaatgaaggtatgaatgctcagccagaggcaagatcagggagatggtacaaggcctgtttgttacatggatgagtcgggtgcctggttgtgtgtgtgtgtgtgtgtgtgtgtgtgtgtgtgtgaagtcagagttgaaattcagaagatcagactatggaaatcactgcccttttttttttaaaagctaatgaactacatacagacctaaaaggccttaatgaaatccgaacaattttcttttactttcaagatcaaaaacatgcacccaacccagccttggatgccaccaccaggtttttgaagcccttttgagtctaagaaggtgagaacaatgtaaccatagaaagcctttcgtgagcagagaaggcttgaatccacaatttcattcgctgaattaaaaaaaaaaggttcagacctctccttgggtgactaagttctaaagatgcaaatccatgtgcagaaagagatggcattttttagttgattatttttaaccaagtgccattaacattcatcccccacatcccttttctaaacaagcttagtgttacttggggaatgtgttgggatggacgatcacatgtaaggcaggaagaataggtcaaaggttgaaggccaaaggtaagaccagagggtttgcgaatgtgggtttgtaggatactgagaaagtgaataaagaggagaaaaaaccatggtattacacatcttgctgagaaaggaaagcattcggatctgctgcaaaaacacatatatccataaagactcatgttattcagaaaacagattgtgaacacaatcacattcgcatgaatcctttaaaaggaagaagaccttaaagtatctgcaaatctgaatttctatttattccttcactgaatatagaaacaatggttatctgattattagagatattattttggatatgttacttattaacttgctatggctggtaaccatgataaagtctgttattaataacaacataattctttttttaaagaagaaaagcttatttttcattgacagtgtatagatttatctacttagttgtgttttgctattagtgttttaattttttttttaagttgagtgtttgataaattttaagaccctgtccccaccttgttttgagtcctgtgttgactacaggtatatagctcaatttaaaaatcctaaagcaaaagaattttatttataaaagaatcaaacagttgcatgcatgaggctgtgaagtcagatatttagtaataaaagcagcagtgcctttttttgtatttacccattgacccccaccaaatgcaactgttttatattaagaaaatagtaacaattttaaaatctcagagtaaaatctatttcactacatgcttttccccccttgttctgatttaagcagtgtgtacttggcatctctacattgtcctagggacagtggtgttctacaatattatcatgtatgatgttttattggtgctttttattcatagtggcttcttaccagaaacagtaggaagaaacacatgaactgtgtacaagacatgaaacattgctgctgatatgttgttttttcacatgcttttgagttttcactttttaaacgagagccagcaagcaaaatagatgtggctgggtctgcctgtccgggcggctctttgcaccgagctctcaaatcctgtgtattgagggttcctttttggtactcaggattggagctacagctgggcccccctctctcccattcgtttgaagagacactgagggaaacaagggtttcttttgaggtgtccttggctgccttttacgggatgggagccttctccggatcttttgttcttctgcacctcttgtagctactgccggtgcaaggttgtagatgttattccccaggagcctgggctggggggctgagctgggctgaatgcaaaagcatgcaaccagaaggcgggcaaggggaggaaaagcaggcctggcctcattggtcccctggagatgtctgtagcagtcagctccagcttgggcctggggaagcagcctgaccaaggcgctcaggtgtgcctgttacaagaagaacctgcagaaggataatttgcacatggagctgtgataacactaatgttgattttttttttttttacaagtcatcagagatgtttgcaaagtgagttttatttttttgtaattcctttatctttacttaaaggtgaatgtgtattcctctgggaggaataggaagaaaacaggaatgttaataatgtcgaacagaaaacttcctcccttattaatatataatcctcatgtatttatgcctaatgtaagctgacttttaaaaagctttcttttgttgcatgccctgtgcaggcatctgtattgtacatgcatgcctttcgtcctgttttcctgtataaagttagtgaacaaagaaatatttttgcctagttcatgttgccaagcaatgcatattttttaaatttgtcatatatggaaagagcatgtttgttacatgtaaaagctttactgatatacagatatactaatgtttgaagatgctgttctttgcaagtgtacagttttcaaatgttgttaccagtgaaacacccttgtggtttaaacttgctacaatgtatttattattcatttcctcccatgtaactaagaatcatggctatatttcatatcaacgttatattgaaagtgaagggaaatgattaatacaaggttttgtaa

SEQ ID NO: 444788 - DNA, 5175 bp, Homo sapiens
agatctcactactgcactccaacctgggtaacagagtgagaccctgactcaaaaaaaaaaaaaaaaaaaaaatgaggagacctccaaggcgacatcccttgggaagcctgtggcttaaaaagggctgaataacgactgatattctcttccttctctcttggctctcacagtcgaggctttgggcaatccaactccctcccgacggctggctctgtgggcggtggcatgggcagacggaacccgcgccagtaccagatcccctctcggaacgtcccttccgcccgcctgggcctcttgggcaccagtggattcgtcagctccaaccagcgcaacaccacagctacccccaccatcatgaaacaaggaagacagaacctgtggtttgccaaccccgggggcagcaatagcatgccaagccgcacccacagctcagtccagaggacccgctcgctgcccgtgcacacttccccacagaacatgctgatgttccagcagccaggttcccaagttcacagtggactgtgtttaacagaccttagaggttggttgagcctgagtggagccccttccatgccagcgctgacagtccccaagtcctcccagggaggtacaccagacctttctcctgaaggtggaaccaggtggcaccctgcttatctcctccttgtcaccaacataaccctttatcgcctgcagaattccagcttcccgtgaccgaacctgacatcaacaacaggctggagtcgttgtgcctcagtatgaccgaacacgccctgggagacggggttgaccggacctccaccatctagaagctgaagatgagagtgaccgcgctggccgtgaaatcgactgctgcgggtccagtgtccgccatcttcagggttgcacagaatcctccaagatactttgcagccttttttccccctggtccctctcccgttttgattttgtgagagcgtaggtcatcctcgtaaacatatcagtagacctggggttggttattttgtcatttgtttctgtcatgggatggtttggtgtgtggggtggggaggggtctctagggaattatgagactgggaggggggtggagggaatgcaggtagctctctggatggaacggggacaggggaaagagtactgccatgaaagagataggagacacataagaggacagcagaagccctggccctggggaggcttctcggaaggcctggcttcacaggcaggccacagaaggatatcgcgggcacgtgcacccaaagcaagatagtggcttcccttttatatccaatctaatcctgattggatgtccctgaggcccctgctggaaacagccataggagagggcccatggcagtaggggaaagaaggaagaaattccctgcaacaaaacttcagctaaactttgatttgtgtattgtttacataataattttaaagggtacataatgtgtaaagagtttggatagaacctctcttcatactatggttttcgtaaaggatctgttgttgttacggattcattttttccctctatttttataagagcagcagagttgtcttctcaaaacggctgccaagctctgcttcttgggaagatggatgcagtcatgtaggcctgagctgtccgtctttcaccgttaggtgggaggagcgtatgggtggacttgaaggacatggacgtggctggaatgagcacagcattgggtgagcgcacaaggatgaggacatcatgtgatcagttatgggtttgctcgcagggcacccagagattctcaaagaatcctgcagcctctttctgtgctggatttgcttgtcacggagaggcctccctccctttccaccccacccatggggcattatcctgtcactcccagccttgctccacacacacacaggtgggtacaagttccactggaggagaaaaggcaaggatggactttttccccttgtgagaggtttgatacccagaaaatgagctcaaaacctttacattagggttgcttgtaggaactggagcctggaggctgcatctacttcacctgtcactgctgagggagaggaggggagaaaggcccagcaacagcgtacagaggggtcagtcagcaagtccagagagcacatgcagggagatgtttggcccacaccgcacagccccgccatctccagtgggcgatgaaagatgtaggaaaggttgatttcaagatggaaatgacagcgctatccgcacagtatgaattagggatttgctgtgttagttgatttatccatccacacagaggggaggaaaaagacactcgttacttggtgggagattgagaaactgtggtacctaccacaaagtaatagctctgtttatgaagggcaagaaaggctacatttcagaatttgacacagtggagggtattagaggaaatcaaagaggagttgtgtggaaaatcaggttgtgtaaatgaaggtatgaatgctcagccagaggcaagatcagggagatggtacaaggcctgtttgttacatggatgagtcgggtgcctggttgtgtgtgtgtgtgtgtgtgtgtgtgtgtgtgtgtgaagtcagagttgaaattcagaagatcagactatggaaatcactgcccttttttttttaaaagctaatgaactacatacagacctaaaaggccttaatgaaatccgaacaattttcttttactttcaagatcaaaaacatgcacccaacccagccttggatgccaccaccaggtttttgaagcccttttgagtctaagaaggtgagaacaatgtaaccatagaaagcctttcgtgagcagagaaggcttgaatccacaatttcattcgctgaattaaaaaaaaaaggttcagacctctccttgggtgactaagttctaaagatgcaaatccatgtgcagaaagagatggcattttttagttgattatttttaaccaagtgccattaacattcatcccccacatcccttttctaaacaagcttagtgttacttggggaatgtgttgggatggacgatcacatgtaaggcaggaagaataggtcaaaggttgaaggccaaaggtaagaccagagggtttgcgaatgtgggtttgtaggatactgagaaagtgaataaagaggagaaaaaaccatggtattacacatcttgctgagaaaggaaagcattcggatctgctgcaaaaacacatatatccataaagactcatgttattcagaaaacagattgtgaacacaatcacattcgcatgaatcctttaaaaggaagaagaccttaaagtatctgcaaatctgaatttctatttattccttcactgaatatagaaacaatggttatctgattattagagatattattttggatatgttacttattaacttgctatggctggtaaccatgataaagtctgttattaataacaacataattctttttttaaagaagaaaagcttatttttcattgacagtgtatagatttatctacttagttgtgttttgctattagtgttttaattttttttttaagttgagtgtttgataaattttaagaccctgtccccaccttgttttgagtcctgtgttgactacaggtatatagctcaatttaaaaatcctaaagcaaaagaattttatttataaaagaatcaaacagttgcatgcatgaggctgtgaagtcagatatttagtaataaaagcagcagtgcctttttttgtatttacccattgacccccaccaaatgcaactgttttatattaagaaaatagtaacaattttaaaatctcagagtaaaatctatttcactacatgcttttccccccttgttctgatttaagcagtgtgtacttggcatctctacattgtcctagggacagtggtgttctacaatattatcatgtatgatgttttattggtgctttttattcatagtggcttcttaccagaaacagtaggaagaaacacatgaactgtgtacaagacatgaaacattgctgctgatatgttgttttttcacatgcttttgagttttcactttttaaacgagagccagcaagcaaaatagatgtggctgggtctgcctgtccgggcggctctttgcaccgagctctcaaatcctgtgtattgagggttcctttttggtactcaggattggagctacagctgggcccccctctctcccattcgtttgaagagacactgagggaaacaagggtttcttttgaggtgtccttggctgccttttacgggatgggagccttctccggatcttttgttcttctgcacctcttgtagctactgccggtgcaaggttgtagatgttattccccaggagcctgggctggggggctgagctgggctgaatgcaaaagcatgcaaccagaaggcgggcaaggggaggaaaagcaggcctggcctcattggtcccctggagatgtctgtagcagtcagctccagcttgggcctggggaagcagcctgaccaaggcgctcaggtgtgcctgttacaagaagaacctgcagaaggataatttgcacatggagctgtgataacactaatgttgattttttttttttttacaagtcatcagagatgtttgcaaagtgagttttatttttttgtaattcctttatctttacttaaaggtgaatgtgtattcctctgggaggaataggaagaaaacaggaatgttaataatgtcgaacagaaaacttcctcccttattaatatataatcctcatgtatttatgcctaatgtaagctgacttttaaaaagctttcttttgttgcatgccctgtgcaggcatctgtattgtacatgcatgcctttcgtcctgttttcctgtataaagttagtgaacaaagaaatatttttgcctagttcatgttgccaagcaatgcatattttttaaatttgtcatatatggaaagagcatgtttgttacatgtaaaagctttactgatatacagatatactaatgtttgaagatgctgttctttgcaagtgtacagttttcaaatgttgttaccagtgaaacacccttgtggtttaaacttgctacaatgtatttattattcatttcctcccatgtaactaagaatcatggctatatttcatatcaacgttatattgaaagtgaagggaaatgattaatacaaggttttgtaa

SEQ ID NO: 444789 - DNA, 2851 bp, Homo sapiens
  misc_feature (2739)..(2739): n is a, c, g, or t
actcaataatgatgagctgtgcccagtggacacctgaggagggaagaaaaggagaaggacaaagtggagagggaggagatggagcaatctcttatgtgatcattccatcaactcacaaatttttcacctaacacctggttcaactgtaatgtgctcagctccgtataacctggacagcagctgtgccctcacccctaaactcagcaaaatattatggtcctctaatcaagagaattttgctcctgttactgcatgtcttgtgggttcatcgtcagaccagtgagttgataccaaacttcaccaaacggttctccggagcaaccgtttagaggaatcattaaccaatggcaacaggaatccaaggataaagtgatttccctcctgttaactcatctgcctttgctgaagccaggaaacctcgacgcgaaagtagaatatatgaaactgctgcccaaaatcctggctcactctattgaacacaaccagcacattgaggagagcaggcagctgctgtcctatgctttgatacatccagccacttcgttagaagaccgtagtgctttagccatgtggctgaatcacttggaggaccgcacgtcgaccagctttggtggccagaaccgaggccgctcagactctgtggattatggacagacacactactatcaccaaagacagaactctgatgacaagctcaatgggtggcagaactctcgggattctgggatttgcatcaatgcctccaactggcaggacaaaagcatggggtgtgagaatggccatgtgcccctctactcctcctcatctgtccccaccacaatcaatacgattggaaccagcacaagtacaaatgttccagcctggctgaaaagcctccgcctgcacaaatatgccgcgcttttctcccagatgacctatgaggagatgatggccctcaccgagtgccagctggaggcgcagaatgttaccaaaggtgcaagacacaaaattgtcatcagtattcagaagctcaaagaaagacaaaatctcctgaagtctttggaaagggacatcatcgaggggggcagcctgcgcatcccgctccaggaactgcaccagatgatcctgactccgatcaaggcctacagctccccgagcaccacccccgaggctcgccgccgggagccccaggccccgcgtcagccctcactgatgggccccgagagccagagccccgactgcaaagatggggccgcagccactggcgccacggccaccccctcggccggggccagcggggggctccagccgcaccagctgagcagctgcgatggggagctggccgtcgcccccctgccagagggggacctccccgggcagttcacacgcgtcatggggaaagtgtgcacacagctcttggtctccagacctgatgaggaaaatataagttcctatttacagctcatagacaagtgtctaattcatgaggcatttacagagacacagaaaaaaagattgttgtcatggaaacagcaggtgcagaagctctttcggtctttccctcggaaaacccttctagacatatcaggatatcgacagcaaagaaatcgaggctttgggcaatccaactccctcccgacggctggctctgtgggcggtggcatgggcagacggaacccgcgccagtaccagatcccctctcggaacgtcccttccgcccgcctgggcctcttgggcaccagtggattcgtcagctccaaccagcgcaacaccacagctacccccaccatcatgaaacaaggaagacagaacctgtggtttgccaaccccgggggcagcaatagcatgccaagccgcacccacagctcagtccagaggacccgctcgctgcccgtgcacacttccccacagaacatgctgatgttccagcagccagaattccagcttcccgtgaccgaacctgacatcaacaacaggctggagtcgttgtgcctcagtatgaccgaacacgccctgggagacggggttgaccggacctccaccatctagaagctgaagatgagagtgaccgcgctggccgtgaaatcgactgctgcgggtccagtgtccgccatcttcagggttgcacagaatcctccaagatactttgcagccttttttccccctggtccctctcccgttttgattttgtgagagcgtaggtcatcctcgtaaacatatcagtagacctggggttggttattttgtcatttgtttctgtcatgggatggtttggtgtgtggggtggggaggggtctctagggaattatgagactgggaggggggtggagggaatgcaggtagctctctggatggaacggggacaggggaaagagtactgccatgaaagagataggagacacataagaggacagcagaagccctggccctggggaggcttctcggaaggcctggcttcacaggcaggccacagaaggatatcgcgggcacgtgcacccaaagcaagatagtggcttcccttttatatccaatctaatcctgattggatgtccctgaggcccctgctggaaacagccataggagagggcccatggcagtaggggaaagaaggaagaaagcctgctaaacaaaccaagtgagatgcacagagttatacaatgaagaagagctttttagagagggaaagagagaaagaaaggtcagactaggatttaacttgggtctaagagcagcagagcccttccaccttctgatcctgangcagtgagaccctcttattctagtgaagaccataactcactgctgtaagaaaaagaccctgttttatggaggcagggactatagataagctgatttctgaaggacccagctg

SEQ ID NO: 444790 - DNA, 1187 bp, Homo sapiens
agagcaaggtgggaggggcgcgctggggagcttcggcgcatgcgcgctgaggcctgcctgaccgaccttcagcagggctgtggctaccatgttctctcgcgcgggtgtcgctgggctgtcggcctggaccttgcagccgcaatggattcaagttcgaaatatggcaactttgaaagatatcaccaggagactaaagtccatcaaaaacatccagaaaattaccaagtctatgaaaatggtagcggcagcaaaatatgcccgagctgagagagagctgaaaccagctcgaatatatggattgggatctttagctctgtatgaaaaagctgatatcaaggggcctgaagacaagaagaaacacctccttattggtgtgtcctcagatcgaggactgtgtggtgctattcattcctccattgctaaacagatgaaaagcgaggttgctacactaacagcagctgggaaagaagttatgcttgttggaattggtgacaaaatcagaggcatactttataggactcattctgaccagtttctggtggcattcaaagaagtgggaagaaagccccccacttttggagatgcgtcagtcattgcccttgaattactaaattctggatatgaatttgatgaaggctccatcatctttaataaattcaggtctgtcatctcctataagacagaagaaaagcccatcttttcccttaataccgttgcaagtgctgacagcatgagtatctatgacgatattgatgctgacgtgctgcaaaattaccaagaatacaatctggccaacatcatctactactctctgaaggagtccaccactagtgagcagagtgccaggatgacagccatggacaatgccagcaagaatgcttctgagatgattgacaaattgacattgacattcaaccgtacccgccaagctgtcatcacaaaagagttgattgaaattatctctggtgctgcagctctggattaatgaaaatcaagttccatcctcagacaagaggtaaagaaggaaaattcagccagttgattttgtttttagcttactgctgcctttgtccgaagaaactgttcctccattatttgaattactgaagacagcaagatatttgtaaattatcttaaaataaacaacttaaaataaaatcattgtttttcttatatataagaacaat

SEQ ID NO: 444791 - DNA, 1120 bp, Homo sapiens
agagcaaggtgggaggggcgcgctggggagcttcggcgcatgcgcgctgaggcctgcctgaccgaccttcagcagggctgtggctaccatgttctctcgcgcgggtgtcgctgggctgtcggcctggaccttgcagccgcaatggattcaagttcgaaatatggcaactttgaaagatatcaccaggagactaaagtccatcaaaaacatccagaaaattaccaagtctatgaaaatggtagcggcagcaaaatatgcccgagctgagagagagctgaaaccagctcgaatatatggattgggatctttagctctgtatgaaaaagctgatatcaaggggcctgaagacaagaagaaacacctccttattggtgtgtcctcagatcgaggactgtgtggtgctattcattcctccattgctaaacagatgaaaagcgaggttgctacactaacagcagctgggaaagaagttatgcttgttggaattggtgacaaaatcagaggcatactttataggactcattctgaccagtttctggtggcattcaaagaagtgggaagaaagccccccacttttggagatgcgtcagtcattgcccttgaattactaaattctggatatgaatttgatgaaggctccatcatctttaataaattcaggtctgtcatctcctataagacagaagaaaagcccatcttttcccttaataccgttgcaagtgctgacagcatgagtatctatgacgatattgatgctgacgtgctgcaaaattaccaagaatacaatctggccaacatcatctactactctctgaaggagtccaccactagtgagcagagtgccaggatgacagccatggacaatgccagcaagaatgcttctgagatgattgacaaattgacattgacattcaaccgtacccgccaagctgtcatcacaaaagagttgattgaaattatctctggtgctgcagctctgtaaagaaggaaaattcagccagttgattttgtttttagcttactgctgcctttgtccgaagaaactgttcctccattatttgaattactgaagacagcaagatatttgtaaattatcttaaaataaacaacttaaaataaa

SEQ ID NO: 444792 - DNA, 982 bp, Homo sapiens
acgcggttccccagtctactaggcggcttttataccccgccgctccgggatagtccttcaacatctaaattccagtttagaatgtaggcagcaaatgccggtaagaagctgaccgctcgaaattgatgggatttagctctgtatgaaaaagctgatatcaaggggcctgaagacaagaagaaacacctccttattggtgtgtcctcagatcgaggactgtgtggtgctattcattcctccattgctaaacagatgaaaagcgaggttgctacactaacagcagctgggaaagaagttatgcttgttggaattggtgacaaaatcagaggcatactttataggactcattctgaccagtttctggtggcattcaaagaagtgggaagaaagccccccacttttggagatgcgtcagtcattgcccttgaattactaaattctggatatgaatttgatgaaggctccatcatctttaataaattcaggtctgtcatctcctataagacagaagaaaagcccatcttttcccttaataccgttgcaagtgctgacagcatgagtatctatgacgatattgatgctgacgtgctgcaaaattaccaagaatacaatctggccaacatcatctactactctctgaaggagtccaccactagtgagcagagtgccaggatgacagccatggacaatgccagcaagaatgcttctgagatgattgacaaattgacattgacattcaaccgtacccgccaagctgtcatcacaaaagagttgattgaaattatctctggtgctgcagctctggattaatgaaaatcaagttccatcctcagacaagaggtaaagaaggaaaattcagccagttgattttgtttttagcttactgctgcctttgtccgaagaaactgttcctccattatttgaattactgaagacagcaagatatttgtaaattatcttaaaataaacaacttaaaataaa

SEQ ID NO: 444793 - DNA, 557 bp, Homo sapiens
  misc_feature (38)..(38): n is a, c, g, or t
  misc_feature (59)..(59): n is a, c, g, or t
gcgccctggattactaattctggggattgattgaggcnccctcctctttaataaattcnggtctgtcatctcctataagacagaagaaaagcccatcttttcccttaataccgttgcaagtgctgacagcatgagtatctatgacgatattgatgctgacgtgctgcaaaattaccaagaatacaatctggccaacatcatctactactctctgaaggagtccaccactagtgagcagagtgccaggatgacagccatggacaatgccagcaagaatgcttctgagatgattgacaaattgacattgacattcaaccgtacccgccaagctgtcatcacaaaagagttgattgaaattatctctggtgctgcagctctggattaatgaaaatcaagttccatcctcagacaagaggtaaagaaggaaaattcagccagttgattttgtttttagcttactgctgcctttgtccgaagaaactgttcctccattatttgaattactgaagacagcaagatatttgtaaattatcttaaaataaacaacttaaaataaa

SEQ ID NO: 444794 - DNA, 872 bp, Homo sapiens
  misc_feature (38)..(38): n is a, c, g, or t
  misc_feature (59)..(59): n is a, c, g, or t
gcgccctggattactaattctggggattgattgaggcnccctcctctttaataaattcnggtctgtcatctcctataagacagaagaaaagcccatcttttcccttaataccgttgcaagtgctgacagcatgagtatctatgacgatattgatgctgacgtgctgcaaaattaccaagaatacaatctggccaacatcatctactactctctgaaggagtccaccactagtgagcagagtgccaggatgacagccatggacaatgccagcaagaatgcttctgagatgattgacaaattgacattgacattcaaccgtacccgccaagctgtcatcacaaaagagttgattgaaattatctctggtgctgcagctctggattaatgaaaatcaagttccatcctcagacaagaggtaaagaaggaaaattcagccagttgattttgtttttagcttactgctgcctttgtccgaagaaactgttcctccattatttgaattactgaagacagcaagatatttgtaaattatcttaaaataaacaacttaaaataaaaaaaacaaaaaacaacacaacaacaacaaagaacagaaagcaaaaaaagaggcgaacaaagggacaaccagcacacgaagcaaggatgcaaaaaaaaaagagggtacgggcttattcattacatccacgaggaacagctatcagaaagcgaacgatagttagtaagagagacacgatagaggatgaattaaaggagggggcctataatactacggtggtgaaaacaagagtactagtgaggaaccatggggggaaaagaacaccacatgatagtggaaaacaacagggtatgacacaatcttgggtagaaggctt

SEQ ID NO: 444795 - DNA, 1304 bp, Homo sapiens
agagcaaggtgggaggggcgcgctggggagcttcggcgcatgcgcgctgaggcctgcctgaccgaccttcagcagggctgtggctaccatgttctctcgcgcgggtgtcgctgggctgtcggcctggaccttgcagccgcaatggattcaagttcgaaatatggcaactttgaaagatatcaccaggagactaaagtccatcaaaaacatccagaaaattaccaagtctatgaaaatggtagcggcagcaaaatatgcccgagctgagagagagctgaaaccagctcgaatatatggattgggatctttagctctgtatgaaaaagctgatatcaaggggcctgaagacaagaagaaacacctccttattggtgtgtcctcagatcgaggactgtgtggtgctattcattcctccattgctaaacagatgaaaagcgaggttgctacactaacagcagctgggaaagaagttatgcttgttggaattggtgacaaaatcagaggcatactttataggactcattctgaccagtttctggtggcattcaaagaagtgggaagaaagccccccacttttggagatgcgtcagtcattgcccttgaattactaaattctggatatgaatttgatgaaggctccatcatctttaataaattcaggtctgtcatctcctataagacagaagaaaagcccatcttttcccttaataccgttgcaagtgctgacagcatgagtatctatgacgatattgatgctgacgtgctgcaaaattaccaagaatacaatctggccaacatcatctactactctctgaaggagtccaccactagtgagcagagtgccaggatgacagccatggacaatgccagcaagaatgcttctgagatgattgacaaattgacattgacattcaaccgtacccgccaagctgtcatcacaaaagagttgattgaaattatctctggtgctgcagctctggattaatgaaaatcaagttccatcctcagacaagaggtaaagaaggaaaattcagccagttgattttgtttttagcttactgctgcctttgtccgaagaaactgttcctccattatttgaattactgaagacagcaagatatttgtaaattatcttaaaataaacaacttaaaataaaaaaaaaaaaaaagggggggggcaaaagaatcctcgggggggcaattaagggtacccgttttggccaaggggcccaaggaggggataaaaaaaaggaggggggttaaacgggggagggaaacggctgggcttggaaaggaaccttcgg

SEQ ID NO: 444796 - DNA, 1375 bp, Homo sapiens
  misc_feature (1206)..(1206): n is a, c, g, or t
  misc_feature (1225)..(1225): n is a, c, g, or t
  misc_feature (1249)..(1249): n is a, c, g, or t
  misc_feature (1253)..(1254): n is a, c, g, or t
  misc_feature (1256)..(1257): n is a, c, g, or t
agagcaaggtgggaggggcgcgctggggagcttcggcgcatgcgcgctgaggcctgcctgaccgaccttcagcagggctgtggctaccatgttctctcgcgcgggtgtcgctgggctgtcggcctggaccttgcagccgcaatggattcaagttcgaaatatggcaactttgaaagatatcaccaggagactaaagtccatcaaaaacatccagaaaattaccaagtctatgaaaatggtagcggcagcaaaatatgcccgagctgagagagagctgaaaccagctcgaatatatggattgggatctttagctctgtatgaaaaagctgatatcaaggggcctgaagacaagaagaaacacctccttattggtgtgtcctcagatcgaggactgtgtggtgctattcattcctccattgctaaacagatgaaaagcgaggttgctacactaacagcagctgggaaagaagttatgcttgttggaattggtgacaaaatcagaggcatactttataggactcattctgaccagtttctggtggcattcaaagaagtgggaagaaagccccccacttttggagatgcgtcagtcattgcccttgaattactaaattctggatatgaatttgatgaaggctccatcatctttaataaattcaggtctgtcatctcctataagacagaagaaaagcccatcttttcccttaataccgttgcaagtgctgacagcatgagtatctatgacgatattgatgctgacgtgctgcaaaattaccaagaatacaatctggccaacatcatctactactctctgaaggagtccaccactagtgagcagagtgccaggatgacagccatggacaatgccagcaagaatgcttctgagatgattgacaaattgacattgacattcaaccgtacccgccaagctgtcatcacaaaagagttgattgaaattatctctggtgctgcagctctggattaatgaaaatcaagttccatcctcagacaagaggtaaagaaggaaaattcagccagttgattttgtttttagcttactgctgcctttgtccgaagaaactgttcctccattatttgaattactgaagacagcaagatatttgtaaattatcttaaaataaacaacttaaaataaaaaaaaaaaaaaaaaaaaaaaaaaaaaaaaaaaaaaaaaaaaaaaaaaanaaaaaaaaaaaaaaaaaanaaaaaaaaaaaaaaaaaaaaaaanaaannanntttctttttattattgaaaaatttttttgtggggcgccaaatttgggctccattgcaaatttccctttttggggggtgttataaaaacagggcggggtttaaacaagggtggagggga

SEQ ID NO: 444797 - DNA, 1805 bp, Homo sapiens
agagcaaggtgggaggggcgcgctggggagcttcggcgcatgcgcgctgaggcctgcctgaccgaccttcagcagggctgtggctaccatgttctctcgcgcgggtgtcgctgggctgtcggcctggaccttgcagccgcaatggattcaagttcgaaatatggcaactttgaaagatatcaccaggagactaaagtccatcaaaaacatccagaaaattaccaagtctatgaaaatggtagcggcagcaaaatatgcccgagctgagagagagctgaaaccagctcgaatatatggattgggatctttagctctgtatgaaaaagctgatatcaaggggcctgaagacaagaagaaacacctccttattggtgtgtcctcagatcgaggactgtgtggtgctattcattcctccattgctaaacagatgaaaagcgaggttgctacactaacagcagctgggaaagaagttatgcttgttggaattggtgacaaaatcagaggcatactttataggactcattctgaccagtttctggtggcattcaaagaagtgggaagaaagccccccacttttggagatgcgtcagtcattgcccttgaattactaaattctggatatgaatttgatgaaggctccatcatctttaataaattcaggtctgtcatctcctataagacagaagaaaagcccatcttttcccttaataccgttgcaagtgctgacagcatgagtatctatgacgatattgatgctgacgtgctgcaaaattaccaagaatacaatctggccaacatcatctactactctctgaaggagtccaccactagtgagcagagtgccaggatgacagccatggacaatgccagcaagaatgcttctgagatgattgacaaattgacattgacattcaaccgtacccgccaagctgtcatcacaaaagagttgattgaaattatctctggtgctgcagctctggattaatgaaaatcaagttccatcctcagacaagaggtaaagttcacacattcttcccatgtctgttcagaaaagaaacctattcagatataagttaagctaatttagtaatcctagaattgtcctctgagagatttagatggatgggccacttcacagtagcagccaactcacgggagcacctgggcaacgctagtggacttttttgtagtgagtgtgttgatcatagaaaatgtagatataaggaaataaactttgaggatagagaattaacattattttgagatattatatataggttgtgaagagtggtggttgtcacactttatggtctctggaccccttaatgtctgattcatgtagcagaagccagctagattttcatctgtctctattcattttgttgtgatgtcatggatcatgtggcctctggaaaactctactgtatactcgagaatgagaatataacaggcaaaataacattatcatgaaaatagttttgacctcatgaaccccatgaaaggttccccagaccaaaattttagaatcactggtatagggtaacactttattgtgtaaattcagttctctgtaccccacttaaatatgtattattatctcttgacattattttcccaaaaaatgctgtttgatttcttacttgttctgtactttgtttttcaggtaaagaaggaaaattcagccagttgattttgtttttagcttactgctgcctttgtccgaagaaactgttcctccattatttgaattactgaagacagcaagatatttgtaaattatcttaaaataaacaacttaaaataaa

SEQ ID NO: 444798 - DNA, 1134 bp, Homo sapiens
agagcaaggtgggaggggcgcgctggggagcttcggcgcatgcgcgctgaggcctgcctgaccgaccttcagcagggctgtggctaccatgttctctcgcgcgggtgtcgctgggctgtcggcctggaccttgcagccgcaatggattcaagttcgaaatatggcaactttgaaagatatcaccaggagactaaagtccatcaaaaacatccagaaaattaccaagtctatgaaaatggtagcggcagcaaaatatgcccgagctgagagagagctgaaaccagctcgaatatatggattgggatctttagctctgtatgaaaaagctgatatcaaggggcctgaagacaagaagaaacacctccttattggtgtgtcctcagatcgaggactgtgtggtgctattcattcctccattgctaaacagatgaaaagcgaggttgctacactaacagcagctgggaaagaagttatgcttgttggaattggtgacaaaatcagaggcatactttataggactcattctgaccagtttctggtggcattcaaagaagtgggaagaaagccccccacttttggagatgcgtcagtcattgcccttgaattactaaattctggatatgaatttgatgaaggctccatcatctttaataaattcaggtctgtcatctcctataagacagaagaaaagcccatcttttcccttaataccgttgcaagtgctgacagcatgagtatctatgacgatattgatgctgacgtgctgcaaaattaccaagaatacaatctggccaacatcatctactactctctgaaggagtccaccactagtgagcagagtgccaggatgacagccatggacaatgccagcaagaatgcttctgagatgattgacaaattgacattgacattcaaccgtacccgccaagctgtcatcacaaaagagttgattgaaattatctctggtgctgcagctctggattaatgaaaatcaagttccatcctcagacaagagaggatacttcaaccagctgattttgcgttatagactaccgctcgccttagctacctgcaagaaactgtataactctagagttacgtattactggccgtcctgtatactcagaacagcta

SEQ ID NO: 444799 - DNA, 1133 bp, Homo sapiens
  misc_feature (23)..(24): n is a, c, g, or t
aattcgcggccgcgtcgacagannacagaagggggagccgaccttcagcagggctgtggctaccatgttctctcgcgcgggtgtcgctgggctgtcggcctggaccttgcagccgcaatggattcaagttcgaaatatggcaactttgaaagatatcaccaggagactaaagtccatcaaaaacatccagaaaattaccaagtctatgaaaatggtagcggcagcaaaatatgcccgagctgagagagagctgaaaccagctcgaatatatggattgggatctttagctctgtatgaaaaagctgatatcaaggggcctgaagacaagaagaaacacctccttattggtgtgtcctcagatcgaggactgtgtggtgctattcattcctccattgctaaacagatgaaaagcgaggttgctacactaacagcagctgggaaagaagttatgcttgttggaattggtgacaaaatcagaggcatactttataggactcattctgaccagtttctggtggcattcaaagaagtgggaagaaagccccccacttttggagatgcgtcagtcattgcccttgaattactaaattctggatatgaatttgatgaaggctccatcatctttaataaattcaggtctgtcatctcctataagacagaagaaaagcccatcttttcccttaataccgttgcaagtgctgacagcatgagtatctatgacgatattgatgctgacgtgctgcaaaattaccaagaatacaatctggccaacatcatctactactctctgaaggagtccaccactagtgagcagagtgccaggatgacagccatggacaatgccagcaagaatgcttctgagatgattgacaaattgacattgacattcaaccgtacccgccaagctgtcatcacaaaagagttgattgaaattatctctggtgctgcagctctggattaatgaaaatcaagttccatcctcagacaagaggtaaagaaggaaaattcagccagttgattttgtttttagcttactgctgcctttgtccgaagaaactgttcctccattatttgaattactgaagacagcaagatatttgtaaattatcttaaaataaacaacttaaaataaa

SEQ ID NO: 444800 - DNA, 982 bp, Homo sapiens
  misc_feature (821)..(821): n is a, c, g, or t
  misc_feature (832)..(832): n is a, c, g, or t
  misc_feature (835)..(835): n is a, c, g, or t
agagcaaggtgggaggggcgcgctggggagcttcggcgcatgcgcgctgaggcctgcctgaccgaccttcagcagggctgtggctaccatgttctctcgcgcgggtgtcgctgggctgtcggcctggaccttgcagccgcaatggattcaagttcgaaatatggcaactttgaaagatatcaccaggagactaaagtccatcaaaaacatccagaaaattaccaagtctatgaaaatggtagcggcagcaaaatatgcccgagctgagagagagctgaaaccagctcgaatatatggattgggatctttagctctgtatgaaaaagctgatatcaaggggcctgaagacaagaagaaacacctccttattggtgtgtcctcagatcgaggactgtgtggtgctattcattcctccattgctaaacagatgaaaagcgaggttgctacactaacagcagctgggaaagaagttatgcttgttggaattggtgacaaaatcagaggcatactttataggactcattctgaccagtttctggtggcattcaaagaagtgggaagaaagccccccacttttggagatgcgtcagtcattgcccttgaattactaaattctggatatgaatttgatgaaggctccatcatctttaataaattcaggtctgtcatctcctataagacagaagaaaagcccatcttttcccttaataccgttgcaagtgctgacagcatgagtatctatgacgatattgatgctgacgtgctgcaaaattaccaaaattctctatacctctgagggtcccctatgggcgaggccgggnaacctggcatnccnagctcggatttgaatggtggtacgccgcgcggccaagggggaatcggggcgtagaaaacccacagaaaaaacactgctttgtctcaccgctttcgacgttctaaaaaacaacctcttctgctcttcgctcccgtcccacacaacacc

SEQ ID NO: 444801 - DNA, 842 bp, Homo sapiens
agagcaaggtgggaggggcgcgctggggagcttcggcgcatgcgcgctgaggcctgcctgaccgaccttcagcagggctgtggctaccatgttctctcgcgcgggtgtcgctgggctgtcggcctggaccttgcagccgcaatggattcaagttcgaaatatggcaactttgaaagatatcaccaggagactaaagtccatcaaaaacatccagaaaattaccaagtctatgaaaatggtagcggcagcaaaatatgcccgagctgagagagagctgaaaccagctcgaatatatggattgggatctttagctctgtatgaaaaagctgatatcaaggggcctgaagacaagaagaaacacctccttattggtgtgtcctcagatcgaggactgtgtggtgctattcattcctccattgctaaacagatgaaaagcgaggttgctacactaacagcagctgggaaagaagttatgcttgttggaattggtgacaaaatcagaggcatactttataggactcattctgaccagtttctggtggcattcaaagaagtgggaagaaagccccccacttttggagatgcgtcagtcattgcccttgaattactaaattctggatatgaatttgatgaaggctccatcatctttaataaattcaggtctgtcatctcctataagacagaagaaaagcccatcttttcccttaataccgttgcaagtgctgacagcatgagtatctatgacgatattgatgctgacgtgctgcaaaattaccaatactttggcctatttactactctttgggggtcacccccttgggggcccagggcccggattgccc

SEQ ID NO: 444802 - DNA, 860 bp, Homo sapiens
agagcaaggtgggaggggcgcgctggggagcttcggcgcatgcgcgctgaggcctgcctgaccgaccttcagcagggctgtggctaccatgttctctcgcgcgggtgtcgctgggctgtcggcctggaccttgcagccgcaatggattcaagttcgaaatatggcaactttgaaagatatcaccaggagactaaagtccatcaaaaacatccagaaaattaccaagtctatgaaaatggtagcggcagcaaaatatgcccgagctgagagagagctgaaaccagctcgaatatatggattgggatctttagctctgtatgaaaaagctgatatcaaggggcctgaagacaagaagaaacacctccttattggtgtgtcctcagatcgaggactgtgtggtgctattcattcctccattgctaaacagatgaaaagcgaggttgctacactaacagcagctgggaaagaagttatgcttgttggaattggtgacaaaatcagaggcatactttataggactcattctgaccagtttctggtggcattcaaagaagtgggaagaaagccccccacttttggagatgcgtcagtcattgcccttgaattactaaattctggatatgaatttgatgaaggctccatcatctttaataaattcaggtctgtcatctcctataagacagaagaaaagcccatcttttcccttaataccgttgcaagtgctgacaagatgaatttttatgacaaattggtgctgaccggctgcaaaataccatacaactcgcccttatttattatttttggagggatccccccttgttagccaagtgcccggataacgccttggccattgcacccgg

SEQ ID NO: 444803 - DNA, 1122 bp, Homo sapiens
agagcaaggtgggaggggcgcgctggggagcttcggcgcatgcgcgctgaggcctgcctgaccgaccttcagcagggctgtggctaccatgttctctcgcgcgggtgtcgctgggctgtcggcctggaccttgcagccgcaatgtcaccaggagactaaagtccatcaaaaacatccagaaaattaccaagtctatgaaaatggtagcggcagcaaaatatgcccgagctgagagagagctgaaaccagctcgaatatatggattgggatctttagctctgtatgaaaaagctgatatcaaggggcctgaagacaagaagaaacacctccttattggtgtgtcctcagatcgaggactgtgtggtgctattcattcctccattgctaaacagatgaaaagcgaggttgctacactaacagcagctgggaaagaagttatgcttgttggaattggtgacaaaatcagaggcatactttataggactcattctgaccagtttctggtggcattcaaagaagtgggaagaaagccccccacttttggagatgcgtcagtcattgcccttgaattactaaattctggatatgaatttgatgaaggctccatcatctttaataaattcaggtctgtcatctcctataagacagaagaaaagcccatcttttcccttaataccgttgcaagtgctgacagcatgagtatctatgacgatattgatgctgacgtgctgcaaaattaccaagaatacaatctggccaacatcatctactactctctgaaggagtccaccactagtgagcagagtgccaggatgacagccatggacaatgccagcaagaatgcttctgagatgattgacaaattgacattgacattcaaccgtacccgccaagctgtcatcacaaaagagttgattgaaattatctctggtgctgcagctctggattaatgaaaatcaagttccatcctcagacaagaggtaaagaaggaaaattcagccagttgattttgtttttagcttactgctgcctttgtccgaagaaactgttcctccattatttgaattactgaagacagcaagatatttgtaaattatcttaaaataaacaacttaaaataaa

SEQ ID NO: 444804 - DNA, 1110 bp, Homo sapiens
agagcaaggtgggaggggcgcgctggggagcttcggcgcatgcgcgctgaggcctgcctgaccgaccttcagcagggctgtggctaccatgttctctcgcgcgggtgtcgctgggctgtcggcctggaccttgcagccgcaatggattcaagttcgaaatatggcaactttgaaagatatcaccaggagactaaagtccatcaaaaacatccagaaaattaccaagtctatgaaaatggtagcggcagcaaaatatgcccgagctgagagagagctgaaaccagctcgaatatatggattgggatctttagctctgtatgaaaaagctgatatcaaggggcctgaagacaagaagaaacacctccttattggtgtgtcctcagatcgaggactgtgtggtgctattcattcctccattgctaaacagatgaaaagcgaggttgctacactaacagcagctgggaaagaagttatgcttgttggaattggtgacaaaattcaaagaagtgggaagaaagccccccacttttggagatgcgtcagtcattgcccttgaattactaaattctggatatgaatttgatgaaggctccatcatctttaataaattcaggtctgtcatctcctataagacagaagaaaagcccatcttttcccttaataccgttgcaagtgctgacagcatgagtatctatgacgatattgatgctgacgtgctgcaaaattaccaagaatacaatctggccaacatcatctactactctctgaaggagtccaccactagtgagcagagtgccaggatgacagccatggacaatgccagcaagaatgcttctgagatgattgacaaattgacattgacattcaaccgtacccgccaagctgtcatcacaaaagagttgattgaaattatctctggtgctgcagctctggattaatgaaaatcaagttccatcctcagacaagaggtaaagaaggaaaattcagccagttgattttgtttttagcttactgctgcctttgtccgaagaaactgttcctccattatttgaattactgaagacagcaagatatttgtaaattatcttaaaataaacaacttaaaataaa

SEQ ID NO: 444805 - DNA, 1129 bp, Homo sapiens
agagcaaggtgggaggggcgcgctggggagcttcggcgcatgcgcgctgaggcctgcctgaccgaccttcagcagggctgtggctaccatgttctctcgcgcgggtgtcgctgggctgtcggcctggaccttgcagccgcaatggattcaagttcgaaatatggcaactttgaaagatatcaccaggagactaaagtccatcaaaaacatccagaaaattaccaagtctatgaaaatggtagcggcagcaaaatatgcccgagctgagagagagctgaaaccagctcgaatatatggattgggatctttagctctgtatgaaaaagctgatatcaaggggcctgaagacaagaagaaacacctccttattggtgtgtcctcagatcgaggactgtgtggtgctattcattcctccattgctaaacagatgaaaagcgaggttgctacactaacagcagctgggaaagaagttatgcttgttggaattggtgacaaaatcagaggcatactttatagttcaaagaagtgggaagaaagccccccacttttggagatgcgtcagtcattgcccttgaattactaaattctggatatgaatttgatgaaggctccatcatctttaataaattcaggtctgtcatctcctataagacagaagaaaagcccatcttttcccttaataccgttgcaagtgctgacagcatgagtatctatgacgatattgatgctgacgtgctgcaaaattaccaagaatacaatctggccaacatcatctactactctctgaaggagtccaccactagtgagcagagtgccaggatgacagccatggacaatgccagcaagaatgcttctgagatgattgacaaattgacattgacattcaaccgtacccgccaagctgtcatcacaaaagagttgattgaaattatctctggtgctgcagctctggattaatgaaaatcaagttccatcctcagacaagaggtaaagaaggaaaattcagccagttgattttgtttttagcttactgctgcctttgtccgaagaaactgttcctccattatttgaattactgaagacagcaagatatttgtaaattatcttaaaataaacaacttaaaataaa

SEQ ID NO: 444806 - DNA, 1061 bp, Homo sapiens
gcacgagggcatattttgctgccgctaccattttcatagacttggtaattttctggatgtttttgatggactttagtctcctggtgatatctttcaaagttgccatatttcgaacttgaatccattgcggctgcaaggtccaggccgacagcccagcgacacccgcgctgagagagagctgaaaccagctcgaatatatggattgggatctttagctctgtatgaaaaagctgatatcaaggggcctgaagacaagaagaaacacctccttattggtgtgtcctcagatcgaggactgtgtggtgctattcattcctccattgctaaacagatgaaaagcgaggttgctacactaacagcagctgggaaagaagttatgcttgttggaattggtgacaaaatcagaggcatactttataggactcattctgaccagtttctggtggcattcaaagaagtgggaagaaagccccccacttttggagatgcgtcagtcattgcccttgaattactaaattctggatatgaatttgatgaaggctccatcatctttaataaattcaggtctgtcatctcctataagacagaagaaaagcccatcttttcccttaataccgttgcaagtgctgacagcatgagtatctatgacgatattgatgctgacgtgctgcaaaattaccaagaatacaatctggccaacatcatctactactctctgaaggagtccaccactagtgagcagagtgccaggatgacagccatggacaatgccagcaagaatgcttctgagatgattgacaaattgacattgacattcaaccgtacccgccaagctgtcatcacaaaagagttgattgaaattatctctggtgctgcagctctggattaatgaaaatcaagttccatcctcagacaagaggtaaagaaggaaaattcagccagttgattttgtttttagcttactgctgcctttgtccgaagaaactgttcctccattatttgaattactgaagacagcaagatatttgtaaattatcttaaaataaacaacttaaaataaa

SEQ ID NO: 444807 - DNA, 990 bp, Homo sapiens
agagcaaggtgggaggggcgcgctggggagcttcggcgcatgcgcgctgaggcctgcctgaccgaccttcagcagggctgtggctaccatgttctctcgcgcgggtgtcgctgggctgtcggcctggaccttgcagccgcaatgctctgtatgaaaaagctgatatcaaggggcctgaagacaagaagaaacacctccttattggtgtgtcctcagatcgaggactgtgtggtgctattcattcctccattgctaaacagatgaaaagcgaggttgctacactaacagcagctgggaaagaagttatgcttgttggaattggtgacaaaatcagaggcatactttataggactcattctgaccagtttctggtggcattcaaagaagtgggaagaaagccccccacttttggagatgcgtcagtcattgcccttgaattactaaattctggatatgaatttgatgaaggctccatcatctttaataaattcaggtctgtcatctcctataagacagaagaaaagcccatcttttcccttaataccgttgcaagtgctgacagcatgagtatctatgacgatattgatgctgacgtgctgcaaaattaccaagaatacaatctggccaacatcatctactactctctgaaggagtccaccactagtgagcagagtgccaggatgacagccatggacaatgccagcaagaatgcttctgagatgattgacaaattgacattgacattcaaccgtacccgccaagctgtcatcacaaaagagttgattgaaattatctctggtgctgcagctctggattaatgaaaatcaagttccatcctcagacaagaggtaaagaaggaaaattcagccagttgattttgtttttagcttactgctgcctttgtccgaagaaactgttcctccattatttgaattactgaagacagcaagatatttgtaaattatcttaaaataaacaacttaaaataaa

SEQ ID NO: 444808 - DNA, 714 bp, Homo sapiens
agagcaaggtgggaggggcgcgctggggagcttcggcgcatgcgcgctgaggcctgcctgaccgaccttcagcagggctgtggctaccatgttctctcgcgcgggtgtcgctgggctgtcggcctggaccttgcagccgcaatggattcaagttcgaaatatggcaactttgaaagatatcaccaggagactaaagtccatcaaaaacatccagaaaattaccaagtctatgaaaatggtagcggcagcaaaatatgcccgagctgagagagagctgaaaccagctcgaatatatggattgggatctttagctctgtatgaaaaagctgatatcaaggggcctgaagacaagaagaaacacctccttattggtgtgtcctcagatcgaggactgtgtggtgctattcattcctccattgctaaacagatgaaaagcgaggttgctacactaacagcagctgggaaagaagttatgcttgttggaattggtgacaaaatcagaggcatactttataggactcattctgaccagtttctggtggcattcaaagaagtgggaagaaagccccccacttttggagatgcgtcagtcattgccctccgattcacttcctgcatatgaatactgacgaatgttccatctctctccattaatttccggccctgtcttcccctatacatctctacgccatcgctccactcttcccctttccg

SEQ ID NO: 444809 - DNA, 575 bp, Homo sapiens
  misc_feature (523)..(524): n is a, c, g, or t
  misc_feature (543)..(544): n is a, c, g, or t
  misc_feature (546)..(546): n is a, c, g, or t
  misc_feature (548)..(548): n is a, c, g, or t
  misc_feature (571)..(571): n is a, c, g, or t
agagcaaggtgggaggggcgcgctggggagcttcggcgcatgcgcgctgaggcctgcctgaccgaccttcagcagggctgtggctaccatgttctctcgcgcgggtgtcgctgggctgtcggcctggaccttgcagccgcaatggattcaagttcgaaatatggcaactttgaaagatatcaccaggagactaaagtccatcaaaaacatccagaaaattaccaagtctatgaaaatggtagcggcagcaaaatatgcccgagctgagagagagctgaaaccagctcgaatatatggattgggatctttagctctgtatgaaaaagctgatatcaaggggcctgaagacaagaagaaacacctccttattggtgtgtcctcagatcgaggactgtgtggtgctattcattcctccattgctaaacagatgaaaagcgaggttgctacactaacagcagctgggaaagaagttatgcttgttggaattggtgacaaaatcagaggcatactttatagactcatnngaccatttcggtggcatcnngngnaggcccccacttggagagcgtcntctg

SEQ ID NO: 444810 - DNA, 872 bp, Homo sapiens
agagcaaggtgggaggggcgcgctggggagcttcggcgcatgcgcgctgaggcctgcctgaccgaccttcagcagggctgtggctaccatgttctctcgcgcgggtgtcgctgggctgtcggcctggaccttgcagccgcaatggattcaagttcgaaatatggcaactttgaaagatatcaccaggagactaaagtccatcaaaaacatccagaaaattaccaagtctatgaaaatggtagcggcagcaaaatatgcccgagctgagagagagctgaaaccagctcgaatatatggattgggatctttagctctgtatgaaaaagctgatatcaaggggcctgaagacaagaagaaacacctccttattggtgtgtcctcagatcgaggactgtgtggtgctattcattcctccattgctaaacagatgaaaagcgaggttgctacactaacagcagctgggaaagaagttatgcttgttggaattggtgacaaaatcagaggcatactttataggtaatttaaatatatattgtttattttcataaagatgtaagcacgaataaatcttctctcaaaagttttgacaaactctcaaaaccttcatcaataacaaggtatattcttcagggccttttttggtatattcacaagggggtgtttgtttcctttttcttttttccaggatatattggaacatttctgttttccttcccctgttttctacctttgcttcttcatccggatcataagttgaatgccatgtgaatatcaaaagctatcagcattaagccaaatgaggcatctgaggagctgttacagcctggaaatgttagcaatagttcattaggattagaaggagaggaataaag

SEQ ID NO: 444811 - DNA, 1249 bp, Homo sapiens
ctgacattgaggcccgaggataccttgacccccgaggaggtttccctgagctgagatcaccccccctccctcccccctgggccaccgaaccagactccctctcccaaaaaaaaaaaacctctaaatatattgtgttaatttatagaaaaattgtaatttaaattacatattcatagtcttgcctacttgcatgagcatgtttttattgcttctaacctggattgaaatctatgactttttataacagtcattgagtctgtttcaaaggaatcttgtggtaagtatttttgcatgatgtactcaaggtatcaagtttaacaattgactttttttcattggaaagcatatgtgattaactagcatggattgcttcttgacctgcttgttttgtgtttgtctttttcttctaatataataaccagggattaatgaaaatcaagttccatcctcagacaagaggtaaagttcacacattcttcccatgtctgttcagaaaagaaacctattcagatataagttaagctaatttagtaatcctagaattgtcctctgagagatttagatggatgggccacttcacagtagcagccaactcacgggagcacctgggcaacgctagtggacttttttgtagtgagtgtgttgatcatagaaaatgtagatataaggaaataaactttgaggatagagaattaacattattttgagatattatatataggttgtgaagagtggtggttgtcacactttatggtctctggaccccttaatgtctgattcatgtagcagaagccagctagattttcatctgtctctattcattttgttgtgatgtcatggatcatgtggcctctggaaaactctactgtatactcgagaatgagaatataacaggcaaaataacattatcatgaaaatagttttgacctcatgaaccccatgaaaggttccccagaccaaaattttagaatcactggtatagggtaacactttattgtgtaaattcagttctctgtaccccacttaaatatgtattattatctcttgacattattttcccaaaaaatgctgtttgatttcttacttgttctgtactttgtttttcaggtaaagaaggaaaattcagccagttgattttgtttttagcttactgctgcctttgtccgaagaaactgttcctccattatttgaattactgaagacagcaagatatttgtaaattatcttaaaataaacaacttaaaataaa

SEQ ID NO: 444812 - DNA, 793 bp, Homo sapiens
agagcaaggtgggaggggcgcgctggggagcttcggcgcatgcgcgctgaggcctgcctgaccgaccttcagcagggctgtggctaccatgttctctcgcgcgggtgtcgctgggctgtcggcctggaccttgcagccgcaatgtcaccaggagactaaagtccatcaaaaacatccagaaaattaccaagtctatgaaaatggtagcggcagcaaaatatgcccgagctgagagagagctgaaaccagctcgaatatatggattgggatctttagctctgtatgaaaaagctgatatcaaggggcctgaagacaagaagaaacacctccttattggtgtgtcctcagatcgaggactgtgtggtgctattcattcctccattgctaaacagatgaaaagcgaggttgctacactaacagcagctgggaaagaagttatgcttgttggaattggtgacaaaatcagaggcatactttataggactcattctgaccagtttctggtggcattcaaagaagtgggaagaaagccccccacttttggagatgcgtcagtcattgcccttgaattactaaattctggatatgaatttgatgaaggctccatcatctttaataaattcaggtctgtcatctcctataagacagaagaaaagcccatcttttcccttaataccgttgcaagtgctgacagctgagtattatgacctattctttgaggagcccccctagtgacaaatgccggatgccgcctgggcaatgccgcaggatgctctggatgattgacaatgga

SEQ ID NO: 444813 - DNA, 427 bp, Homo sapiens
ctttatacagcctagttaatgtttaaaaagaaaaaaatagcttggttttatttgtcatctagtctcaagtatagcgagattctttctaaatgttattcaagattgagttctcactagtgtttttttaatcctaaaaaagtaatgttttgattttgtgacagccatggacaatgccagcaagaatgcttctgagatgattgacaaattgacattgacattcaaccgtacccgccaagctgtcatcacaaaagagttgattgaaattatctctggtgctgcagctctgtaaagaaggaaaattcagccagttgattttgtttttagcttactgctgcctttgtccgaagaaactgttcctccattatttgaattactgaagacagcaagatatttgtaaattatcttaaaataaacaacttaaaataaa

SEQ ID NO: 444814 - DNA, 921 bp, Homo sapiens
agagcaaggtgggaggggcgcgctggggagcttcggcgcatgcgcgctgaggcctgcctgaccgaccttcagcagggctgtggctaccatgttctctcgcgcgggtgtcgctgggctgtcggcctggaccttgcagccgcaatggattcaagttcgaaatatggcaactttgaaagatagtaagtatgttgtttgtctcaatatgtgaattgagaaaaactaaattttgacaaatacaaatactttcaaaaatatactgctttagcccgttgtgtatttgatcaaaactgaccaaatggatttccattgtatgtttgggacattggacttgttctgaaaagaccagtaagaaaggacacctgagacagctatgttctgttgtttgtagaatgatcatgatataactagaaaaaattataccagtgttggtgtaggtgggtgtatgtgtgggaaggggtaaatcatgttatatataaataatgttatggaatatgtggttaaggcaactttcaataccatttaatgttttaaatgtatattattgtcttatgttgccatttgcttgtcctaagtagtagctagttttgccttccttttattagtactatttctttttttttttttttggagatggagcctcattctatcacccaggctggagtgcagtggcgccatctcggctcactgcaagctccgcctcccgggttcacgccgttctcctgcctcagcctcccgagtagctgggactacaggcgcccgccaccacgctcggctaattttttgtatttttagtggagacggggtttcaccgtgttagccaagatggtcttgatctcctgacctcatgatccgcccacctcagcctcccaaagtgctgggattacaggcgtgagccaccgcgcccggctattagtactagtt

SEQ ID NO: 444815 - DNA, 479 bp, Homo sapiens
agagcaaggtgggaggggcgcgctggggagcttcggcgcatgcgcgctgaggcctgcctgaccgaccttcagcagggctgtggctaccatgttctctcgcgcgggtgtcgctgggctgtcggcctggaccttgcagccgcaatggattcaagttcgaaatatggcaactttgaaagatatttttggagatggagcctcattctatcacccaggctggagtgcagtggcgccatctcggctcactgcaagctccgcctcccgggttcacgccgttctcctgcctcagcctcccgagtagctgggactacaggcgcccgccaccacgctcggctaattttttgtatttttagtggagacggggtttcaccgtgttagccaagatggtcttgatctcctgacctcatgatccgcccacctcagcctcccaaagtgctgggattacaggcgtgagccaccgcgcccggctattagtactagtt

SEQ ID NO: 444816 - DNA, 267 bp, Homo sapiens
ctactaagggatttaaatatatgtctattcatatacattctgagtcctgtatttgatagattgtttctttatggggtattctttaaataaatatatattaactgaaagtttttcttgtataatggaactatttttcaaaaaactgaaacatttttaaaacttttatcctcaggattcaagttcgaaatatggcaactttgaaagatagtaagtatgttgtttgtctcaatatgtgaattgagaaaaactaaattttgacaaatacaa

SEQ ID NO: 444817 - DNA, 1157 bp, Homo sapiens
agagcaaggtgggaggggcgcgctggggagcttcggcgcatgcgcgctgaggcctgcctgaccgaccttcagcagggctgtggctaccatgttctctcgcgcgggtgtcgctgggctgtcggcctggaccttgcagccgcaatggattcaagttcgaaatatggcaactttgaaagatatcaccaggagactaaagtccatcaaaaacatccagaaaattaccaagtctatgaaaatggtagcggcagcaaaatatgcccgagctgagagagagctgaaaccagctcgaatatatggattgggatctttagctctgtatgaaaaagctgatatcaaggggcctgaagacaagaagaaacacctccttattggtgtgtcctcagatcgaggactgtgtggtgctattcattcctccattgctaaacagatgaaaagcgaggttgctacactaacagcagctgggaaagaagttatgcttgttggaattggtgacaaaatcagaggcatactttataggactcattctgaccagtttctggtggcattcaaagaagtgggaagaaagccccccacttttggagatgcgtcagtcattgcccttgaattactaaattctggatatgaatttgatgaaggctccatcatctttaataaattcaggtctgtcatctcctataagacagaagaaaagcccatcttttcccttaataccgttgcaagtgctgacagcatgagtatctatgacgatattgatgctgacgtgctgcaaaattaccaagaatacaatctggccaacatcatctactactctctgaaggagtccaccactagtgagcagagtgccaggatgacagccatggacaatgccagcaagaatgcttctgagatgattgacaaattgacattgacattcaaccgtacccgccaagctgtcatcacaaaagagttgattgaaattatctctggtgctgcagctctggattaatgaaaatcaagttccatcctcagacaagaggtaaagaaggaaaattcagccagttgattttgtttttagcttactgctgcctttgtccgaagaaactgttcctccattatttgaattactgaagacagcaagatatttgtaaattatcttaaaataaacaacttaaaataaa

SEQ ID NO: 444818 - DNA, 958 bp, Homo sapiens
  misc_feature (23)..(24): n is a, c, g, or t
  misc_feature (797)..(797): n is a, c, g, or t
  misc_feature (808)..(808): n is a, c, g, or t
  misc_feature (811)..(811): n is a, c, g, or t
aattcgcggccgcgtcgacagannacagaagggggagccgaccttcagcagggctgtggctaccatgttctctcgcgcgggtgtcgctgggctgtcggcctggaccttgcagccgcaatggattcaagttcgaaatatggcaactttgaaagatatcaccaggagactaaagtccatcaaaaacatccagaaaattaccaagtctatgaaaatggtagcggcagcaaaatatgcccgagctgagagagagctgaaaccagctcgaatatatggattgggatctttagctctgtatgaaaaagctgatatcaaggggcctgaagacaagaagaaacacctccttattggtgtgtcctcagatcgaggactgtgtggtgctattcattcctccattgctaaacagatgaaaagcgaggttgctacactaacagcagctgggaaagaagttatgcttgttggaattggtgacaaaatcagaggcatactttataggactcattctgaccagtttctggtggcattcaaagaagtgggaagaaagccccccacttttggagatgcgtcagtcattgcccttgaattactaaattctggatatgaatttgatgaaggctccatcatctttaataaattcaggtctgtcatctcctataagacagaagaaaagcccatcttttcccttaataccgttgcaagtgctgacagcatgagtatctatgacgatattgatgctgacgtgctgcaaaattaccaaaattctctatacctctgagggtcccctatgggcgaggccgggnaacctggcatnccnagctcggatttgaatggtggtacgccgcgcggccaagggggaatcggggcgtagaaaacccacagaaaaaacactgctttgtctcaccgctttcgacgttctaaaaaacaacctcttctgctcttcgctcccgtcccacacaacacc

SEQ ID NO: 444819 - DNA, 1253 bp, Homo sapiens
  misc_feature (1159)..(1159): n is a, c, g, or t
  misc_feature (1161)..(1161): n is a, c, g, or t
agagcaaggtgggaggggcgcgctggggagcttcggcgcatgcgcgctgaggcctgcctgaccgaccttcagcagggctgtggctaccatgttctctcgcgcgggtgtcgctgggctgtcggcctggaccttgcagccgcaatggattcaagttcgaaatatggcaactttgaaagatatcaccaggagactaaagtccatcaaaaacatccagaaaattaccaagtctatgaaaatggtagcggcagcaaaatatgcccgagctgagagagagctgaaaccagctcgaatatatggattgggatctttagctctgtatgaaaaagctgatatcaaggggcctgaagacaagaagaaacacctccttattggtgtgtcctcagatcgaggactgtgtggtgctattcattcctccattgctaaacagatgaaaagcgaggttgctacactaacagcagctgggaaagaagttatgcttgttggaattggtgacaaaatcagaggcatactttataggactcattctgaccagtttctggtggcattcaaagaagtgggaagaaagccccccacttttggagatgcgtcagtcattgcccttgaattactaaattctggatatgaatttgatgaaggctccatcatctttaataaattcaggtctgtcatctcctataagacagaagaaaagcccatcttttcccttaataccgttgcaagtgctgacagcatgagtatctatgacgatattgatgctgacgtgctgcaaaattaccaagaatacaatctggccaacatcatctactactctctgaaggagtccaccactagtgagcagagtgccaggatgacagccatggacaatgccagcaagaatgcttctgagatgattgacaaattgacattgacattcaaccgtacccgccaagctgtcatcacaaaagagttgattgaaattatctctggtgctgcagctctggattaatgaaaatcaagttccatcctcagacaagaggtaaagaaggaaaattcagccagttgattttgtttttagcttactgctgcctttgtccgaagaaactgttcctccattatttgaattactgaagacagcaagatatttgtaaattatcttaaaataaacaacttaaaataaacnanaaccacaacccaccaccaccccccacccactccaccccccccccccactccccccccaacccaaaaacgcggccccccctcataaacctccg

SEQ ID NO: 444820 - DNA, 1096 bp, Homo sapiens
agagcaaggtgggaggggcgcgctggggagcttcggcgcatgcgcgctgaggcctgcctgaccgaccttcagcagggctgtggctaccatgttctctcgcgcgggtgtcgctgggctgtcggcctggaccttgcagccgcaatggattcaagttcgaaatatggcaactttgaaagatatcaccaggagactaaagtccatcaaaaacatccagaaaattaccaagtctatgaaaatggtagcggcagcaaaatatgcccgagctgagagagagctgaaaccagctcgaatatatggattgggatctttagctctgtatgaaaaagctgatatcaaggggcctgaagacaagaagaaacacctccttattggtgtgtcctcagatcgaggactgtgtggtgctattcattcctccattgctaaacagatgaaaagcgaggttgctacactaacagcagctgggaaagaagttatgcttgttggaattggtgacaaaatcagaggcatactttataggactcattctgaccagtttctggtggcattcaaagaagtgggaagaaagccccccacttttggagatgcgtcagtcattgcccttgaattactaaattctggatatgaatttgatgaaggctccatcatctttaataaattcaggtctgtcatctcctataagacagaagaaaagcccatcttttcccttaataccgttgcaagtgctgacagcatgagtatctatgacgatattgatgctgacgtgctgcaaaattaccaagaatacaatctggccaacatcatctactactctctgaaggagtccaccactagtgagcagagtgccaggatgacagccatggacaatgccagcaagaatgcttctgagatgattgacaaattgacattgacattcaaccgtacccgccaagctgtcatcacaaaagagttgattgaaattatctctggtgctgcagctctgtaaagaaggaaaattcagccagttgattttgtttttagcttactgctgcctttgtccgaagaaactggctctgagcgggaaactggctctgagcgggagaaactgggtctgagcggc

SEQ ID NO: 444821 - DNA, 1309 bp, Homo sapiens
agagcaaggtgggaggggcgcgctggggagcttcggcgcatgcgcgctgaggcctgcctgaccgaccttcagcagggctgtggctaccatgttctctcgcgcgggtgtcgctgggctgtcggcctggaccttgcagccgcaatggattcaagttcgaaatatggcaactttgaaagatatcaccaggagactaaagtccatcaaaaacatccagaaaattaccaagtctatgaaaatggtagcggcagcaaaatatgcccgagctgagagagagctgaaaccagctcgaatatatggattgggatctttagctctgtatgaaaaagctgatatcaaggggcctgaagacaagaagaaacacctccttattggtgtgtcctcagatcgaggactgtgtggtgctattcattcctccattgctaaacagatgaaaagcgaggttgctacactaacagcagctgggaaagaagttatgcttgttggaattggtgacaaaatcagaggcatactttataggactcattctgaccagtttctggtggcattcaaagaagtgggaagaaagccccccacttttggagatgcgtcagtcattgcccttgaattactaaattctggatatgaatttgatgaaggctccatcatctttaataaattcaggtctgtcatctcctataagacagaagaaaagcccatcttttcccttaataccgttgcaagtgctgacagcatgagtatctatgacgatattgatgctgacgtgctgcaaaattaccaagaatacaatctggccaacatcatctactactctctgaaggagtccaccactagtgagcagagtgccaggatgacagccatggacaatgccagcaagaatgcttctgagatgattgacaaattgacattgacattcaaccgtacccgccaagctgtcatcacaaaagagttgattgaaattatctctggtgctgcagctctgtgagtaattgtagattgtcgccttcagagaattttttttcctcttgctgtgtctgcttgtttggatgcttaaaagtttttcgtttttttcttttgaagttgaaactcattgctgaaacttgcatcctaactcttaggctataaagatgtggtaaaaatgggacctctttgctttatttttattgtttcagctggaaacactcgggcttagttttcggttttctaaaggattaggaatgggatgtggataattcagtatcatttatgaaatctttttttggaatttaaacaattgtaagccaagctttctgagttacagggctagtttcag

SEQ ID NO: 444822 - DNA, 1115 bp, Homo sapiens
agagcaaggtgggaggggcgcgctggggagcttcggcgcatgcgcgctgaggcctgcctgaccgaccttcagcagggctgtggctaccatgttctctcgcgcgggtgtcgctgggctgtcggcctggaccttgcagccgcaatggattcaagttcgaaatatggcaactttgaaagatatcaccaggagactaaagtccatcaaaaacatccagaaaattaccaagtctatgaaaatggtagcggcagcaaaatatgcccgagctgagagagagctgaaaccagctcgaatatatggattgggatctttagctctgtatgaaaaagctgatatcaaggggcctgaagacaagaagaaacacctccttattggtgtgtcctcagatcgaggactgtgtggtgctattcattcctccattgctaaacagatgaaaagcgaggttgctacactaacagcagctgggaaagaagttatgcttgttggaattggtgacaaaatcagaggcatactttataggactcattctgaccagtttctggtggcattcaaagaagtgggaagaaagccccccacttttggagatgcgtcagtcattgcccttgaattactaaattctggatatgaatttgatgaaggctccatcatctttaataaattcaggtctgtcatctcctataagacagaagaaaagcccatcttttcccttaataccgttgcaagtgctgacagcatgagtatctatgacgatattgatgctgacgtgctgcaaaattaccaatccaccactagtgagcagagtgccaggatgacagccatggacaatgccagcaagaatgcttctgagatgattgacaaattgacattgacattcaaccgtacccgccaagctgtcatcacaaaagagttgattgaaattatctctggtgctgcagctctggattaatgaaaatcaagttccatcctcagacaagaggtaaagaaggaaaattcagccagttgattttgtttttagcttactgctgcctttgtccgaagaaactgttcctccattatttgaattactgaagacagcaagatatttgtaaattatcttaaaataaacaacttaaaataaa

SEQ ID NO: 444823 - DNA, 1118 bp, Homo sapiens
agagcaaggtgggaggggcgcgctggggagcttcggcgcatgcgcgctgaggcctgcctgaccgaccttcagcagggctgtggctaccatgttctctcgcgcgggtgtcgctgggctgtcggcctggaccttgcagccgcaatggattcaagttcgaaatatggcaactttgaaagatatcaccaggagactaaagtccatcaaaaacatccagaaaattaccaagtctatgaaaatggtagcggcagcaaaatatgcccgagctgagagagagctgaaaccagctcgaatatatggattgggatctttagctctgtatgaaaaagctgatatcaaggggcctgaagacaagaagaaacacctccttattggtgtgtcctcagatcgaggactgtgtggtgctattcattcctccattgctaaacagatgaaaagcgaggttgctacactaacagcagctgggaaagaagttatgcttgttggaattggtgacaaaatcagaggcatactttataggactcattctgaccagtttctggtggcattcaaagaagtgggaagaaagccccccacttttggagatgcgtcagtcattgcccttgaattactaaattctggatatgaatttgatgaaggctccatcatctttaataaattcaggtctgtcatctcctataagacagaagacagcatgagtatctatgacgatattgatgctgacgtgctgcaaaattaccaagaatacaatctggccaacatcatctactactctctgaaggagtccaccactagtgagcagagtgccaggatgacagccatggacaatgccagcaagaatgcttctgagatgattgacaaattgacattgacattcaaccgtacccgccaagctgtcatcacaaaagagttgattgaaattatctctggtgctgcagctctggattaatgaaaatcaagttccatcctcagacaagaggtaaagaaggaaaattcagccagttgattttgtttttagcttactgctgcctttgtccgaagaaactgttcctccattatttgaattactgaagacagcaagatatttgtaaattatcttaaaataaacaacttaaaataaa

SEQ ID NO: 444824 - DNA, 828 bp, Homo sapiens
agagcaaggtgggaggggcgcgctggggagcttcggcgcatgcgcgctgaggcctgcctgaccgaccttcagcagggctgtggctaccatgttctctcgcgcgggtgtcgctgggctgtcggcctggaccttgcagccgcaatggattcaagttcgaaatatggcaactttgaaagatatcaccaggagactaaagtccatcaaaaacatccagaaaattaccaagtctatgaaaatggtagcggcagcaaaatatgcccgagctgagagagagctgaaaccagctcgaatatatggattgggatctttagctctgtatgaaaaagctgatatcaaggggcctgaagacaagaagaaacacctccttattggtgtgtcctcagatcgaggactgtgtggtgctattcattcctccattgctaaacagatgaaaagcgaggttgctacactaacagcagctgggaaagaagttatgcttgttggaattggtgacaaaatcagaggcatactttataggactcattctgaccagtttctggtggcattcaaagaagtgggaagaaagccccccacttttggagatgcgtcagtcattgcccttgaattactaaattctggatatgaatttgatgaaggctccatcatctttaataaattcaggtctgtcatctcctataagacagaagaaaagcccatcttttcccttaataccgttgcaagtgctgacagctgagtattatgacctattctttgaggagcccccctagtgacaaatgccggatgccgcctgggcaatgccgcaggatgctctggatgattgacaatgga

SEQ ID NO: 444825 - DNA, 1103 bp, Homo sapiens
  misc_feature (5)..(5): n is a, c, g, or t
  misc_feature (13)..(13): n is a, c, g, or t
  misc_feature (15)..(16): n is a, c, g, or t
  misc_feature (19)..(20): n is a, c, g, or t
  misc_feature (87)..(87): n is a, c, g, or t
aaganaaaaatangnnagnncgagccgggtgtgaatcggcacgagggcgcgggctgtcgctgagctgtcggctggacctgcagccgncatggattcaagttcgaaatatggcaacttgaaagatatcaccaggagactaaagtccatcaaaaacatccagaaaattaccaagtctatgaaaatggtagcggcagcaaaatatgcccgagctgagagagagctgaaaccagctcgaatatatggattgggatctttagctctgtatgaaaaagctgatatcaaggggcctgaagacaagaagaaacacctccttattggtgtgtcctcagatcgaggactgtgtggtgctattcattcctccattgctaaacagatgaaaagcgaggttgctacactaacagcagctgggaaagaagttatgcttgttggaattggtgacaaaatcagaggcatactttataggactcattctgaccagtttctggtggcattcaaagaagtgggaagaaagccccccacttttggagatgcgtcagtcattgcccttgaattactaaattctggatatgaatttgatgaaggctccatcatctttaataaattcaggtctgtcatctcctataagacagaagaaaagcccatcttttcccttaataccgttgcaagtgctgacagcatgagtatctatgacgatattgatgctgacgtgctgcaaaattaccaagaatacaatctggccaacatcatctactactctctgaaggagtccaccactagtgagcagagtgccaggatgacagccatggacaatgccagcaagaatgcttctgagatgattgacaaattgacattgacattcaaccgtacccgccaagctgtcatcacaaaagagttgattgaaattatctctggtgctgcagctctggattaatgaaaatcaagttccatcctcagacaagaggtaaagaaggaaaattcagccagttgattttgtttttagcttactgctgcctttgtccgaagaaactgttcctccattatttgaattactgaagacagcaagatatttgtaaattatcttaaaataaacaacttaaaataaa

SEQ ID NO: 444826 - DNA, 1013 bp, Homo sapiens
agagcaaggtgggaggggcgcgctggggagcttcggcgcatgcgcgctgaggcctgcctgaccgaccttcagcagggctgtggctaccatgttctctcgcgcgggtgtcgctgggctgtcggcctggaccttgcagccgcaatggattcaagttcgaaatatggcaactttgaaagatatcaccaggagactaaagtccatcaaaaacatccagaaaattaccaagtctatgaaaatggtagcggcagcaaaatatgcccgagctgagagagagctgaaaccagctcgaatatatggattgggatctttagctctgtatgaaaaagctgatatcaaggggcctgaagacaagaagaaacacctccttattggtgtgtcctcagatcgaggactgtgtggtgctattcattcctccattgctaaacagatgaaaagcgaggttgctacactaacagcagctgggaaagaagttatgcttgttggaattggtgacaaaatcagaggcatactttataggtctgtcatctcctataagacagaagaaaagcccatcttttcccttaataccgttgcaagtgctgacagcatgagtatctatgacgatattgatgctgacgtgctgcaaaattaccaagaatacaatctggccaacatcatctactactctctgaaggagtccaccactagtgagcagagtgccaggatgacagccatggacaatgccagcaagaatgcttctgagatgattgacaaattgacattgacattcaaccgtacccgccaagctgtcatcacaaaagagttgattgaaattatctctggtgctgcagctctggattaatgaaaatcaagttccatcctcagacaagaggtaaagaaggaaaattcagccagttgattttgtttttagcttactgctgcctttgtccgaagaaactgttcctccattatttgaattactgaagacagcaagatatttgtaaattatcttaaaataaacaacttaaaataaa

SEQ ID NO: 444827 - DNA, 806 bp, Homo sapiens
  misc_feature (750)..(750): n is a, c, g, or t
agagcaaggtgggaggggcgcgctggggagcttcggcgcatgcgcgctgaggcctgcctgaccgaccttcagcagggctgtggctaccatgttctctcgcgcgggtgtcgctgggctgtcggcctggaccttgcagccgcaatggattcaagttcgaaatatggcaactttgaaagatatcaccaggagactaaagtccatcaaaaacatccagaaaattaccaagtctatgaaaatggtagcggcagcaaaatatgcccgagctgagagagagctgaaaccagctcgaatatatggattgggatctttagctctgtatgaaaaagctgatatcaaggggcctgaagacaagaagaaacacctccttattggtgtgtcctcagatcgaggactgtgtggtgctattcattcctccattgctaaacagatgaaaagcgaggttgctacactaacagcagctgggaaagaagttatgcttgttggaattggtgacaaaatcagaggcatactttataggactcattctgaccagtttctggtggcattcaaagaagtgggaagaaagccccccacttttggagatgcgtcagtcattgcccttgaattactaaattctggatatgaatttgatgaaggctccatcatctttaataaattcagtcttgcatctcctataagacagaaaagccatctttttcccttataccgttgcagtgctgcacacatgagtactattacgatttgtggtgngggccgaaaaataccaagcaattggccactttatacttttgaggggccccccttgg

SEQ ID NO: 444828 - DNA, 913 bp, Homo sapiens
  misc_feature (879)..(879): n is a, c, g, or t
  misc_feature (903)..(903): n is a, c, g, or t
agagcaaggtgggaggggcgcgctggggagcttcggcgcatgcgcgctgaggcctgcctgaccgaccttcagcagggctgtggctaccatgttctctcgcgcgggtgtcgctgggctgtcggcctggaccttgcagccgcaatggattcaagttcgaaatatggcaactttgaaagatatcaccaggagactaaagtccatcaaaaacatccagaaaattaccaagtctatgaaaatggtagcggcagcaaaatatgcccgagctgagagagagctgaaaccagctcgaatatatggattgggatctttagctctgtatgaaaaagctgatatcaaggggcctgaagacaagaagaaacacctccttattggtgtgtcctcagatcgaggactgtgtggtgctattcattcctccattgctaaacagatgaaaagcgaggttgctacactaacagcagctgggaaagaagttatgcttgttggaattggtgacaaaatcagaggcatactttataggtctgtcatctcctataagacagaagaaaagcccatcttttcccttaataccgttgcaagtgctgacagcatgagtatctatgacgatattgatgctgacgtgctgcaaaattaccaagaatacaatctggccaacatcatctactactctctgaaggagtccaccactagtgagcagagtgccaggatgacagccatggacaatgccagcaagaatgcttctgagatgattgacaaattgacattgacattcaaccgtacccgccaagctgtcatcacaaaagagttgattgaaattatctctggtgctgcagctctgatcaagttccatcctcagacaagagggtaagaaggttcaccagntgatttttgttttgctactgctgnctttgtccgg

SEQ ID NO: 444829 - DNA, 638 bp, Homo sapiens
agagcaaggtgggaggggcgcgctggggagcttcggcgcatgcgcgctgaggcctgcctgaccgaccttcagcagggctgtggctaccatgttctctcgcgcgggtgtcgctgggctgtcggcctggaccttgcagccgcaatggattcaagttcgaaatatggcaactttgaaagatatcaccaggagactaaagtccatcaaaaacatccagaaaattaccaagtctatgaaaatggtagcggcagcaaaatatgcccgagctgagagagagctgaaaccagctcgaatatatggattgggatctttagctctgtatgaaaaagctgatatcaaggggcctgaagacaagaagaaacacctccttattggtgtgtcctcagatcgaggactgtgtggtgctattcattcctccattgctaaacagaccattcagcgaattgctacaatcttaccacgtgtacacgcagtctgcttgccgctttgtcgctcagagtaccccttataggactcatcttcccagctatcttaggcactcaatgacctcatcctaaagcctttcacatttctagatgggcctcttcttcacctggactccctccggttaattaatttaccaattcccgcttctttgcccg

SEQ ID NO: 444830 - DNA, 268 bp, Homo sapiens
agagcaaggtgggaggggcgcgctggggagcttcggcgcatgcgcgctgaggcctgcctgaccgaccttcagcagggctgtggctaccatgttctctcgcgcgggtgtcgctgggctgtcggcctggaccttgcagccgcaatgattcaagtaataggaaacaggaaaggtccaggacccgaagctgcaggaaagggaaagaccagactctagaacatttctgggacctacagcctaagtagatagactcagtgtacagccatttata

SEQ ID NO: 444831 - DNA, 1073 bp, Homo sapiens
gctcctcaagcgcggccagaatggacggcgaggccgaggaggcaccgagagcgagcgacgctgcgcgggctgccagcatgctgtcacctctcaatatgatcttataagaaagtagaggccatggagatacaatatctacttcacgggattttatgttgatcattttggatttaatactgtgaaaacttttaatcagcggtacctagtagctgataaatactggaagaaaaatggtggatcaatacttttctacactggtaatgaaggggacattatctggttttgtaataacacggggttcatgtgggatgtggctgaggaactgaaagctatgttggtgtttgctgaacatcgatactatggagagtctctcccctttggtgacaactcattcaaggattccagacacttgaatttcctgacatcagaacaagctctggctgattttgcagagttaatcaaacacttgaaaagaacaatcccaggagctgaaaatcaacctgtcattgccataggaggctcctatggtggcatgcttgccgcctggtttaggatgaaatatcctcatatggtagttggagtctttgaagttcttgccctattggcagttgaggatttagaacttgtgggggtatttactgaaggatcgtaattaccgaatcttgggaacaagggcccacatgttcccaaaggattccacggtccgggaagaccataaatgcacctccatacgggcaggattgcaaggatcacgggagccctactttaggcaccataaattttccgggagacaccctgttaaaaggcgaccttccaaccacggggaattctaaccaaggagagaaaactatatgcagcaagatatatataaaagaaggtgtggggattcaataaagtgagggcatgcaaagtaaacgaccaaataaagacaggggaaacaaaaccgagattaacatataaagcgggagcgagatacaaatccacaaaagagacattttcagacatcagagatgagtaatagagatgaaacaaaagtcgtgctgatatctttttagacttgctttttagtttta

SEQ ID NO: 444832 - DNA, 2843 bp, Homo sapiens
ctcggggatgggggcggagtggctgtggtgacctggcttgggcggcgtctctgaggagctggctggctttgggtttcccctgggaggagctgttttgcggcgggcggagctgcaggctgggcagggcttagcctgtgcgcttctgctggcctccttttcgccctcccacccgcactgcagtctccagcctgagccatgggccgccgagccctcctgctcctgcttctgtcttttctggcgccctgggccaccatagccctccggccggccttaagggccctcggcagcctacacttgccaaccaaccccacatccctcccggctgtagccaagaactattcggttctctacttccaacagaaggttgatcattttggatttaatactgtgaaaacttttaatcagcggtacctagtagctgataaatactggaagaaaaatggtggatcaatacttttctacactggtaatgaaggggacattatctggttttgtaataacacggggttcatgtgggatgtggctgaggaactgaaagctatgttggtgtttgctgaacatcgatactatggagagtctctcccctttggtgacaactcattcaaggattccagacacttgaatttcctgacatcagaacaagctctggctgattttgcagagttaatcaaacacttgaaaagaacaatcccaggagctgaaaatcaacctgtcattgccataggaggctcctatggtggcatgcttgccgcctggtttaggatgaaatatcctcatatggtagttggagctcttgcagcttctgcccctatctggcagtttgaggatttagtaccttgtggtgtatttatgaagatcgtaactacagattttaggaaaagcggtccacattgttcagagagcatccacaggtcctgggatgccattaatcgactctcaaatactggcagtggtttgcagtggcttactggagcccttcacttatgcagcccattaacttctcaggacatccaacatttgaaagactggatctctgaaacctgggtgaatctggcaatggtggactatccttatgcctctaactttttacagcctttgcctgcttggcctatcaaggtagtgtgccagtatttgaaaaatcccaatgtatctgattcactgctgctgcagaatattttccaagctctgaatgtatattacaattattcgggccaggtgaaatgcctgaatatttcagagacagcaactagcagtctgggaacactgggttggagctatcaggcctgcacagaagtagtcatgcccttttgtactaatggtgtcgatgacatgtttgaacctcactcatggaacttaaaggaactttctgatgactgttttcaacagtggggtgtgagaccaaggccctcctggatcactactatgtatggaggcaaaaacattagttcacacacaaacattgttttcagcaatggtgaactagacccctggtcaggaggtggagtaactaaggatatcacagacactctggttgcagtcaccatctcagagggggcccaccacttagatctccgcaccaagaatgccttggatcctatgtctgtgctgttagcccgctccttggaagttagacatatgaagaattggatcagagatttctatgacagtgcgggaaagcagcactgagaaacttttgattgttttcaatttcttcttttatgttcacaccaccacattcccattcactttgattttctacatgtaattaccttcttttgtttatcattagatttgatggggccaaagttgagatagaatagagggtgatgacggtaagagcaagtgtcccatgaatgtgatttcctgggttctcactgtctttgcaccacgtctaggaagaatcttcttgatagctctcccacaccatcagtggccctcataactggagtagagttcctggttgcttttcataagagggagagttactttctttgtatctctgcaagcagagatttctctttggttttgaggttgaagtgtctttggcccatttgtaagtccccatccctaccctacacaaagtaaaagcagaagatagataaaaaatgatgtaattgcagctggtaggatgtctggtgccaatccaggaagtgagagccatttcttttgtaccggatttaatgactttgaactgtgctgtaaataaataatacagctggaccttatacctgtgtgttgcttctgaagctcacttcaactccggctgatggaaatgctgtgtgcactgggcttagctgtttttggaaagtcctttaattttttctcttccacttggcagcttttcttagttctgggatgttggccactgtggtactgccagtaagaaatctggcctttttctgctccatttctctttgtttctaaggtcagttttaatttgtttgaattctgccagtttaggaaaatgactctgttttgtctttttaaatctgagcaagctttatgctgtagtcactaattatatttcagtaagaagcctttaaaaattgatgaatcagctattccaaaagtagaatatagtaatattcagcttttaaatttttaaaattttattttctgatagttgttactgctgtcattaaaaccagaagtgttagacactaacaggcaggtgcacaagaacttttctgtatgacttccaaaagacaagctgactaattcatgcaggcagcatatttgacattaataaatggccaagccattcctatttccaaggggttggcttctttcaagcagttcttacactgagacctttcttcagagagcttttctaggataacaaa

SEQ ID NO: 444833 - DNA, 1937 bp, Homo sapiens
aggcgccgcagagggtggagcttagcgaggaaatcctacaagcatctggaaacgaccattttcgtcaaactgcgggttgatcattttggatttaatactgtgaaaacttttaatcagcggtacctagtagctgataaatactggaagaaaaatggtggatcaatacttttctacactggtaatgaaggggacattatctggttttgtaataacacggggttcatgtgggatgtggctgaggaactgaaagctatgttggtgtttgctgaacatcgatactatggagagtctctcccctttggtgacaactcattcaaggattccagacacttgaatttcctgacatcagaacaagctctggctgattttgcagagttaatcaaacacttgaaaagaacaatcccaggagctgaaaatcaacctgtcattgccataggaggctcctatggtggcatgcttgccgcctggtttaggatgaaatatcctcatatggtagttggagctcttgcagcttctgcccctatctggcagtttgaggatttagtaccttgtggtgtatttatgaagatcgtaactacagattttaggaaaagcggtccacattgttcagagagcatccacaggtcctgggatgccattaatcgactctcaaatactggcagtggtttgcagtggcttactggagcccttcacttatgcagcccattaacttctcaggacatccaacatttgaaagactggatctctgaaacctgggtgaatctggcaatggtggactatccttatgcctctaactttttacagcctttgcctgcttggcctatcaaggtagtgtgccagtatttgaaaaatcccaatgtatctgattcactgctgctgcagaatattttccaagctctgaatgtatattacaattattcgggccaggtgaaatgcctgaatatttcagagacagcaactagcagtctgggaacactgggttggagctatcaggcctgcacagaagtagtcatgcccttttgtactaatggtgtcgatgacatgtttgaacctcactcatggaacttaaaggaactttctgatgactgttttcaacagtggggtgtgagaccaaggccctcctggatcactactatgtatggaggcaaaaacattagttcacacacaaacattgttttcagcaatggtgaactagacccctggtcaggaggtggagtaactaaggatatcacagacactctggttgcagtcaccatctcagagggggcccaccacttagatctccgcaccaagaatgccttggatcctatgtctgtgctgttagcccgctccttggaagttagacatatgaagaattggatcagagatttctatgacagtgcgggaaagcagcactgagaaacttttgattgttttcaatttcttcttttatgttcacaccaccacattcccattcactttgattttctacatgtaattaccttcttttgtttatcattagatttgatggggccaaagttgagatagaatagagggtgatgacggtaagagcaagtgtcccatgaatgtgatttcctgggttctcactgtctttgcaccacgtctaggaagaatcttcttgatagctctcccacaccatcagtggccctcataactggagtagagttcctggttgcttttcataagagggagagttactttctttgtatctctgcaagcagagatttctctttggttttgaggttgaagtgtctttggcccatttgtaagtccccatccctaccctacacaaagtaaaagcagaagatagataaaaaatgatgtaattgcagctggtaggatgtctggtgccaatccaggaagtgagagccatttcttttgtaccggatttaatgactttgaactgtgctgtaaataaataatacagctggacctta

SEQ ID NO: 444834 - DNA, 1914 bp, Homo sapiens
ttttggagcttcgctgagcctcctgggcgtagggttcccgggaaagtgtggagttgatcattttggatttaatactgtgaaaacttttaatcagcggtacctagtagctgataaatactggaagaaaaatggtggatcaatacttttctacactggtaatgaaggggacattatctggttttgtaataacacggggttcatgtgggatgtggctgaggaactgaaagctatgttggtgtttgctgaacatcgatactatggagagtctctcccctttggtgacaactcattcaaggattccagacacttgaatttcctgacatcagaacaagctctggctgattttgcagagttaatcaaacacttgaaaagaacaatcccaggagctgaaaatcaacctgtcattgccataggaggctcctatggtggcatgcttgccgcctggtttaggatgaaatatcctcatatggtagttggagctcttgcagcttctgcccctatctggcagtttgaggatttagtaccttgtggtgtatttatgaagatcgtaactacagattttaggaaaagcggtccacattgttcagagagcatccacaggtcctgggatgccattaatcgactctcaaatactggcagtggtttgcagtggcttactggagcccttcacttatgcagcccattaacttctcaggacatccaacatttgaaagactggatctctgaaacctgggtgaatctggcaatggtggactatccttatgcctctaactttttacagcctttgcctgcttggcctatcaaggtagtgtgccagtatttgaaaaatcccaatgtatctgattcactgctgctgcagaatattttccaagctctgaatgtatattacaattattcgggccaggtgaaatgcctgaatatttcagagacagcaactagcagtctgggaacactgggttggagctatcaggcctgcacagaagtagtcatgcccttttgtactaatggtgtcgatgacatgtttgaacctcactcatggaacttaaaggaactttctgatgactgttttcaacagtggggtgtgagaccaaggccctcctggatcactactatgtatggaggcaaaaacattagttcacacacaaacattgttttcagcaatggtgaactagacccctggtcaggaggtggagtaactaaggatatcacagacactctggttgcagtcaccatctcagagggggcccaccacttagatctccgcaccaagaatgccttggatcctatgtctgtgctgttagcccgctccttggaagttagacatatgaagaattggatcagagatttctatgacagtgcgggaaagcagcactgagaaacttttgattgttttcaatttcttcttttatgttcacaccaccacattcccattcactttgattttctacatgtaattaccttcttttgtttatcattagatttgatggggccaaagttgagatagaatagagggtgatgacggtaagagcaagtgtcccatgaatgtgatttcctgggttctcactgtctttgcaccacgtctaggaagaatcttcttgatagctctcccacaccatcagtggccctcataactggagtagagttcctggttgcttttcataagagggagagttactttctttgtatctctgcaagcagagatttctctttggttttgaggttgaagtgtctttggcccatttgtaagtccccatccctaccctacacaaagtaaaagcagaagatagataaaaaatgatgtaattgcagctggtaggatgtctggtgccaatccaggaagtgagagccatttcttttgtaccggatttaatgactttgaactgtgctgtaaataaataatacagctggacctta

SEQ ID NO: 444835 - DNA, 2160 bp, Homo sapiens
ctcggggatgggggcggagtggctgtggtgacctggcttgggcggcgtctctgaggagctggctggctttgggtttcccctgggaggagctgttttgcggcgggcggagctgcaggctgggcagggcttagcctgtgcgcttctgctggcctccttttcgccctcccacccgcactgcagtctccagcctgagccatgggccgccgagccctcctgctcctgcttctgtcttttctggcgccctgggccaccatagccctccggccggccttaagggccctcggcagcctacacttgccaaccaaccccacatccctcccggctgtagccaagaactattcggttctctacttccaacagaaggttgatcattttggatttaatactgtgaaaacttttaatcagcggtacctagtagctgataaatactggaagaaaagggttcatgtgggatgtggctgaggaactgaaagctatgttggtgtttgctgaacatcgatactatggagagtctctcccctttggtgacaactcattcaaggattccagacacttgaatttcctgacatcagaacaagctctggctgattttgcagagttaatcaaacacttgaaaagaacaatcccaggagctgaaaatcaacctgtcattgccataggaggctcctatggtggcatgcttgccgcctggtttaggatgaaatatcctcatatggtagttggagctcttgcagcttctgcccctatctggcagtttgaggatttagtaccttgtggtgtatttatgaagatcgtaactacagattttaggaaaagcggtccacattgttcagagagcatccacaggtcctgggatgccattaatcgactctcaaatactggcagtggtttgcagtggcttactggagcccttcacttatgcagcccattaacttctcaggacatccaacatttgaaagactggatctctgaaacctgggtgaatctggcaatggtggactatccttatgcctctaactttttacagcctttgcctgcttggcctatcaaggtagtgtgccagtatttgaaaaatcccaatgtatctgattcactgctgctgcagaatattttccaagctctgaatgtatattacaattattcgggccaggtgaaatgcctgaatatttcagagacagcaactagcagtctgggaacactgggttggagctatcaggcctgcacagaagtagtcatgcccttttgtactaatggtgtcgatgacatgtttgaacctcactcatggaacttaaaggaactttctgatgactgttttcaacagtggggtgtgagaccaaggccctcctggatcactactatgtatggaggcaaaaacattagttcacacacaaacattgttttcagcaatggtgaactagacccctggtcaggaggtggagtaactaaggatatcacagacactctggttgcagtcaccatctcagagggggcccaccacttagatctccgcaccaagaatgccttggatcctatgtctgtgctgttagcccgctccttggaagttagacatatgaagaattggatcagagatttctatgacagtgcgggaaagcagcactgagaaacttttgattgttttcaatttcttcttttatgttcacaccaccacattcccattcactttgattttctacatgtaattaccttcttttgtttatcattagatttgatggggccaaagttgagatagaatagagggtgatgacggtaagagcaagtgtcccatgaatgtgatttcctgggttctcactgtctttgcaccacgtctaggaagaatcttcttgatagctctcccacaccatcagtggccctcataactggagtagagttcctggttgcttttcataagagggagagttactttctttgtatctctgcaagcagagatttctctttggttttgaggttgaagtgtctttggcccatttgtaagtccccatccctaccctacacaaagtaaaagcagaagatagataaaaaatgatgtaattgcagctggtaggatgtctggtgccaatccaggaagtgagagccatttcttttgtaccggatttaatgactttgaactgtgctgtaaataaataatacagctggacctta

SEQ ID NO: 444836 - DNA, 2178 bp, Homo sapiens
ctcggggatgggggcggagtggctgtggtgacctggcttgggcggcgtctctgaggagctggctggctttgggtttcccctgggaggagctgttttgcggcgggcggagctgcaggctgggcagggcttagcctgtgcgcttctgctggcctccttttcgccctcccacccgcactgcagtctccagcctgagccatgggccgccgagccctcctgctcctgcttctgtcttttctggcgccctgggccaccatagccctccggccggccttaagggccctcggcagcctacacttgccaaccaaccccacatccctcccggctgtagccaagaactattcggttctctacttccaacagaaggttgatcattttggatttaatactgtgaaaacttttaatcagcggtacctagtagctgataaatactggaagaaaaatggtggatcaatacttttctacactggtaatgaaggggacattatctggttttgtaataacacggggttcatgtgggatgtggctgaggaactgaaagctatgttggtgtttgctgaacatcgatactatggagagtctctcccctttggtgacaactcattcaaggattccagacacttgaatttcctgacatcagaacaagctctggctgattttgcagagttaatcaaacacttgaaaagaacaatcccaggagctgaaaatctggtttaggatgaaatatcctcatatggtagttggagctcttgcagcttctgcccctatctggcagtttgaggatttagtaccttgtggtgtatttatgaagatcgtaactacagattttaggaaaagcggtccacattgttcagagagcatccacaggtcctgggatgccattaatcgactctcaaatactggcagtggtttgcagtggcttactggagcccttcacttatgcagcccattaacttctcaggacatccaacatttgaaagactggatctctgaaacctgggtgaatctggcaatggtggactatccttatgcctctaactttttacagcctttgcctgcttggcctatcaaggtagtgtgccagtatttgaaaaatcccaatgtatctgattcactgctgctgcagaatattttccaagctctgaatgtatattacaattattcgggccaggtgaaatgcctgaatatttcagagacagcaactagcagtctgggaacactgggttggagctatcaggcctgcacagaagtagtcatgcccttttgtactaatggtgtcgatgacatgtttgaacctcactcatggaacttaaaggaactttctgatgactgttttcaacagtggggtgtgagaccaaggccctcctggatcactactatgtatggaggcaaaaacattagttcacacacaaacattgttttcagcaatggtgaactagacccctggtcaggaggtggagtaactaaggatatcacagacactctggttgcagtcaccatctcagagggggcccaccacttagatctccgcaccaagaatgccttggatcctatgtctgtgctgttagcccgctccttggaagttagacatatgaagaattggatcagagatttctatgacagtgcgggaaagcagcactgagaaacttttgattgttttcaatttcttcttttatgttcacaccaccacattcccattcactttgattttctacatgtaattaccttcttttgtttatcattagatttgatggggccaaagttgagatagaatagagggtgatgacggtaagagcaagtgtcccatgaatgtgatttcctgggttctcactgtctttgcaccacgtctaggaagaatcttcttgatagctctcccacaccatcagtggccctcataactggagtagagttcctggttgcttttcataagagggagagttactttctttgtatctctgcaagcagagatttctctttggttttgaggttgaagtgtctttggcccatttgtaagtccccatccctaccctacacaaagtaaaagcagaagatagataaaaaatgatgtaattgcagctggtaggatgtctggtgccaatccaggaagtgagagccatttcttttgtaccggatttaatgactttgaactgtgctgtaaataaataatacagctggacctta

SEQ ID NO: 444837 - DNA, 2154 bp, Homo sapiens
ctcggggatgggggcggagtggctgtggtgacctggcttgggcggcgtctctgaggagctggctggctttgggtttcccctgggaggagctgttttgcggcgggcggagctgcaggctgggcagggcttagcctgtgcgcttctgctggcctccttttcgccctcccacccgcactgcagtctccagcctgagccatgggccgccgagccctcctgctcctgcttctgtcttttctggcgccctgggccaccatagccctccggccggccttaagggccctcggcagcctacacttgccaaccaaccccacatccctcccggctgtagccaagaactattcggttctctacttccaacagaaggttgatcattttggatttaatactgtgaaaacttttaatcagcggtacctagtagctgataaatactggaagaaaaatggtggatcaatacttttctacactggtaatgaaggggacattatctggttttgtaataacacggggttcatgtgggatgtggctgaggaactgaaagctatgttggtgtttgctgaacatcgatactatggagagtctctcccctttggtgacaactcattcaaggattccagacacttgaatttcctgacatcagaacaagctctggctgattttgcagagttaatcaaacacttgaaaagaacaatcccaggagctgaaaatcaacctgtcattgccataggaggctcctatggtggcatgcttgccgcctggtttaggatgaaatatcctcatatggtagttggagctcttgcagcttctgcccctatctggcagtttgaggatttagtaccttgtggtgtatttatgaagatcgtaactacagattttaggcagtggtttgcagtggcttactggagcccttcacttatgcagcccattaacttctcaggacatccaacatttgaaagactggatctctgaaacctgggtgaatctggcaatggtggactatccttatgcctctaactttttacagcctttgcctgcttggcctatcaaggtagtgtgccagtatttgaaaaatcccaatgtatctgattcactgctgctgcagaatattttccaagctctgaatgtatattacaattattcgggccaggtgaaatgcctgaatatttcagagacagcaactagcagtctgggaacactgggttggagctatcaggcctgcacagaagtagtcatgcccttttgtactaatggtgtcgatgacatgtttgaacctcactcatggaacttaaaggaactttctgatgactgttttcaacagtggggtgtgagaccaaggccctcctggatcactactatgtatggaggcaaaaacattagttcacacacaaacattgttttcagcaatggtgaactagacccctggtcaggaggtggagtaactaaggatatcacagacactctggttgcagtcaccatctcagagggggcccaccacttagatctccgcaccaagaatgccttggatcctatgtctgtgctgttagcccgctccttggaagttagacatatgaagaattggatcagagatttctatgacagtgcgggaaagcagcactgagaaacttttgattgttttcaatttcttcttttatgttcacaccaccacattcccattcactttgattttctacatgtaattaccttcttttgtttatcattagatttgatggggccaaagttgagatagaatagagggtgatgacggtaagagcaagtgtcccatgaatgtgatttcctgggttctcactgtctttgcaccacgtctaggaagaatcttcttgatagctctcccacaccatcagtggccctcataactggagtagagttcctggttgcttttcataagagggagagttactttctttgtatctctgcaagcagagatttctctttggttttgaggttgaagtgtctttggcccatttgtaagtccccatccctaccctacacaaagtaaaagcagaagatagataaaaaatgatgtaattgcagctggtaggatgtctggtgccaatccaggaagtgagagccatttcttttgtaccggatttaatgactttgaactgtgctgtaaataaataatacagctggacctta

SEQ ID NO: 444838 - DNA, 1294 bp, Homo sapiens
tgttctgtcagcatgaaaactactaggtttcttcccagcttaaagagcaactttaaaggatgctagatggagtctcactctgtcacccaagctagagtgcagtggtgtgatcatagcactggagcctggaactcctgactgaagcaatcctcccacctcagcttcctgagtagctgagactataggtagtgtgccagtatttgaaaaatcccaatgtatctgattcactgctgctgcagaatattttccaagctctgaatgtatattacaattattcgggccaggtgaaatgcctgaatatttcagagacagcaactagcagtctgggaacactgggttggagctatcaggcctgcacagaagtagtcatgcccttttgtactaatggtgtcgatgacatgtttgaacctcactcatggaacttaaaggaactttctgatgactgttttcaacagtggggtgtgagaccaaggccctcctggatcactactatgtatggaggcaaaaacattagttcacacacaaacattgttttcagcaatggtgaactagacccctggtcaggaggtggagtaactaaggatatcacagacactctggttgcagtcaccatctcagagggggcccaccacttagatctccgcaccaagaatgccttggatcctatgtctgtgctgttagcccgctccttggaagttagacatatgaagaattggatcagagatttctatgacagtgcgggaaagcagcactgagaaacttttgattgttttcaatttcttcttttatgttcacaccaccacattcccattcactttgattttctacatgtaattaccttcttttgtttatcattagatttgatggggccaaagttgagatagaatagagggtgatgacggtaagagcaagtgtcccatgaatgtgatttcctgggttctcactgtctttgcaccacgtctaggaagaatcttcttgatagctctcccacaccatcagtggccctcataactggagtagagttcctggttgcttttcataagagggagagttactttctttgtatctctgcaagcagagatttctctttggttttgaggttgaagtgtctttggcccatttgtaagtccccatccctaccctacacaaagtaaaagcagaagatagataaaaaatgatgtaattgcagctggtaggatgtctggtgccaatccaggaagtgagagccatttcttttgtaccggatttaatgactttgaactgtgctgtaaataaataatacagctggacctta

SEQ ID NO: 444839 - DNA, 1115 bp, Homo sapiens
ctcggggatgggggcggagtggctgtggtgacctggcttgggcggcgtctctgaggagctggctggctttgggtttcccctgggaggagctgttttgcggcgggcggagctgcaggctgggcagggcttagcctgtgcgcttctgctggcctccttttcgccctcccacccgcactgcagtctccagcctgagccatgggccgccgagccctcctgctcctgcttctgtcttttctggcgccctgggccaccatagccctccggccggccttaagggccctcggcagcctacacttgccaaccaaccccacatccctcccggctgtagccaagaactattcggttctctacttccaacagaaggttgatcattttggatttaatactgtgaaaacttttaatcagcggtacctagtagctgataaatactggaagaaaaatggtggatcaatacttttctacactggtaatgaaggggacattatctggttttgtaataacacggggttcatgtgggatgtggctgaggaactgaaagctatgttggtgtttgctgaacatcgatactatggagagtctctcccctttggtgacaactcattcaaggattccagacacttgaatttcctgacatcagaacaagctctggctgattttgcagagttaatcaaacacttgaaaagaacaatcccaggagctgaaaatcaacctgtcattgccataggaggctcctatggtggcatgcttgccgcctggtttaggatgaaatatcctcatatggtagttggagctcttgcagcttctgcccctatctggcagtttgaggatttagtaccttgtggtgtatttatgaagatcgtaactacagattttaggaaaagcggtccacattgttcagagagcatccacaggtcctgggatgccattaatcgactctcaaatactgcgggtttgccgggttactgtggcccttccttttgcgccattacttctccggcctccacccttggcgactgtcctcccacccggcgaactggcctggtggccatcctaggcccaactttaaagcttgctgttggcatcagcgaggccccttgaaacccggtcttcaccgc

SEQ ID NO: 444840 - DNA, 2225 bp, Homo sapiens
ctcggggatgggggcggagtggctgtggtgacctggcttgggcggcgtctctgaggagctggctggctttgggtttcccctgggaggagctgttttgcggcgggcggagctgcaggctgggcagggcttagcctgtgcgcttctgctggcctccttttcgccctcccacccgcactgcagtctccagcctgagccatgggccgccgagccctcctgctcctgcttctgtcttttctggcgccctgggccaccatagccctccggccggccttaagggccctcggcagcctacacttgccaaccaaccccacatccctcccggctgtagccaagaactattcggttctctacttccaacagaaggttgatcattttggatttaatactgtgaaaacttttaatcagcggtacctagtagctgataaatactggaagaaaaatggtggatcaatacttttctacactggtaatgaaggggacattatctggttttgtaataacacggggttcatgtgggatgtggctgaggaactgaaagctatgttggtgtttgctgaacatcgatactatggagagtctctcccctttggtgacaactcattcaaggattccagacacttgaatttcctgacatcagaacaagctctggctgattttgcagagttaatcaaacacttgaaaagaacaatcccaggagctgaaaatcaacctgtcattgccataggaggctcctatggtggcatgcttgccgcctggtttaggatgaaatatcctcatatggtagttggagctcttgcagcttctgcccctatctggcagtttgaggatttagtaccttgtggtgtatttatgaagatcgtaactacagattttaggaaaagcggtccacattgttcagagagcatccacaggtcctgggatgccattaatcgactctcaaatactggcagtggtttgcagtggcttactggagcccttcacttatgcagcccattaacttctcaggacatccaacatttgaaagactggatctctgaaacctgggtgaatctggcaatggtggactatccttatgcctctaactttttacagcctttgcctgcttggcctatcaaggtagtgtgccagtatttgaaaaatcccaatgtatctgattcactgctgctgcagaatattttccaagctctgaatgtatattacaattattcgggccaggtgaaatgcctgaatatttcagagacagcaactagcagtctgggaacactgggttggagctatcaggcctgcacagaagtagtcatgcccttttgtactaatggtgtcgatgacatgtttgaacctcactcatggaacttaaaggaactttctgatgactgttttcaacagtggggtgtgagaccaaggccctcctggatcactactatgtatggaggcaaaaacattagttcacacacaaacattgttttcagcaatggtgaactagacccctggtcaggaggtggagtaactaaggatatcacagacactctggttgcagtcaccatctcagagggggcccaccacttagatctccgcaccaagaatgccttggatcctatgtctgtgctgttagcccgctccttggaagttagacatatgaagaattggatcagagatttctatgacagtgcgggaaagcagcactgagaaacttttgattgttttcaatttcttcttttatgttcacaccaccacattcccattcactttgattttctacatgtaattaccttcttttgtttatcattagatttgatggggccaaagttgagatagaatagagggtgatgacggtaagagcaagtgtcccatgaatgtgatttcctgggttctcactgtctttgcaccacgtctaggaagaatcttcttgatagctctcccacaccatcagtggccctcataactggagtagagttcctggttgcttttcataagagggagagttactttctttgtatctctgcaagcagagatttctctttggttttgaggttgaagtgtctttggcccatttgtaagtccccatccctaccctacacaaagtaaaagcagaagatagataaaaaatgatgtaattgcagctggtaggatgtctggtgccaatccaggaagtgagagccatttcttttgtaccggatttaatgactttgaactgtgctgtaaataaataatacagctggacctta

SEQ ID NO: 444841 - DNA, 2824 bp, Homo sapiens
ctcggggatgggggcggagtggctgtggtgacctggcttgggcggcgtctctgaggagctggctggctttgggtttcccctgggaggagctgttttgcggcgggcggagctgcaggctgggcagggcttagcctgtgcgcttctgctggcctccttttcgccctcccacccgcactgcagtctccagcctgagccatgggccgccgagccctcctgctcctgcttctgtcttttctggcgccctgggccaccatagccctccggccggccttaagggccctcggcagcctacacttgccaaccaaccccacatccctcccggctgtagccaagaactattcggttctctacttccaacagaaggttgatcattttggatttaatactgtgaaaacttttaatcagcggtacctagtagctgataaatactggaagaaaaatggtggatcaatacttttctacactggtaatgaaggggacattatctggttttgtaataacacggggttcatgtgggatgtggctgaggaactgaaagctatgttggtgtttgctgaacatcgatactatggagagtctctcccctttggtgacaactcattcaaggattccagacacttgaatttcctgacatcagaacaagctctggctgattttgcagagttaatcaaacacttgaaaagaacaatcccaggagctgaaaatcaacctgtcattgccataggaggctcctatggtggcatgcttgccgcctggtttaggatgaaatatcctcatatggtagttggagctcttgcagcttctgcccctatctggcagtttgaggatttagtaccttgtggtgtatttatgaagatcgtaactacagattttaggaaaagcggtccacattgttcagagagcatccacaggtcctgggatgccattaatcgactctcaaatactggcagtggtttgcagtggcttactggagcccttcacttatgcagcccattaacttctcaggacatccaacatttgaaagactggatctctgaaacctgggtgaatctggcaatggtggactatccttatgcctctaactttttacagcctttgcctgcttggcctatcaaggtagtgtgccagtatttgaaaaatcccaatgtatctgattcactgctgctgcagaatattttccaagctctgaatgtatattacaattattcgggccaggtgaaatgcctgaatatttcagagacagcaactagcagtctgggaacactgggttggagctatcaggcctgcacagaagtagtcatgcccttttgtactaatggtgtcgatgacatgtttgaacctcactcatggaacttaaaggaactttctgatgactgttttcaacagtggggtgtgagaccaaggccctcctggatcactactatgtatggaggcaaaaacattagttcacacacaaacattgttttcagcaatggtgaactagacccctggtcaggaggtggagtaactaaggatatcacagacactctggttgcagtcaccatctcagagggggcccaccacttagatctccgcaccaagaatgccttggatcctatgtctgtgctgttagcccgctccttggaagttagacatatgaagaattggatcagagatttctatgacagtgcgggaaagcagcactgagaaacttttgattgttttcaatttcttcttttatgttcacaccaccacattcccattcactttgattttctacatgtaattaccttcttttgtttatcattagatttgatggggccaaagttgagatagaatagagggtgatgacggtaagagcaagtgtcccatgaatgtgatttcctgggttctcactgtctttgcaccacgtctaggaagaatcttcttgatagctctcccacaccatcagtggccctcataactggagtagagttcctggttgcttttcataagagggagagttactttctttgtatctctgcaagcagagatttctctttggttttgaggttgaagtgtctttggcccatttgtaagtccccatccctaccctacacaaagtaaaagcagaagatagataaaaaatgatgtaattgcagctggtaggatgtctggtgccaatccaggaagtgagagccatttcttttgtaccggatttaatgactttgaactgtgctgtaaataaataatacagctggaccttaaaaaaaaaaaaaaaaaaaaaaaaaaaaaaaaaaaaaaaaaaaaaaaaaaaaaaaaaaaaaaaaaaaaaaaaaaaaaaaaaaaaaaaaaaaaaaaaaaaaaaaagaaaacaaaaacaaaagcgaaaaaacggagaaagaaaacaaagaaaagaaccaagaagcagacaagccgagagagacgagacacacagcaaagcacaaccagaggacgggggacgcggggcggaggagcagcgcagaggcgcgagagagcgagcggcgcggggggcgggcagcgcgatgatgagtgagggggcgaggcgggggaatataggtgggagcagaggagaaggagccagagaggagagaggaggaggagaggaggcgtgggctacatgcgcgagtccgcaacagagataacacagcaaggacggggcggaggcagcgagcgagagaccatagcggcacagtcgaagaaagaaaagagacgaggacgcatgagacgagagggagaggtaggacgagacagggacgacgaggagtagaaggagaaggcgacgaaggtcggagcgacagagcgcgaaataagaggagagggcaccgtcagaggcgggtgtaac

SEQ ID NO: 444842 - DNA, 1957 bp, Homo sapiens
ttttggagcttcgctgagcctcctgggcgtagggttcccgggaaagtgtggagtgagccgcagcgccctggggtctggcggggtgactgaaagaggttgatcattttggatttaatactgtgaaaacttttaatcagcggtacctagtagctgataaatactggaagaaaaatggtggatcaatacttttctacactggtaatgaaggggacattatctggttttgtaataacacggggttcatgtgggatgtggctgaggaactgaaagctatgttggtgtttgctgaacatcgatactatggagagtctctcccctttggtgacaactcattcaaggattccagacacttgaatttcctgacatcagaacaagctctggctgattttgcagagttaatcaaacacttgaaaagaacaatcccaggagctgaaaatcaacctgtcattgccataggaggctcctatggtggcatgcttgccgcctggtttaggatgaaatatcctcatatggtagttggagctcttgcagcttctgcccctatctggcagtttgaggatttagtaccttgtggtgtatttatgaagatcgtaactacagattttaggaaaagcggtccacattgttcagagagcatccacaggtcctgggatgccattaatcgactctcaaatactggcagtggtttgcagtggcttactggagcccttcacttatgcagcccattaacttctcaggacatccaacatttgaaagactggatctctgaaacctgggtgaatctggcaatggtggactatccttatgcctctaactttttacagcctttgcctgcttggcctatcaaggtagtgtgccagtatttgaaaaatcccaatgtatctgattcactgctgctgcagaatattttccaagctctgaatgtatattacaattattcgggccaggtgaaatgcctgaatatttcagagacagcaactagcagtctgggaacactgggttggagctatcaggcctgcacagaagtagtcatgcccttttgtactaatggtgtcgatgacatgtttgaacctcactcatggaacttaaaggaactttctgatgactgttttcaacagtggggtgtgagaccaaggccctcctggatcactactatgtatggaggcaaaaacattagttcacacacaaacattgttttcagcaatggtgaactagacccctggtcaggaggtggagtaactaaggatatcacagacactctggttgcagtcaccatctcagagggggcccaccacttagatctccgcaccaagaatgccttggatcctatgtctgtgctgttagcccgctccttggaagttagacatatgaagaattggatcagagatttctatgacagtgcgggaaagcagcactgagaaacttttgattgttttcaatttcttcttttatgttcacaccaccacattcccattcactttgattttctacatgtaattaccttcttttgtttatcattagatttgatggggccaaagttgagatagaatagagggtgatgacggtaagagcaagtgtcccatgaatgtgatttcctgggttctcactgtctttgcaccacgtctaggaagaatcttcttgatagctctcccacaccatcagtggccctcataactggagtagagttcctggttgcttttcataagagggagagttactttctttgtatctctgcaagcagagatttctctttggttttgaggttgaagtgtctttggcccatttgtaagtccccatccctaccctacacaaagtaaaagcagaagatagataaaaaatgatgtaattgcagctggtaggatgtctggtgccaatccaggaagtgagagccatttcttttgtaccggatttaatgactttgaactgtgctgtaaataaataatacagctggacctta

SEQ ID NO: 444843 - DNA, 2788 bp, Homo sapiens
ctcggggatgggggcggagtggctgtggtgacctggcttgggcggcgtctctgaggagctggctggctttgggtttcccctgggaggagctgttttgcggcgggcggagctgcaggctgggcagggcttagcctgtgcgcttctgctggcctccttttcgccctcccacccgcactgcagtctccagcctgagccatgggccgccgagccctcctgctcctgcttctgtcttttctggcgccctgggccaccatagccctccggccggccttaagggccctcggcagcctacacttgccaaccaaccccacatccctcccggctgtagccaagaactattcggttctctacttccaacagaaggttgatcattttggatttaatactgtgaaaacttttaatcagcggtacctagtagctgataaatactggaagaaaaatggtggatcaatacttttctacactggtaatgaaggggacattatctggttttgtaataacacggggttcatgtgggatgtggctgaggaactgaaagctatgttggtgtttgctgaacatcgatactatggagagtctctcccctttggtgacaactcattcaaggattccagacacttgaatttcctgacatcagaacaagctctggctgattttgcagagttaatcaaacacttgaaaagaacaatcccaggagctgaaaatcaacctgtcattgccataggaggctcctatggtggcatgcttgccgcctggtttaggatgaaatatcctcatatggtagttggagctcttgcagcttctgcccctatctggcagtttgaggatttagtaccttgtggtgtatttatgaagatcgtaactacagattttaggaaaagcggtccacattgttcagagagcatccacaggtcctgggatgccattaatcgactctcaaatactggcagtggtttgcagtggcttactggagcccttcacttatgcagcccattaacttctcaggacatccaacatttgaaagactggatctctgaaacctgggtgaatctggcaatggtggactatccttatgcctctaactttttacagcctttgcctgcttggcctatcaaggtagtgtgccagtatttgaaaaatcccaatgtatctgattcactgctgctgcagaatattttccaagctctgaatgtatattacaattattcgggccaggtgaaatgcctgaatatttcagagacagcaactagcagtctgggaacactgggttggagctatcaggcctgcacagaagtagtcatgcccttttgtactaatggtgtcgatgacatgtttgaacctcactcatggaacttaaaggaactttctgatgactgttttcaacagtggggtgtgagaccaaggccctcctggatcactactatgtatggaggcaaaaacattagttcacacacaaacattgttttcagcaatggtgaactagacccctggtcaggaggtggagtaactaaggatatcacagacactctggttgcagtcaccatctcagagggggcccaccacttagatctccgcaccaagaatgccttggatcctatgtctgtgctgttagcccgctccttggaagttagacatatgaagaattggatcagagatttctatgacagtgcgggaaagcagcactgagaaacttttgattgttttcaatttcttcttttatgttcacaccaccacattcccattcactttgattttctacatgtaattaccttcttttgtttatcattagatttgatggggccaaagttgagatagaatagagggtgatgacggtaagagcaagtgtcccatgaatgtgatttcctgggttctcactgtctttgcaccacgtctaggaagaatcttcttgatagctctcccacaccatcagtggccctcataactggagtagagttcctggttgcttttcataagagggagagttactttctttgtatctctgcaagcagagatttctctttggttttgaggttgaagtgtctttggcccatttgtaagtccccatccctaccctacacaaagtaaaagcagaagatagatagccatttcttttgtaccggatttaatgactttgaactgtgctgtaaataaataatacagctggaccttatacctgtgtgttgcttctgaagctcacttcaactccggctgatggaaatgctgtgtgcactgggcttagctgtttttggaaagtcctttaattttttctcttccacttggcagcttttcttagttctgggatgttggccactgtggtactgccagtaagaaatctggcctttttctgctccatttctctttgtttctaaggtcagttttaatttgtttgaattctgccagtttaggaaaatgactctgttttgtctttttaaatctgagcaagctttatgctgtagtcactaattatatttcagtaagaagcctttaaaaattgatgaatcagctattccaaaagtagaatatagtaatattcagcttttaaatttttaaaattttattttctgatagttgttactgctgtcattaaaaccagaagtgttagacactaacaggcaggtgcacaagaacttttctgtatgacttccaaaagacaagctgactaattcatgcaggcagcatatttgacattaataaatggccaagccattcctatttccaaggggttggcttctttcaagcagttcttacactgagacctttcttcagagagcttttctaggataacaaa

SEQ ID NO: 444844 - DNA, 2162 bp, Homo sapiens
ctcggggatgggggcggagtggctgtggtgacctggcttgggcggcgtctctgaggagctggctggctttgggtttcccctgggaggagctgttttgcggcgggcggagctgcaggctgggcagggcttagcctgtgcgcttctgctggcctccttttcgccctcccacccgcactgcagtctccagcctgagccatgggccgccgagccctcctgctcctgcttctgtcttttctggcgccctgggccaccatagccctccggccggccttaagggccctcggcagcctacacttgccaaccaaccccacatccctcccggctgtagccaagaactattcggttctctacttccaacagaaggttgatcattttggatttaatactgtgaaaacttttaatcagcggtacctagtagctgataaatactggaagaaaaatggtggatcaatacttttctacactggtaatgaaggggacattatctggttttgtaataacacggggttcatgtgggatgtggctgaggaactgaaagctatgttggtgtttgctgaacatcgatactatggagagtctctcccctttggtgacaactcattcaaggattccagacacttgaatttcctgacatcagaacaagctctggctgattttgcagagttaatcaaacacttgaaaagaacaatcccaggagctgaaaatcaacctgtcattgccataggaggctcctatggtggcatgcttgccgcctggtttaggatgaaatatcctcatatggtagttggagctcttgcagcttctgcccctatctggcagtttgaggatttagtaccttgtggtgtatttatgaagatcgtaactacagattttaggaaaagcggtccacattgttcagagagcatccacaggtcctgggatgccattaatcgactctcaaatactggcagtggtttgcagtggcttactggagcccttcacttatgcagcccattaacttctcaggacatccaacatttgaaagactggatctctgaaacctgggtgaatctggcaatggtggactatccttatgcctctaactttttacagcctttgcctgcttggcctatcaaggtagtgtgccagtatttgaaaaatcccaatgtatctgattcactgctgctgcagaatattttccaagctctgaatgtatattacaattattcgggccaggtgaaatgcctgaatatttcagagacagcaactagcagtctgggaacactgggttggagctatcaggcctgcacagaagtagtcatgcccttttgtactaatggtgtcgatgacatgtttgaacctcactcatggaacttaaaggaactttctgatgactgttttcaacagtggggtgtgagaccaaggccctcctggatcactactatgtatggaggcaaaaacattagttcacacacaaacattgttttcagcaatggtgaactagacccctggtcaggaggtggagtaactaaggatatcacagacactctggttgcagtcaccatctcagagggggcccaccacttagatctccgcaccaagaatgccttggatcctatgtctgtgctgttagcccgctccttggaagttagacatatgaagaattggatcagagatttctatgacagtgcgggaaagcagcactgagaaacttttgattgttttcaatttcttcttttatgttcacaccaccacattcccattcactttgattttctacatgtaattaccttcttttgtttatcattagatttgatggggccaaagttgagatagaatagagggtgatgacggtaagagcaagtgtcccatgaatgtgatttcctgggttctcactgtctttgcaccacgtctaggaagaatcttcttgatagctctcccacaccatcagtggccctcataactggagtagagttcctggttgcttttcataagagggagagttactttctttgtatctctgcaagcagagatttctctttggttttgaggttgaagtgtctttggcccatttgtaactggtaggatgtctggtgccaatccaggaagtgagagccatttcttttgtaccggatttaatgactttgaactgtgctgtaaataaataatacagctggacctta

SEQ ID NO: 444845 - DNA, 1616 bp, Homo sapiens
ccacaccccccccccccccccccccccccccccccccccgccccacccacactcacacgctagcgtacaggcccgcgtgttaactccgcgacgaggcaacctgtcattgccataggaggctcctatggtggcatgcttgccgcctggtttaggatgaaatatcctcatatggtagttggagctcttgcagcttctgcccctatctggcagtttgaggatttagtaccttgtggtgtatttatgaagatcgtaactacagattttaggaaaagcggtccacattgttcagagagcatccacaggtcctgggatgccattaatcgactctcaaatactggcagtggtttgcagtggcttactggagcccttcacttatgcagcccattaacttctcaggacatccaacatttgaaagactggatctctgaaacctgggtgaatctggcaatggtggactatccttatgcctctaactttttacagcctttgcctgcttggcctatcaaggtagtgtgccagtatttgaaaaatcccaatgtatctgattcactgctgctgcagaatattttccaagctctgaatgtatattacaattattcgggccaggtgaaatgcctgaatatttcagagacagcaactagcagtctgggaacactgggttggagctatcaggcctgcacagaagtagtcatgcccttttgtactaatggtgtcgatgacatgtttgaacctcactcatggaacttaaaggaactttctgatgactgttttcaacagtggggtgtgagaccaaggccctcctggatcactactatgtatggaggcaaaaacattagttcacacacaaacattgttttcagcaatggtgaactagacccctggtcaggaggtggagtaactaaggatatcacagacactctggttgcagtcaccatctcagagggggcccaccacttagatctccgcaccaagaatgccttggatcctatgtctgtgctgttagcccgctccttggaagttagacatatgaagaattggatcagagatttctatgacagtgcgggaaagcagcactgagaaacttttgattgttttcaatttcttcttttatgttcacaccaccacattcccattcactttgattttctacatgtaattaccttcttttgtttatcattagatttgatggggccaaagttgagatagaatagagggtgatgacggtaagagcaagtgtcccatgaatgtgatttcctgggttctcactgtctttgcaccacgtctaggaagaatcttcttgatagctctcccacaccatcagtggccctcataactggagtagagttcctggttgcttttcataagagggagagttactttctttgtatctctgcaagcagagatttctctttggttttgaggttgaagtgtctttggcccatttgtaagtccccatccctaccctacacaaagtaaaagcagaagatagataaaaaatgatgtaattgcagctggtaggatgtctggtgccaatccaggaagtgagagccatttcttttgtaccggatttaatgactttgaactgtgctgtaaataaataatacagctggacctta

SEQ ID NO: 444846 - DNA, 1238 bp, Homo sapiens
taattttggaatcacatttcagctgcataacttctcaaatatttcagcataggctgctgtgcatgtagatagatatagtgaaataatgacataagatggaaaaatctcttccgtttgtcttggtgtttggtagtgtgccagtatttgaaaaatcccaatgtatctgattcactgctgctgcagaatattttccaagctctgaatgtatattacaattattcgggccaggtgaaatgcctgaatatttcagagacagcaactagcagtctgggaacactgggttggagctatcaggcctgcacagaagtagtcatgcccttttgtactaatggtgtcgatgacatgtttgaacctcactcatggaacttaaaggaactttctgatgactgttttcaacagtggggtgtgagaccaaggccctcctggatcactactatgtatggaggcaaaaacattagttcacacacaaacattgttttcagcaatggtgaactagacccctggtcaggaggtggagtaactaaggatatcacagacactctggttgcagtcaccatctcagagggggcccaccacttagatctccgcaccaagaatgccttggatcctatgtctgtgctgttagcccgctccttggaagttagacatatgaagaattggatcagagatttctatgacagtgcgggaaagcagcactgagaaacttttgattgttttcaatttcttcttttatgttcacaccaccacattcccattcactttgattttctacatgtaattaccttcttttgtttatcattagatttgatggggccaaagttgagatagaatagagggtgatgacggtaagagcaagtgtcccatgaatgtgatttcctgggttctcactgtctttgcaccacgtctaggaagaatcttcttgatagctctcccacaccatcagtggccctcataactggagtagagttcctggttgcttttcataagagggagagttactttctttgtatctctgcaagcagagatttctctttggttttgaggttgaagtgtctttggcccatttgtaagtccccatccctaccctacacaaagtaaaagcagaagatagataaaaaatgatgtaattgcagctggtaggatgtctggtgccaatccaggaagtgagagccatttcttttgtaccggatttaatgactttgaactgtgctgtaaataaataatacagctggacctta

SEQ ID NO: 444847 - DNA, 500 bp, Homo sapiens
  misc_feature (441)..(441): n is a, c, g, or t
  misc_feature (500)..(500): n is a, c, g, or t
ctcggggatgggggcggagtggctgtggtgacctggcttgggcggcgtctctgaggagctggctggctttgggtttcccctgggaggagctgttttgcggcgggcggagctgcaggctgggcagggcttagcctgtgcgcttctgctggcctccttttcgccctcccacccgcactgcagtctccagcctgagccatgggccgccgagccctcctgctcctgcttctgtcttttctggcgccctgggccaccatagccctccggccggccttaagggccctcggcagcctacacttgccaaccaaccccacatccctcccggctgtagccaagaactattcggttctctacttccaacagaaggttgatcattttggatttaatactgtgaaaacttttaatcagcggtacctagtagctgataaatactggaagaaaatntgtaataacacggatcgaactatggagagtctctcccctttggtgacactccatcaggn

SEQ ID NO: 444848 - DNA, 382 bp, Homo sapiens
aagcttgcggccgcggccatggtcttcggaggggtgctgctggtggccaacattttgcggatactcttctggtttggaaggcgctttgagtccccgctgctgtggcagagcgccatcatgatcctgaccatgctgctgatgctgaagctgtgcaccgaggtccgtgtgcctcgagttttcctcggaaacactcttgaatgtctgagtgagggtcctgcttagctctttggcctgtgagatgctttgaaaatttttatttttttaagatgaagcaagatgtctgtagcggtaattgcctcacattaaactgtcgccgactgcaggcgcagtgactgctgaatgtaccctgtgtggcgacttggaatcaataaaccatttgtgg

SEQ ID NO: 444849 - DNA, 2501 bp, Homo sapiens
ttcccggcgcctgagcggactgacgccgagacgcgcgcgggtcagcggcgcggggacgcggggcgctgggcgcggggctgggggcgcaggccccgaggccgcaggagcgcgcggagcggcgatgagcaggcggccggtggcccgcggggcgcggagcccgtgacagcctcggccaggcgggcgctgcgatggaggccgagggcctggactggctcctggtgccactgcaccagctggtgtcctggggcgcggccgcggccatggtcttcggaggggtggtgccctacgtcccgcagtatcgggacattcgcaggacgcagaacgccgacggcttctccacctacgtgtgcctggtgctgctggtggccaacattttgcggatactcttctggtttggaaggcgctttgagtccccgctgctgtggcagagcgccatcatgatcctgaccatgctgctgatgctgaagctgtgcaccgaggtccgtgtggccaacgagctcaacgccaggcgccgctcctttacagacttcgacccccaccacttctggcagtggagcagcttctcggactacgtgcagtgcgtcctggccttcacgggcgtggcgggctacatcacctacctgtccattgactccgccctgtttgtggagaccctgggcttcctggctgtgctgaccgaagccatgctgggtgtgccccagctttaccgcaaccaccgccaccagtccacggagggcatgagcatcaagatggtgctcatgtggaccagtggtgacgccttcaagacggcctacttcctgctgaagggtgcccctctgcagttctccgtgtgcggcctgctgcaggtgctggtggacctggccatcctggggcaggcctacgccttcgcccgccacccccagaagccggcgccccacgccgtgcaccccactggcaccaaggccctctgacagtggggaggacgaggatgtgggaccgccagccgcgggcactggtgggccctgacctccccgcggggagggtgggtgccgtggcccctgcaggtgtggcagagatggggcacgggcattggggtctccatcagcctctgtggggtgtctcagggtgggcagtgggggtggggctgggacgctgtttgtgctcagcggggacagccagggttgatctggccccgagggttttggatgtttttaggatgacataaaaagcaagtgttttccccatttcctcttatgaaacaccgtctgagcccaaggtacacattgggcggcctgcaggaacctgctccaggtggacacacgggccagcagccgcgaaccttgaagctggggtgaccgcaggagaccctgtaaggcctgtgagcggagccctcgaccccgtgacaccctggccagacaccctgcttggactggggtggcctctgctacccaggggtctggcacgggggagggctggggctttctctgcctggtacacacggaaaggcggctgtgcggacgcagggtcaccgtgctccgggttttctgacagtcggtgtttcctgggcctttggagtggctgcgaggcctgaacgccttgtggatccgctgtgtccagcccggctgagcatcgccagggctagctcatgctgctcttgtcagcctctggttctcctcgagtccttggggacgtggcagatgccagcgaccatcagacaacgtggaggccctcatgggcaatggctgagggggccgggctgaggctgtgcacatgcagtctgcacgccactcttgggctctgctggcggagatccccttccttctgggtgcagactgcacctccggatgcagttttgatgtccatcttccaggagagagacggtctcgggtccagggagtggagggggctgcccctgccgtgcaggtcctggccgatggcgccttaccctgctgccctgggcttttggcctgaagcaaattcctgagtggggggtactggggcctgccgcatcctgtcctgtccactgcccacccccgtgtgctggctccctcacttctggctgcagtgggagccgccagtctgacccttgtcaccgcacgctctgcccccaccccgttgcaagaggtcacaccatgtcagcagccttgcactgaccgcagccggcccccaggcctcagagttctggatgcttccgtgcggctccaacaggcatcgtcttcccttccgcaggtggaggggccgcttcccgcaggcatctgagctctgtgccggggccgtggccatgggaagatgttccacgctgcctcctcctcgagttttcctcggaaacactcttgaatgtctgagtgagggtcctgcttagctctttggcctgtgagatgctttgaaaatttttatttttttaagatgaagcaagatgtctgtagcggtaattgcctcacattaaactgtcgccgactgcaggcgcagtgactgctgaatgtaccctgtgtggcgacttggaatcaataaaccatttgtgg

SEQ ID NO: 444850 - DNA, 2929 bp, Homo sapiens
ttcccggcgcctgagcggactgacgccgagacgcgcgcgggtcagcggcgcggggacgcggggcgctgggcgcggggctgggggcgcaggccccgaggccgcaggagcgcgcggagcggcgatgagcaggcggccggtggcccgcggggcgcggagcccgtgacagcctcggccaggcgggcgctgcgatggaggccgagggcctggactggctcctggtgccactgcaccagctggtgtcctggggcgcggccgcggccatggtcttcggaggggtggtgccctacgtcccgcagtatcgggacattcgcaggacgcagaacgccgacggcttctccacctacgtgtgcctggtgctgctggtggccaacattttgcggatactcttctggtttggaaggcgctttgagtccccgctgctgtggcagagcgccatcatgatcctgaccatgctgctgatgctgaagctgtgcaccgaggtccgtgtggccaacgagctcaacgccaggcgccgctcctttacagctgcagatagcaaggatgaagaagtcaaggttgcccccaggcggtccttcctggacttcgacccccaccacttctggcagtggagcagcttctcggactacgtgcagtgcgtcctggccttcacgggcgtggcgggctacatcacctacctgtccattgactccgccctgtttgtggagaccctgggcttcctggctgtgctgaccgaagccatgctgggtgtgccccagctttaccgcaaccaccgccaccagtccacggagggcatgagcatcaagatggtgctcatgtggaccagtggtgacgccttcaagacggcctacttcctgctgaagggtgcccctctgcagttctccgtgtgcggcctgctgcaggtgctggtggacctggccatcctggggcaggcctacgccttcgcccgccacccccagaagccggcgccccacgccgtgcaccccactggcaccaaggccctctgacagtggggaggacgaggatgtgggaccgccagccgcgggcactggtgggccctgacctccccgcggggagggtgggtgccgtggcccctgcaggtgtggcagagatggggcacgggcattggggtctccatcagcctctgtggggtgtctcagggtgggcagtgggggtggggctgggacgctgtttgtgctcagcggggacagccagggttgatctggccccgagggttttggatgtttttaggatgacataaaaagcaagtgttttccccatttcctcttatgaaacaccgtctgagcccaaggtacacattgggcggcctgcaggaacctgctccaggtggacacacgggccagcagccgcgaaccttgaagctggggtgaccgcaggagaccctgtaaggcctgtgagcggagccctcgaccccgtgacaccctggccagacaccctgcttggactggggtggcctctgctacccaggggtctggcacgggggagggctggggctttctctgcctggtacacacggaaaggcggctgtgcggacgcagggtcaccgtgctccgggttttctgacagtcggtgtttcctgggcctttggagtggctgcgaggcctgaacgccttgtggatccgctgtgtccagcccggctgagcatcgccagggctagctcatgctgctcttgtcagcctctggttctcctcgagtccttggggacgtggcagatgccagcgaccatcagacaacgtggaggccctcatgggcaatggctgagggggccgggctgaggctgtgcacatgcagtctgcacgccactcttgggctctgctggcggagatccccttccttctgggtgcagactgcacctccggatgcagttttgatgtccatcttccaggagagagacggtctcgggtccagggagtggagggggctgcccctgccgtgcaggtcctggccgatggcgccttaccctgctgccctgggcttttggcctgaagcaaattcctgagtggggggtactggggcctgccgcatcctgtcctgtccactgcccacccccgtgtgctggctccctcacttctggctgcagtgggagccgccagtctgacccttgtcaccgcacgctctgcccccaccccgttgcaagaggtcacaccatgtcagcagccttgcactgaccgcagccggcccccaggcctcagagttctggatgcttccgtgcggctccaacaggcatcgtcttcccttccgcaggtggaggggccgcttcccgcaggcatctgagctctgtgccggggccgtggccatgggaagatgttccacgctgcctcctcctcgagttttcctcggaaacactcttgaatgtctgagtgagggtcctgcttagctctttggcctgtgagatgctttgaaaatttttatttttttaagatgaagcaagatgtctgtagcggtaattgcctcacattaaactgtcgccgactgcaggcgcagtgactgctgaatgtaccctgtgtggcgacttggaatcaataaaccatttgtggatcctgagttggccttgggcagagggaaggatctggctgtggtcctggcctctgcccagacacacccttgtagcctgggccaccttagaaggcccctgtgtgacctgggttcctccagggccccaaacaacagcccagccccctcgacctgtcactggcctgtgcctgtgggccggcagcccgggggtccttttggctcctcacagacgggtctggcactgcctctagctgccctggccacatccgcccttctgcctcccaccaccgaaggcttagagcatgggaagggtctcctgtaaaggccaagagaagtgtttccagatttgcgatcttggagcagcacatacagatggagctgtgtgtgcatagcgatt

SEQ ID NO: 444851 - DNA, 3458 bp, Homo sapiens
ttcccggcgcctgagcggactgacgccgagacgcgcgcgggtcagcggcgcggggacgcggggcgctgggcgcggggctgggggcgcaggccccgaggccgcaggagcgcgcggagcggcgatgagcaggcggccggtggcccgcggggcgcggagcccgtgacagcctcggccaggcgggcgctgcgatggaggccgagggcctggactggctcctggtgccactgcaccagctggtgtcctggggcgcggccgcggccatggtcttcggaggggtggtgccctacgtcccgcagtatcgggacattcgcaggacgcagaacgccgacggcttctccacctacgtgtgcctggtgctgctggtggccaacattttgcggatactcttctggtttggaaggcgctttgagtccccgctgctgtggcagagcgccatcatgatcctgaccatgctgctgatgctgaagctgtgcaccgaggtccgtgtggccaacgagctcaacgccaggcgccgctcctttacagctgcagatagcaaggatgaagaagtcaaggttgcccccaggcggtccttcctggacttcgacccccaccacttctggcagtggagcagcttctcggactacgtgcagtgcgtcctggccttcacgggcgtggcgggctacatcacctacctgtccattgactccgccctgtttgtggagaccctgggcttcctggctgtgctgaccgaagccatgctgggtgtgccccagctttaccgcaaccaccgccaccagtccacggagggcatgaggctccttcctccaggatgtcggcaggaccctctctggaatgagggttagagtcctgcctgggcaggtgaacagagggcaaaaggtcagagagattctgttttctgaggcctaaagcaccccaacgtcatgacaagagctacagaagcactgtgggtacgggagcaccacgggtatgggagcaccacgggtacgggagcaccacgggtacgggagtcccgcagtgtggctggggacgggatgtcacaggcaccccatctccccatcgggccacaggaggcttggcctctgtccctgccgggagggccgggcagaagacgggcgacccacacagctggcacgttgtgagggcttggatggagtcctgaggctgagggagatggagcagtctctgcggaggaagtaggcagcgaggtcagccagcttcaagtgcgggaccgctgagaccctgtgcatcctcgtcaggaacggggaccaggagcagcagcgtcgggtcggctcggagtgatggagtgtgtggttgtagttacgcatcaagatggtgctcatgtggaccagtggtgacgccttcaagacggcctacttcctgctgaagggtgcccctctgcagttctccgtgtgcggcctgctgcaggtgctggtggacctggccatcctggggcaggcctacgccttcgcccgccacccccagaagccggcgccccacgccgtgcaccccactggcaccaaggccctctgacagtggggaggacgaggatgtgggaccgccagccgcgggcactggtgggccctgacctccccgcggggagggtgggtgccgtggcccctgcaggtgtggcagagatggggcacgggcattggggtctccatcagcctctgtggggtgtctcagggtgggcagtgggggtggggctgggacgctgtttgtgctcagcggggacagccagggttgatctggccccgagggttttggatgtttttaggatgacataaaaagcaagtgttttccccatttcctcttatgaaacaccgtctgagcccaaggtacacattgggcggcctgcaggaacctgctccaggtggacacacgggccagcagccgcgaaccttgaagctggggtgaccgcaggagaccctgtaaggcctgtgagcggagccctcgaccccgtgacaccctggccagacaccctgcttggactggggtggcctctgctacccaggggtctggcacgggggagggctggggctttctctgcctggtacacacggaaaggcggctgtgcggacgcagggtcaccgtgctccgggttttctgacagtcggtgtttcctgggcctttggagtggctgcgaggcctgaacgccttgtggatccgctgtgtccagcccggctgagcatcgccagggctagctcatgctgctcttgtcagcctctggttctcctcgagtccttggggacgtggcagatgccagcgaccatcagacaacgtggaggccctcatgggcaatggctgagggggccgggctgaggctgtgcacatgcagtctgcacgccactcttgggctctgctggcggagatccccttccttctgggtgcagactgcacctccggatgcagttttgatgtccatcttccaggagagagacggtctcgggtccagggagtggagggggctgcccctgccgtgcaggtcctggccgatggcgccttaccctgctgccctgggcttttggcctgaagcaaattcctgagtggggggtactggggcctgccgcatcctgtcctgtccactgcccacccccgtgtgctggctccctcacttctggctgcagtgggagccgccagtctgacccttgtcaccgcacgctctgcccccaccccgttgcaagaggtcacaccatgtcagcagccttgcactgaccgcagccggcccccaggcctcagagttctggatgcttccgtgcggctccaacaggcatcgtcttcccttccgcaggtggaggggccgcttcccgcaggcatctgagctctgtgccggggccgtggccatgggaagatgttccacgctgcctcctcctcgagttttcctcggaaacactcttgaatgtctgagtgagggtcctgcttagctctttggcctgtgagatgctttgaaaatttttatttttttaagatgaagcaagatgtctgtagcggtaattgcctcacattaaactgtcgccgactgcaggcgcagtgactgctgaatgtaccctgtgtggcgacttggaatcaataaaccatttgtggatcctgagttggccttgggcagagggaaggatctggctgtggtcctggcctctgcccagacacacccttgtagcctgggccaccttagaaggcccctgtgtgacctgggttcctccagggccccaaacaacagcccagccccctcgacctgtcactggcctgtgcctgtgggccggcagcccgggggtccttttggctcctcacagacgggtctggcactgcctctagctgccctggccacatccgcccttctgcctcccaccaccgaaggcttagagcatgggaagggtctcctgtaaaggccaagagaagtgtttccagatttgcgatcttggagcagcacatacagatggagctgtgtgtgcatagcgatt

SEQ ID NO: 444852 - DNA, 2795 bp, Homo sapiens
ttcccggcgcctgagcggactgacgccgagacgcgcgcgggtcagcggcgcggggacgcggggcgctgggcgcggggctgggggcgcaggccccgaggccgcaggagcgcgcggagcggcgatgagcaggcggccggtggcccgcggggcgcggagcccgtgacagcctcggccaggcgggcgctgcgatggaggccgagggcctggactggctcctggtgccactgcaccagctggtgtcctggggcgcggccgcggccatggtcttcggaggggtggtgccctacgtcccgcagtatcgggacattcgcaggacgcagaacgccgacggcttctccacctacgtgtgcctggtgctgctggtggccaacattttgcggatactcttctgagtcttgctctgtcgccaggctggagtgcagtggtacaatctcggctcactgcagcctctgactcctgggttcaagtgattctcctgcctcagcctcctgagtagctgggactacaggtgcctgccaccatacccaggtttggaaggcgctttgagtccccgctgctgtggcagagcgccatcatgatcctgaccatgctgctgatgctgaagctgtgcaccgaggtccgtgtggccaacgagctcaacgccaggcgccgctcctttacagcatcaagatggtgctcatgtggaccagtggtgacgccttcaagacggcctacttcctgctgaagggtgcccctctgcagttctccgtgtgcggcctgctgcaggtgctggtggacctggccatcctggggcaggcctacgccttcgcccgccacccccagaagccggcgccccacgccgtgcaccccactggcaccaaggccctctgacagtggggaggacgaggatgtgggaccgccagccgcgggcactggtgggccctgacctccccgcggggagggtgggtgccgtggcccctgcaggtgtggcagagatggggcacgggcattggggtctccatcagcctctgtggggtgtctcagggtgggcagtgggggtggggctgggacgctgtttgtgctcagcggggacagccagggttgatctggccccgagggttttggatgtttttaggatgacataaaaagcaagtgttttccccatttcctcttatgaaacaccgtctgagcccaaggtacacattgggcggcctgcaggaacctgctccaggtggacacacgggccagcagccgcgaaccttgaagctggggtgaccgcaggagaccctgtaaggcctgtgagcggagccctcgaccccgtgacaccctggccagacaccctgcttggactggggtggcctctgctacccaggggtctggcacgggggagggctggggctttctctgcctggtacacacggaaaggcggctgtgcggacgcagggtcaccgtgctccgggttttctgacagtcggtgtttcctgggcctttggagtggctgcgaggcctgaacgccttgtggatccgctgtgtccagcccggctgagcatcgccagggctagctcatgctgctcttgtcagcctctggttctcctcgagtccttggggacgtggcagatgccagcgaccatcagacaacgtggaggccctcatgggcaatggctgagggggccgggctgaggctgtgcacatgcagtctgcacgccactcttgggctctgctggcggagatccccttccttctgggtgcagactgcacctccggatgcagttttgatgtccatcttccaggagagagacggtctcgggtccagggagtggagggggctgcccctgccgtgcaggtcctggccgatggcgccttaccctgctgccctgggcttttggcctgaagcaaattcctgagtggggggtactggggcctgccgcatcctgtcctgtccactgcccacccccgtgtgctggctccctcacttctggctgcagtgggagccgccagtctgacccttgtcaccgcacgctctgcccccaccccgttgcaagaggtcacaccatgtcagcagccttgcactgaccgcagccggcccccaggcctcagagttctggatgcttccgtgcggctccaacaggcatcgtcttcccttccgcaggtggaggggccgcttcccgcaggcatctgagctctgtgccggggccgtggccatgggaagatgttccacgctgcctcctcctcgagttttcctcggaaacactcttgaatgtctgagtgagggtcctgcttagctctttggcctgtgagatgctttgaaaatttttatttttttaagatgaagcaagatgtctgtagcggtaattgcctcacattaaactgtcgccgactgcaggcgcagtgactgctgaatgtaccctgtgtggcgacttggaatcaataaaccatttgtggatcctgagttggccttgggcagagggaaggatctggctgtggtcctggcctctgcccagacacacccttgtagcctgggccaccttagaaggcccctgtgtgacctgggttcctccagggccccaaacaacagcccagccccctcgacctgtcactggcctgtgcctgtgggccggcagcccgggggtccttttggctcctcacagacgggtctggcactgcctctagctgccctggccacatccgcccttctgcctcccaccaccgaaggcttagagcatgggaagggtctcctgtaaaggccaagagaagtgtttccagatttgcgatcttggagcagcacatacagatggagctgtgtgtgcatagcgatt

SEQ ID NO: 444853 - DNA, 3013 bp, Homo sapiens
ttcccggcgcctgagcggactgacgccgagacgcgcgcgggtcagcggcgcggggacgcggggcgctgggcgcggggctgggggcgcaggccccgaggccgcaggagcgcgcggagcggcgatgagcaggcggccggtggcccgcggggcgcggagcccgtgacagcctcggccaggcgggcgctgcgatggaggccgagggcctggactggctcctggtgccactgcaccagctggtgtcctggggcgcggccgcggccatggtcttcggaggggtggtgccctacgtcccgcagtatcgggacattcgcaggacgcagaacgccgacggcttctccacctacgtgtgcctggtgctgctggtggccaacattttgcggatactcttctggtttggaaggcgctttgagtccccgctgctgtggcagagcgccatcatgatcctgaccatgctgctgatgctgaagctgtgcaccgaggtccgtgtggccaacgagctcaacgccaggcgccgctcctttacagctgcagatagcaaggatgaagaagtcaaggttgcccccaggcggtccttcctggtgctttgaatatgttattccactgccctctggactccattgtttctgatgagaagtcagctgttaatcttattggggtttccttacttcgacccccaccacttctggcagtggagcagcttctcggactacgtgcagtgcgtcctggccttcacgggcgtggcgggctacatcacctacctgtccattgactccgccctgtttgtggagaccctgggcttcctggctgtgctgaccgaagccatgctgggtgtgccccagctttaccgcaaccaccgccaccagtccacggagggcatgagcatcaagatggtgctcatgtggaccagtggtgacgccttcaagacggcctacttcctgctgaagggtgcccctctgcagttctccgtgtgcggcctgctgcaggtgctggtggacctggccatcctggggcaggcctacgccttcgcccgccacccccagaagccggcgccccacgccgtgcaccccactggcaccaaggccctctgacagtggggaggacgaggatgtgggaccgccagccgcgggcactggtgggccctgacctccccgcggggagggtgggtgccgtggcccctgcaggtgtggcagagatggggcacgggcattggggtctccatcagcctctgtggggtgtctcagggtgggcagtgggggtggggctgggacgctgtttgtgctcagcggggacagccagggttgatctggccccgagggttttggatgtttttaggatgacataaaaagcaagtgttttccccatttcctcttatgaaacaccgtctgagcccaaggtacacattgggcggcctgcaggaacctgctccaggtggacacacgggccagcagccgcgaaccttgaagctggggtgaccgcaggagaccctgtaaggcctgtgagcggagccctcgaccccgtgacaccctggccagacaccctgcttggactggggtggcctctgctacccaggggtctggcacgggggagggctggggctttctctgcctggtacacacggaaaggcggctgtgcggacgcagggtcaccgtgctccgggttttctgacagtcggtgtttcctgggcctttggagtggctgcgaggcctgaacgccttgtggatccgctgtgtccagcccggctgagcatcgccagggctagctcatgctgctcttgtcagcctctggttctcctcgagtccttggggacgtggcagatgccagcgaccatcagacaacgtggaggccctcatgggcaatggctgagggggccgggctgaggctgtgcacatgcagtctgcacgccactcttgggctctgctggcggagatccccttccttctgggtgcagactgcacctccggatgcagttttgatgtccatcttccaggagagagacggtctcgggtccagggagtggagggggctgcccctgccgtgcaggtcctggccgatggcgccttaccctgctgccctgggcttttggcctgaagcaaattcctgagtggggggtactggggcctgccgcatcctgtcctgtccactgcccacccccgtgtgctggctccctcacttctggctgcagtgggagccgccagtctgacccttgtcaccgcacgctctgcccccaccccgttgcaagaggtcacaccatgtcagcagccttgcactgaccgcagccggcccccaggcctcagagttctggatgcttccgtgcggctccaacaggcatcgtcttcccttccgcaggtggaggggccgcttcccgcaggcatctgagctctgtgccggggccgtggccatgggaagatgttccacgctgcctcctcctcgagttttcctcggaaacactcttgaatgtctgagtgagggtcctgcttagctctttggcctgtgagatgctttgaaaatttttatttttttaagatgaagcaagatgtctgtagcggtaattgcctcacattaaactgtcgccgactgcaggcgcagtgactgctgaatgtaccctgtgtggcgacttggaatcaataaaccatttgtggatcctgagttggccttgggcagagggaaggatctggctgtggtcctggcctctgcccagacacacccttgtagcctgggccaccttagaaggcccctgtgtgacctgggttcctccagggccccaaacaacagcccagccccctcgacctgtcactggcctgtgcctgtgggccggcagcccgggggtccttttggctcctcacagacgggtctggcactgcctctagctgccctggccacatccgcccttctgcctcccaccaccgaaggcttagagcatgggaagggtctcctgtaaaggccaagagaagtgtttccagatttgcgatcttggagcagcacatacagatggagctgtgtgtgcatagcgatt

SEQ ID NO: 444854 - DNA, 2950 bp, Homo sapiens
ttcccggcgcctgagcggactgacgccgagacgcgcgcgggtcagcggcgcggggacgcggggcgctgggcgcggggctgggggcgcaggccccgaggccgcaggagcgcgcggagcggcgatgagcaggcggccggtggcccgcggggcgcggagcccgtgacagcctcggccaggcgggcgctgcgatggaggccgagggcctggactggctcctggtgccactgcaccagctggtgtcctggggcgcggccgcggccatggtcttcggaggggtggtgccctacgtcccgcagtatcgggacattcgcaggacgcagaacgccgacggcttctccacctacgtgtgcctggtgctgctggtggccaacattttgcggatactcttctgtccttactaccattttgcaaaaccagcattcagcagatcacactctgtggaatgccaacattcaggatttggcaggtttggaaggcgctttgagtccccgctgctgtggcagagcgccatcatgatcctgaccatgctgctgatgctgaagctgtgcaccgaggtccgtgtggccaacgagctcaacgccaggcgccgctcctttacagacttcgacccccaccacttctggcagtggagcagcttctcggactacgtgcagtgcgtcctggccttcacgggcgtggcgggctacatcacctacctgtccattgactccgccctgtttgtggagaccctgggcttcctggctgtgctgaccgaagccatgctgggtgtgccccagctttaccgcaaccaccgccaccagtccacggagggcatgagcatcaagatggtgctcatgtggaccagtggtgacgccttcaagacggcctacttcctgctgaagggtgcccctctgcagttctccgtgtgcggcctgctgcaggtgctggtggacctggccatcctggggcaggcctacgccttcgcccgccacccccagaagccggcgccccacgccgtgcaccccactggcaccaaggccctctgacagtggggaggacgaggatgtgggaccgccagccgcgggcactggtgggccctgacctccccgcggggagggtgggtgccgtggcccctgcaggtgtggcagagatggggcacgggcattggggtctccatcagcctctgtggggtgtctcagggtgggcagtgggggtggggctgggacgctgtttgtgctcagcggggacagccagggttgatctggccccgagggttttggatgtttttaggatgacataaaaagcaagtgttttccccatttcctcttatgaaacaccgtctgagcccaaggtacacattgggcggcctgcaggaacctgctccaggtggacacacgggccagcagccgcgaaccttgaagctggggtgaccgcaggagaccctgtaaggcctgtgagcggagccctcgaccccgtgacaccctggccagacaccctgcttggactggggtggcctctgctacccaggggtctggcacgggggagggctggggctttctctgcctggtacacacggaaaggcggctgtgcggacgcagggtcaccgtgctccgggttttctgacagtcggtgtttcctgggcctttggagtggctgcgaggcctgaacgccttgtggatccgctgtgtccagcccggctgagcatcgccagggctagctcatgctgctcttgtcagcctctggttctcctcgagtccttggggacgtggcagatgccagcgaccatcagacaacgtggaggccctcatgggcaatggctgagggggccgggctgaggctgtgcacatgcagtctgcacgccactcttgggctctgctggcggagatccccttccttctgggtgcagactgcacctccggatgcagttttgatgtccatcttccaggagagagacggtctcgggtccagggagtggagggggctgcccctgccgtgcaggtcctggccgatggcgccttaccctgctgccctgggcttttggcctgaagcaaattcctgagtggggggtactggggcctgccgcatcctgtcctgtccactgcccacccccgtgtgctggctccctcacttctggctgcagtgggagccgccagtctgacccttgtcaccgcacgctctgcccccaccccgttgcaagaggtcacaccatgtcagcagccttgcactgaccgcagccggcccccaggcctcagagttctggatgcttccgtgcggctccaacaggcatcgtcttcccttccgcaggtggaggggccgcttcccgcaggcatctgagctctgtgccggggccgtggccatgggaagatgttccacgctgcctcctcctcgagttttcctcggaaacactcttgaatgtctgagtgagggtcctgcttagctctttggcctgtgagatgctttgaaaatttttatttttttaagatgaagcaagatgtctgtagcggtaattgcctcacattaaactgtcgccgactgcaggcgcagtgactgctgaatgtaccctgtgtggcgacttggaatcaataaaccatttgtggatcctgagttggccttgggcagagggaaggatctggctgtggtcctggcctctgcccagacacacccttgtagcctgggccaccttagaaggcccctgtgtgacctgggttcctccagggccccaaacaacagcccagccccctcgacctgtcactggcctgtgcctgtgggccggcagcccgggggtccttttggctcctcacagacgggtctggcactgcctctagctgccctggccacatccgcccttctgcctcccaccaccgaaggcttagagcatgggaagggtctcctgtaaaggccaagagaagtgtttccagatttgcgatcttggagcagcacatacagatggagctgtgtgtgcatagcgatt

SEQ ID NO: 444855 - DNA, 2707 bp, Homo sapiens
ctggaaccgtggatgaaaacccgtgtgtgtgggatgcggatacacttacacacatgtaaaatagtattgggggtgctgtgtgggcgagatgggagccggggtcatggtcctttgcctgcatacttctccttggctgcggaacttggaacgtgtctcagggatcccaggaggtgcaggtgttctacctctgagtttgccctgctccctgggtgagtgccaagcccctgtgagatcacctgggctaacttctgcttttataaaccgcagtgtggctggggacgggatgtcacaggcaccccatctccccatcgggccacaggaggcttggcctctgtccctgccgggagggccgggcagaagacgggcgacccacacagctggcacgttgtgagggcttggatggagtcctgaggctgagggagatggagcagtctctgcggaggaagtaggcagcgaggtcagccagcttcaagtgcgggaccgctgagaccctgtgcatcctcgtcaggaacggggaccaggagcagcagcgtcgggtcggctcggagtgatggagtgtgtggttgtagttacgcatcaagatggtgctcatgtggaccagtggtgacgccttcaagacggcctacttcctgctgaagggtgcccctctgcagttctccgtgtgcggcctgctgcaggtgctggtggacctggccatcctggggcaggcctacgccttcgcccgccacccccagaagccggcgccccacgccgtgcaccccactggcaccaaggccctctgacagtggggaggacgaggatgtgggaccgccagccgcgggcactggtgggccctgacctccccgcggggagggtgggtgccgtggcccctgcaggtgtggcagagatggggcacgggcattggggtctccatcagcctctgtggggtgtctcagggtgggcagtgggggtggggctgggacgctgtttgtgctcagcggggacagccagggttgatctggccccgagggttttggatgtttttaggatgacataaaaagcaagtgttttccccatttcctcttatgaaacaccgtctgagcccaaggtacacattgggcggcctgcaggaacctgctccaggtggacacacgggccagcagccgcgaaccttgaagctggggtgaccgcaggagaccctgtaaggcctgtgagcggagccctcgaccccgtgacaccctggccagacaccctgcttggactggggtggcctctgctacccaggggtctggcacgggggagggctggggctttctctgcctggtacacacggaaaggcggctgtgcggacgcagggtcaccgtgctccgggttttctgacagtcggtgtttcctgggcctttggagtggctgcgaggcctgaacgccttgtggatccgctgtgtccagcccggctgagcatcgccagggctagctcatgctgctcttgtcagcctctggttctcctcgagtccttggggacgtggcagatgccagcgaccatcagacaacgtggaggccctcatgggcaatggctgagggggccgggctgaggctgtgcacatgcagtctgcacgccactcttgggctctgctggcggagatccccttccttctgggtgcagactgcacctccggatgcagttttgatgtccatcttccaggagagagacggtctcgggtccagggagtggagggggctgcccctgccgtgcaggtcctggccgatggcgccttaccctgctgccctgggcttttggcctgaagcaaattcctgagtggggggtactggggcctgccgcatcctgtcctgtccactgcccacccccgtgtgctggctccctcacttctggctgcagtgggagccgccagtctgacccttgtcaccgcacgctctgcccccaccccgttgcaagaggtcacaccatgtcagcagccttgcactgaccgcagccggcccccaggcctcagagttctggatgcttccgtgcggctccaacaggcatcgtcttcccttccgcaggtggaggggccgcttcccgcaggcatctgagctctgtgccggggccgtggccatgggaagatgttccacgctgcctcctcctcgagttttcctcggaaacactcttgaatgtctgagtgagggtcctgcttagctctttggcctgtgagatgctttgaaaatttttatttttttaagatgaagcaagatgtctgtagcggtaattgcctcacattaaactgtcgccgactgcaggcgcagtgactgctgaatgtaccctgtgtggcgacttggaatcaataaaccatttgtggatcctgagttggccttgggcagagggaaggatctggctgtggtcctggcctctgcccagacacacccttgtagcctgggccaccttagaaggcccctgtgtgacctgggttcctccagggccccaaacaacagcccagccccctcgacctgtcactggcctgtgcctgtgggccggcagcccgggggtccttttggctcctcacagacgggtctggcactgcctctagctgccctggccacatccgcccttctgcctcccaccaccgaaggcttagagcatgggaagggtctcctgtaaaggccaagagaagtgtttccagatttgcgatcttggagcagcacatacagatggagctgtgtgtgcatagcgatt

SEQ ID NO: 444856 - DNA, 2511 bp, Homo sapiens
ttcccggcgcctgagcggactgacgccgagacgcgcgcgggtcagcggcgcggggacgcggggcgctgggcgcggggctgggggcgcaggccccgaggccgcaggagcgcgcggagcggcgatgagcaggcggccggtggcccgcggggcgcggagcccgtgacagcctcggccaggcgggcgctgcgatggaggccgagggcctggactggctcctggtgccactgcaccagctggtgtcctggggcgcggccgcggccatggtcttcggaggggtggtgccctacgtcccgcagtatcgggacattcgcaggacgcagaacgccgacggcttctccacctacgtgtgcctggtgctgctggtggccaacattttgcggatactcttctggtttggaaggcgctttgagtccccgctgctgtggcagagcgccatcatgatcctgaccatgctgctgatgctgaagctgtgcaccgaggtccgtgtggccaacgagctcaacgccaggcgccgctcctttacagctgcagatagcaaggatgaagaagtcaaggttgcccccaggcggtccttcctggacttcgacccccaccacttctggcagtggagcagcttctcggactacgtgcagtgcgtcctggccttcacgggcgtggcgggctacatcacctacctgtccattgactccgccctgtttgtggagaccctgggcttcctggctgtgctgaccgaagccatgctgggtgtgccccagctttaccgcaaccaccgccaccagtccacggagggcatgagcatcaagatggtgctcatgtggaccagtggtgacgccttcaagacggcctacttcctgctgaagggtgcccctctgcagttctccgtgtgcggcctgctgcaggtgctggtggacctggccatcctggggcaggcctacgccttcgcccgccacccccagaagccggcgccccacgccgtgcaccccactggcaccaaggccctctgacagtggggaggacgaggatgtgggaccgccagccgcgggcactggtgggccctgacctccccgcggggagggtgggtgccgtggcccctgcaggtgtggcagagatggggcacgggcattggggtctccatcagcctctgtggggtgtctcagggtgggcagtgggggtggggctgggacgctgtttgtgctcagcggggacagccagggttgatctggccccgagggttttggatgtttttaggatgacataaaaagcaagtgttttccccatttcctcttatgaaacaccgtctgagcccaaggtacacattgggcggcctgcaggaacctgctccaggtggacacacgggccagcagccgcgaaccttgaagctggggtgaccgcaggagaccctgtaaggcctgtgagcggagccctcgaccccgtgacaccctggccagacaccctgcttggactggggtggcctctgctacccaggggtctggcacgggggagggctggggctttctctgcctggtacacacggaaaggcggctgtgcggacgcagggtcaccgtgctccgggttttctgacagtcggtgtttcctgggcctttggagtggctgcgaggcctgaacgccttgtggatccgctgtgtccagcccggctgagcatcgccagggctagctcatgctgctcttgtcagcctctggttctcctcgagtccttggggacgtggcagatgccagcgaccatcagacaacgtggaggccctcatgggcaatggctgagggggccgggctgaggctgtgcacatgcagtctgcacgccactcttgggctctgctggcggagatccccttccttctgggtgcagactgcacctccggatgcagttttgatgtccatcttccaggagagagacggtctcgggtccagggagtggagggggctgcccctgccgtgcaggtcctggccgatggcgccttaccctgctgccctgggcttttggcctgaagcaaattcctgagtggggggtactggggcctgccgcatcctgtcctgtccactgcccacccccgtgtgctggctccctcacttctggctgcagtgggagccgccagtctgacccttgtcaccgcacgctctgcccccaccccgttgcaagaggtcacaccatgtcagcagccttgcactgaccgcagccggcccccaggcctcagagttctggatgcttccgtgcggctccaacaggcatcgtcttcccttccgcaggtggaggggccgcttcccgcaggcatctgagctctcctcgagttttcctcggaaacactcttgaatgtctgagtgagggtcctgcttagctctttggcctgtgagatgctttgaaaatttttatttttttaagatgaagcaagatgtctgtagcggtaattgcctcacattaaactgtcgccgactgcaggcgcagtgactgctgaatgtaccctgtgtggcgacttggaatcaataaaccatttgtgg

SEQ ID NO: 444857 - DNA, 991 bp, Homo sapiens
  misc_feature (20)..(20): n is a, c, g, or t
  misc_feature (25)..(25): n is a, c, g, or t
  misc_feature (27)..(27): n is a, c, g, or t
gggggcctgccgagatcccnttccntntggttcaagatgcacctcggaatgcaggctgcggcctgaagcaaattcctgagtggggggtactggggcctgccgcatcctgtcctgtccactgcccacccccgtgtgctggctccctcacttctggctgcagtgggagccgccagtctgacccttgtcaccgcacgctctgcccccaccccgttgcaagaggtcacaccatgtcagcagccttgcactgaccgcagccggcccccaggcctcagagttctggatgcttccgtgcggctccaacaggcatcgtcttcccttccgcaggtggaggggccgcttcccgcaggcatctgagctctgtgccggggccgtggccatgggaagatgttccacgctgcctcctcctcgagttttcctcggaaacactcttgaatgtctgagtgagggtcctgcttagctctttggcctgtgagatgctttgaaaatttttatttttttaagatgaagcaagatgtctgtagcggtaattgcctcacattaaactgtcgccgactgcaggcgcagtgactgctgaatgtaccctgtgtggcgacttggaatcaataaaccatttgtggatcctgagttggccttgggcagagggaaggatctggctgtggtcctggcctctgcccagacacacccttgtagcctgggccaccttagaaggcccctgtgtgacctgggttcctccagggccccaaacaacagcccagccccctcgacctgtcactggcctgtgcctgtgggccggcagcccgggggtccttttggctcctcacagacgggtctggcactgcctctagctgccctggccacatccgcccttctgcctcccaccaccgaaggcttagagcatgggaagggtctcctgtaaaggccaagagaagtgtttccagatttgcgatcttggagcagcacatacagatggagctgtgtgtgcatagcgatt

SEQ ID NO: 444858 - DNA, 2356 bp, Homo sapiens
ttcccggcgcctgagcggactgacgccgagacgcgcgcgggtcagcggcgcggggacgcggggcgctgggcgcggggctgggggcgcaggccccgaggccgcaggagcgcgcggagcggcgatgagcaggcggccggtggcccgcggggcgcggagcccgtgacagcctcggccaggcgggcgctgcgatggaggccgagggcctggactggctcctggtgccactgcaccagctggtgtcctggggcgcggccgcggccatggtcttcggaggggtggtgccctacgtcccgcagtatcgggacattcgcaggacgcagaacgccgacggcttctccacctacgtgtgcctggtgctgctggtggccaacattttgcggatactcttctggtttggaaggcgctttgagtccccgctgctgtggcagagcgccatcatgatcctgaccatgctgctgatgctgaagctgtgcaccgaggtccgtgtggccaacgagctcaacgccaggcgccgctcctttacagctgcagatagcaaggatgaagaagtcaaggttgcccccaggcggtccttcctggacttcgacccccaccacttctggcagtggagcagcttctcggactacgtgcagtgcgtcctggccttcacgggcgtggcgggctacatcacctacctgtccattgactccgccctgtttgtggagaccctgggcttcctggctgtgctgaccgaagccatgctgggtgtgccccagctttaccgcaaccaccgccaccagtccacggagggcatgagcatcaagatggtgctcatgtggaccagtggtgacgccttcaagacggcctacttcctgctgaagggtgcccctctgcagttctccgtgtgcggcctgctgcaggtgctggtggacctggccatcctggggcaggcctacgccttcgcccgccacccccagaagccggcgccccacgccgtgcaccccactggcaccaaggccctctgacagtggggaggacgaggatgtgggaccgccagccgcgggcactggtgggccctgacctccccgcggggagggtgggtgccgtggcccctgcaggtgtggcagagatggggcacgggcattggggtctccatcagcctctgtggggtgtctcagggtgggcagtgggggtggggctgggacgctgtttgtgctcagcggggacagccagggttgatctggccccgagggttttggatgtttttaggatgacataaaaagcaagtgttttccccatttcctcttatgaaacaccgtctgagcccaaggtacacattgggcggcctgcaggaacctgctccaggtggacacacgggccagcagccgcgaaccttgaagctggggtgaccgcaggagaccctgtaaggcctgtgagcggagccctcgaccccgtgacaccctggccagacaccctgcttggactggggtggcctctgctacccaggggtctggcacgggggagggctggggctttctctgcctggtacacacggaaaggcggctgtgcggacgcagggtcaccgtgctccgggttttctgacagtcggtgtttcctgggcctttggagtggctgcgaggcctgaacgccttgtggatccgctgtgtccagcccggctgagcatcgccagggctagctcatgctgctcttgtcagcctctggttctcctcgagtccttggggacgtggcagatgccagcgaccatcagacaacgtggaggccctcatgggcaatggctgagggggccgggctgaggctgtgcacatgcagtctgcacgccactcttgggctctgctggcggagatccccttccttctgggtgcagactgcacctccggatgcagttttgatgtccatctttgcccacccccgtgtgctggctccctcacttctggctgcagtgggagccgccagtctgacccttgtcaccgcacgctctgcccccaccccgttgcaagaggtcacaccatgtcagcagccttgcactgaccgcagccggcccccaggcctcagagttctggatgcttccggggccgcttcccgcaggcatctgagctctgtgccggggccgtggccatgggaagatgttccacgctgcctcctcctcgagttttcctcggaaacactcttgaatgtctgagtgagggtcctgcttagctctttggcctgtgagatgctttgaaaatttttatttttttaagatgaagcaagatgtctgtagcggtaattgcctcacattaaactgtcgccgactgcaggcgcagtgactgctgaatgtaccctgtgtggcgacttggaatcaataaaccatttgtgg

SEQ ID NO: 444859 - DNA, 1779 bp, Homo sapiens
ttcccggcgcctgagcggactgacgccgagacgcgcgcgggtcagcggcgcggggacgcggggcgctgggcgcggggctgggggcgcaggccccgaggccgcaggagcgcgcggagcggcgatgagcaggcggccggtggcccgcggggcgcggagcccgtgacagcctcggccaggcgggcgctgcgatggaggccgagggcctggactggctcctggtgccactgcaccagctggtgtcctggggcgcggccgcggccatggtcttcggaggggtggtgccctacgtcccgcagtatcgggacattcgcaggacgcagaacgccgacggcttctccacctacgtgtgcctggtgctgctggtggccaacattttgcggatactcttctggtttggaaggcgctttgagtccccgctgctgtggcagagcgccatcatgatcctgaccatgctgctgatgctgaagctgtgcaccgaggtccgtgtggccaacgagctcaacgccaggcgccgctcctttacagctgcagatagcaaggatgaagaagtcaaggttgcccccaggcggtccttcctggacttcgacccccaccacttctggcagtggagcagcttctcggactacgtgcagtgcgtcctggccttcacgggcgtggcgggctacatcacctacctgtccattgactccgccctgtttgtggagaccctgggcttcctggctgtgctgaccgaagccatgctgggtgtgccccagctttaccgcaaccaccgccaccagtccacggagggcatgagcatcaagatggtgctcatgtggaccagtggtgacgccttcaagacggcctacttcctgctgaagggtgcccctctgcagttctccgtgtgcggcctgctgcaggtgctggtggacctggccatcctggggcaggcctacgccttcgcccgccacccccagaagccggcgccccacgccgtgcaccccactggcaccaaggccctctgacagtggggaggacgaggatgtgggaccgccagccgcgggcactggtgggccctgacctccccgcggggagggtgggtgccgtggcccctgcaggtgtggcagagatggggcacgggcattggggtctccatcagcctctgtggggtgtctcagggtgggcagtgggggtggggctgggacgctgtttgtgctcagcggggacagccagggttgatctggccccgagggttttggatgtttttaggatgacataaaaagcaagtgttttccccatttcctcttatgaaacaccgtctgagcccaaggtacacattgggcggcctgcaggaacctgctccaggtggacacacgggccagcagccgcgaaccttgaagctggggtgaccgcaggagaccctgtaaggcctgtgagcggagccctcgaccccgtgacaccctggccagacaccctgcttggactggggtggcctctgctacccaggggtctggcacgggggagggctggggctttctctgcctggtacacacggaaaggcggctgtgcggacgcagggtcaccgtgctccgggttttctgacagtcggtgtttcctgggcctttggagtggctgcttagctctttggcctgtgagatgctttgaaaatttttatttttttaagatgaagcaagatgtctgtagcggtaattgcctcacattaaactgtcgccgactgcaggcgcagtgactgctgaatgtaccctgtgtggcgacttggaatcaataaaccatttgtgg

SEQ ID NO: 444860 - DNA, 616 bp, Homo sapiens
  misc_feature (230)..(230): n is a, c, g, or t
agcagtaggcgtagctggcacagacatctgcttcgcgaaccctccttgtcactgactcgatcagttatgcactcagaaagcgtctggtcagagtgagggctccatcgtcagtctgcgatgacataccctgcatgcattgctgagcaatcatagtgaggtctggcatcgatctgtctgtcatgccacactgtggctgctcctacgctcagtggaccgcagtatatcatgtnccgcacgctctgcccccaccccgttgcaagaggtcacaccatgtcagcagccttgcactgaccgcagccggcccccaggcctcagagttctggatgcttccgtgcggctccaacaggcatcgtcttcccttccgcaggtggaggggccgcttcccgcaggcatctgagctctcctcgagttttcctcggaaacactcttgaatgtctgagtgagggtcctgcttagctctttggcctgtgagatgctttgaaaatttttatttttttaagatgaagcaagatgtctgtagcggtaattgcctcacattaaactgtcgccgactgcaggcgcagtgactgctgaatgtaccctgtgtggcgacttggaatcaataaaccatttgtgg

SEQ ID NO: 444861 - DNA, 746 bp, Homo sapiens
ttcccggcgcctgagcggactgacgccgagacgcgcgcgggtcagcggcgcggggacgcggggcgctgggcgcggggctgggggcgcaggccccgaggccgcaggagcgcgcggagcggcgatgagcaggcggccggtggcccgcggggcgcggagcccgtgacagcctcggccaggcgggcgctgcgatggaggccgagggcctggactggctcctggtgccactgcaccagctggtgtcctggggcgcggccgcggccatggtcttcggaggggtggtgccctacgtcccgcagtatcgggacattcgcaggacgcagaacgccgacggcttctccacctacgtgtgcctggtgctgctggtggccaacattttgcggatactcttctggtttggaaggcgctttgagtccccgctgctgtggcagagcgccatcatgatcctgaccatgctgctgatgctgaagctgtgcaccgaggtccgtgtggccaacgagctcaacgccaggcgccgctcctttacagagagcagccagcgggtacagaatggattttggaagagggagtcaccactggacctccaaggaagccacgtgcagacatctacaaccttcgatctcctgacgagtttattgttggccaaaaccaggctatgattgaaccaggatgaatgcgggtgttggaagtagaatatatatatacatataaaattgaaactggcgatggaatatgagaggagccctctg

SEQ ID NO: 444862 - DNA, 633 bp, Homo sapiens
gtgttgcataaggtgatctagaggatcccgcaaggtctgtcggtacctcgagttttcctcggaaacactcttgaatgtctgagtgagggtcctgcttagctctttggcctgtgagatgctttgaaaatttttatttttttaagatgaagcaagatgtctgtagcggtaattgcctcacattaaactgtcgccgactgcaggcgcagtgactgctgaatgtaccctgtgtggcgacttggaatcaataaaccatttgtggatcctgagttggccttgggcagagggaaggatctggctgtggtcctggcctctgcccagacacacccttgtagcctgggccaccttagaaggcccctgtgtgacctgggttcctccagggccccaaacaacagcccagccccctcgacctgtcactggcctgtgcctgtgggccggcagcccgggggtccttttggctcctcacagacgggtctggcactgcctctagctgccctggccacatccgcccttctgcctcccaccaccgaaggcttagagcatgggaagggtctcctgtaaaggccaagagaagtgtttccagatttgcgatcttggagcagcacatacagatggagctgtgtgtgcatagcgatt

SEQ ID NO: 444863 - DNA, 3066 bp, Homo sapiens
ttcccggcgcctgagcggactgacgccgagacgcgcgcgggtcagcggcgcggggacgcggggcgctgggcgcggggctgggggcgcaggccccgaggccgcaggagcgcgcggagcggcgatgagcaggcggccggtggcccgcggggcgcggagcccgtgacagcctcggccaggcgggcgctgcgatggaggccgagggcctggactggctcctggtgccactgcaccagctggtgtcctggggcgcggccgcggccatggtcttcggaggggtggtgccctacgtcccgcagtatcgggacattcgcaggacgcagaacgccgacggcttctccacctacgtgtgcctggtgctgctggtggccaacattttgcggatactcttctgagtcttgctctgtcgccaggctggagtgcagtggtacaatctcggctcactgcagcctctgactcctgggttcaagtgattctcctgcctcagcctcctgagtagctgggactacaggtgcctgccaccatacccaggtttggaaggcgctttgagtccccgctgctgtggcagagcgccatcatgatcctgaccatgctgctgatgctgaagctgtgcaccgaggtccgtgtggccaacgagctcaacgccaggcgccgctcctttacagctgcagatagcaaggatgaagaagtcaaggttgcccccaggcggtccttcctggacttcgacccccaccacttctggcagtggagcagcttctcggactacgtgcagtgcgtcctggccttcacgggcgtggcgggctacatcacctacctgtccattgactccgccctgtttgtggagaccctgggcttcctggctgtgctgaccgaagccatgctgggtgtgccccagctttaccgcaaccaccgccaccagtccacggagggcatgagcatcaagatggtgctcatgtggaccagtggtgacgccttcaagacggcctacttcctgctgaagggtgcccctctgcagttctccgtgtgcggcctgctgcaggtgctggtggacctggccatcctggggcaggcctacgccttcgcccgccacccccagaagccggcgccccacgccgtgcaccccactggcaccaaggccctctgacagtggggaggacgaggatgtgggaccgccagccgcgggcactggtgggccctgacctccccgcggggagggtgggtgccgtggcccctgcaggtgtggcagagatggggcacgggcattggggtctccatcagcctctgtggggtgtctcagggtgggcagtgggggtggggctgggacgctgtttgtgctcagcggggacagccagggttgatctggccccgagggttttggatgtttttaggatgacataaaaagcaagtgttttccccatttcctcttatgaaacaccgtctgagcccaaggtacacattgggcggcctgcaggaacctgctccaggtggacacacgggccagcagccgcgaaccttgaagctggggtgaccgcaggagaccctgtaaggcctgtgagcggagccctcgaccccgtgacaccctggccagacaccctgcttggactggggtggcctctgctacccaggggtctggcacgggggagggctggggctttctctgcctggtacacacggaaaggcggctgtgcggacgcagggtcaccgtgctccgggttttctgacagtcggtgtttcctgggcctttggagtggctgcgaggcctgaacgccttgtggatccgctgtgtccagcccggctgagcatcgccagggctagctcatgctgctcttgtcagcctctggttctcctcgagtccttggggacgtggcagatgccagcgaccatcagacaacgtggaggccctcatgggcaatggctgagggggccgggctgaggctgtgcacatgcagtctgcacgccactcttgggctctgctggcggagatccccttccttctgggtgcagactgcacctccggatgcagttttgatgtccatcttccaggagagagacggtctcgggtccagggagtggagggggctgcccctgccgtgcaggtcctggccgatggcgccttaccctgctgccctgggcttttggcctgaagcaaattcctgagtggggggtactggggcctgccgcatcctgtcctgtccactgcccacccccgtgtgctggctccctcacttctggctgcagtgggagccgccagtctgacccttgtcaccgcacgctctgcccccaccccgttgcaagaggtcacaccatgtcagcagccttgcactgaccgcagccggcccccaggcctcagagttctggatgcttccgtgcggctccaacaggcatcgtcttcccttccgcaggtggaggggccgcttcccgcaggcatctgagctctgtgccggggccgtggccatgggaagatgttccacgctgcctcctcctcgagttttcctcggaaacactcttgaatgtctgagtgagggtcctgcttagctctttggcctgtgagatgctttgaaaatttttatttttttaagatgaagcaagatgtctgtagcggtaattgcctcacattaaactgtcgccgactgcaggcgcagtgactgctgaatgtaccctgtgtggcgacttggaatcaataaaccatttgtggatcctgagttggccttgggcagagggaaggatctggctgtggtcctggcctctgcccagacacacccttgtagcctgggccaccttagaaggcccctgtgtgacctgggttcctccagggccccaaacaacagcccagccccctcgacctgtcactggcctgtgcctgtgggccggcagcccgggggtccttttggctcctcacagacgggtctggcactgcctctagctgccctggccacatccgcccttctgcctcccaccaccgaaggcttagagcatgggaagggtctcctgtaaaggccaagagaagtgtttccagatttgcgatcttggagcagcacatacagatggagctgtgtgtgcatagcgatt

SEQ ID NO: 444864 - DNA, 2658 bp, Homo sapiens
ttcccggcgcctgagcggactgacgccgagacgcgcgcgggtcagcggcgcggggacgcggggcgctgggcgcggggctgggggcgcaggccccgaggccgcaggagcgcgcggagcggcgatgagcaggcggccggtggcccgcggggcgcggagcccgtgacagcctcggccaggcgggcgctgcgatggaggccgagggcctggactggctcctggtgccactgcaccagctggtgtcctggggcgcggccgcggccatggtcttcggaggggtggtgccctacgtcccgcagtatcgggacattcgcaggacgcagaacgccgacggcttctccacctacgtgtgcctggtgctgctggtggccaacattttgcggatactcttctggtttggaaggcgctttgagtccccgctgctgtggcagagcgccatcatgatcctgaccatgctgctgatgctgaagctgtgcaccgaggtccgtgtggccaacgagctcaacgccaggcgccgctcctttacagcatcaagatggtgctcatgtggaccagtggtgacgccttcaagacggcctacttcctgctgaagggtgcccctctgcagttctccgtgtgcggcctgctgcaggtgctggtggacctggccatcctggggcaggcctacgccttcgcccgccacccccagaagccggcgccccacgccgtgcaccccactggcaccaaggccctctgacagtggggaggacgaggatgtgggaccgccagccgcgggcactggtgggccctgacctccccgcggggagggtgggtgccgtggcccctgcaggtgtggcagagatggggcacgggcattggggtctccatcagcctctgtggggtgtctcagggtgggcagtgggggtggggctgggacgctgtttgtgctcagcggggacagccagggttgatctggccccgagggttttggatgtttttaggatgacataaaaagcaagtgttttccccatttcctcttatgaaacaccgtctgagcccaaggtacacattgggcggcctgcaggaacctgctccaggtggacacacgggccagcagccgcgaaccttgaagctggggtgaccgcaggagaccctgtaaggcctgtgagcggagccctcgaccccgtgacaccctggccagacaccctgcttggactggggtggcctctgctacccaggggtctggcacgggggagggctggggctttctctgcctggtacacacggaaaggcggctgtgcggacgcagggtcaccgtgctccgggttttctgacagtcggtgtttcctgggcctttggagtggctgcgaggcctgaacgccttgtggatccgctgtgtccagcccggctgagcatcgccagggctagctcatgctgctcttgtcagcctctggttctcctcgagtccttggggacgtggcagatgccagcgaccatcagacaacgtggaggccctcatgggcaatggctgagggggccgggctgaggctgtgcacatgcagtctgcacgccactcttgggctctgctggcggagatccccttccttctgggtgcagactgcacctccggatgcagttttgatgtccatcttccaggagagagacggtctcgggtccagggagtggagggggctgcccctgccgtgcaggtcctggccgatggcgccttaccctgctgccctgggcttttggcctgaagcaaattcctgagtggggggtactggggcctgccgcatcctgtcctgtccactgcccacccccgtgtgctggctccctcacttctggctgcagtgggagccgccagtctgacccttgtcaccgcacgctctgcccccaccccgttgcaagaggtcacaccatgtcagcagccttgcactgaccgcagccggcccccaggcctcagagttctggatgcttccgtgcggctccaacaggcatcgtcttcccttccgcaggtggaggggccgcttcccgcaggcatctgagctctgtgccggggccgtggccatgggaagatgttccacgctgcctcctcctcgagttttcctcggaaacactcttgaatgtctgagtgagggtcctgcttagctctttggcctgtgagatgctttgaaaatttttatttttttaagatgaagcaagatgtctgtagcggtaattgcctcacattaaactgtcgccgactgcaggcgcagtgactgctgaatgtaccctgtgtggcgacttggaatcaataaaccatttgtggatcctgagttggccttgggcagagggaaggatctggctgtggtcctggcctctgcccagacacacccttgtagcctgggccaccttagaaggcccctgtgtgacctgggttcctccagggccccaaacaacagcccagccccctcgacctgtcactggcctgtgcctgtgggccggcagcccgggggtccttttggctcctcacagacgggtctggcactgcctctagctgccctggccacatccgcccttctgcctcccaccaccgaaggcttagagcatgggaagggtctcctgtaaaggccaagagaagtgtttccagatttgcgatcttggagcagcacatacagatggagctgtgtgtgcatagcgatt

SEQ ID NO: 444865 - DNA, 2870 bp, Homo sapiens
gggaagggccttggtctctgaagccagcacagagggaatcagcatggccaccctctgaggactgcatcctggctccctgtcctcccaggagaacgtctgtggctttttcctggttgctgtgggagcctcacctgccaaactgcaggctgattgagattcccgcgctggaacagtcaggggttggggctttctatgagtgcgtgccacacacagcccagccttggaggtggtggctctgcaggttcgggattgggagaggcggcatgggcgggcctccctcccgacacaggatctttcctgctgcaagttcgggaccaggagaggcggcatgggtttggaaggcgctttgagtccccgctgctgtggcagagcgccatcatgatcctgaccatgctgctgatgctgaagctgtgcaccgaggtccgtgtggccaacgagctcaacgccaggcgccgctcctttacagctgcagatagcaaggatgaagaagtcaaggttgcccccaggcggtccttcctggacttcgacccccaccacttctggcagtggagcagcttctcggactacgtgcagtgcgtcctggccttcacgggcgtggcgggctacatcacctacctgtccattgactccgccctgtttgtggagaccctgggcttcctggctgtgctgaccgaagccatgctgggtgtgccccagctttaccgcaaccaccgccaccagtccacggagggcatgagcatcaagatggtgctcatgtggaccagtggtgacgccttcaagacggcctacttcctgctgaagggtgcccctctgcagttctccgtgtgcggcctgctgcaggtgctggtggacctggccatcctggggcaggcctacgccttcgcccgccacccccagaagccggcgccccacgccgtgcaccccactggcaccaaggccctctgacagtggggaggacgaggatgtgggaccgccagccgcgggcactggtgggccctgacctccccgcggggagggtgggtgccgtggcccctgcaggtgtggcagagatggggcacgggcattggggtctccatcagcctctgtggggtgtctcagggtgggcagtgggggtggggctgggacgctgtttgtgctcagcggggacagccagggttgatctggccccgagggttttggatgtttttaggatgacataaaaagcaagtgttttccccatttcctcttatgaaacaccgtctgagcccaaggtacacattgggcggcctgcaggaacctgctccaggtggacacacgggccagcagccgcgaaccttgaagctggggtgaccgcaggagaccctgtaaggcctgtgagcggagccctcgaccccgtgacaccctggccagacaccctgcttggactggggtggcctctgctacccaggggtctggcacgggggagggctggggctttctctgcctggtacacacggaaaggcggctgtgcggacgcagggtcaccgtgctccgggttttctgacagtcggtgtttcctgggcctttggagtggctgcgaggcctgaacgccttgtggatccgctgtgtccagcccggctgagcatcgccagggctagctcatgctgctcttgtcagcctctggttctcctcgagtccttggggacgtggcagatgccagcgaccatcagacaacgtggaggccctcatgggcaatggctgagggggccgggctgaggctgtgcacatgcagtctgcacgccactcttgggctctgctggcggagatccccttccttctgggtgcagactgcacctccggatgcagttttgatgtccatcttccaggagagagacggtctcgggtccagggagtggagggggctgcccctgccgtgcaggtcctggccgatggcgccttaccctgctgccctgggcttttggcctgaagcaaattcctgagtggggggtactggggcctgccgcatcctgtcctgtccactgcccacccccgtgtgctggctccctcacttctggctgcagtgggagccgccagtctgacccttgtcaccgcacgctctgcccccaccccgttgcaagaggtcacaccatgtcagcagccttgcactgaccgcagccggcccccaggcctcagagttctggatgcttccgtgcggctccaacaggcatcgtcttcccttccgcaggtggaggggccgcttcccgcaggcatctgagctctgtgccggggccgtggccatgggaagatgttccacgctgcctcctcctcgagttttcctcggaaacactcttgaatgtctgagtgagggtcctgcttagctctttggcctgtgagatgctttgaaaatttttatttttttaagatgaagcaagatgtctgtagcggtaattgcctcacattaaactgtcgccgactgcaggcgcagtgactgctgaatgtaccctgtgtggcgacttggaatcaataaaccatttgtggatcctgagttggccttgggcagagggaaggatctggctgtggtcctggcctctgcccagacacacccttgtagcctgggccaccttagaaggcccctgtgtgacctgggttcctccagggccccaaacaacagcccagccccctcgacctgtcactggcctgtgcctgtgggccggcagcccgggggtccttttggctcctcacagacgggtctggcactgcctctagctgccctggccacatccgcccttctgcctcccaccaccgaaggcttagagcatgggaagggtctcctgtaaaggccaagagaagtgtttccagatttgcgatcttggagcagcacatacagatggagctgtgtgtgcatagcgatt

SEQ ID NO: 444866 - DNA, 2712 bp, Homo sapiens
ttcccggcgcctgagcggactgacgccgagacgcgcgcgggtcagcggcgcggggacgcggggcgctgggcgcggggctgggggcgcaggccccgaggccgcaggagcgcgcggagcggcgatgagcaggcggccggtggcccgcggggcgcggagcccgtgacagcctcggccaggcgggcgctgcgatggaggccgagggcctggactggctcctggtgccactgcaccagctggtgtcctggggcgcggccgcggccatggtcttcggaggggtggtgccctacgtcccgcagtatcgggacattcgcaggacgcagaacgccgacggcttctccacctacgtgtgcctggtgctgctggtggccaacattttgcggatactcttctggtttggaaggcgctttgagtccccgctgctgtggcagagcgccatcatgatcctgaccatgctgctgatgctgaagctgtgcaccgaggtccgtgtggccaacgagctcaacgccaggcgccgctcctttacagctgcagatagcaaggatgaagaagtcaaggttgcccccaggcggtccttcctggcatcaagatggtgctcatgtggaccagtggtgacgccttcaagacggcctacttcctgctgaagggtgcccctctgcagttctccgtgtgcggcctgctgcaggtgctggtggacctggccatcctggggcaggcctacgccttcgcccgccacccccagaagccggcgccccacgccgtgcaccccactggcaccaaggccctctgacagtggggaggacgaggatgtgggaccgccagccgcgggcactggtgggccctgacctccccgcggggagggtgggtgccgtggcccctgcaggtgtggcagagatggggcacgggcattggggtctccatcagcctctgtggggtgtctcagggtgggcagtgggggtggggctgggacgctgtttgtgctcagcggggacagccagggttgatctggccccgagggttttggatgtttttaggatgacataaaaagcaagtgttttccccatttcctcttatgaaacaccgtctgagcccaaggtacacattgggcggcctgcaggaacctgctccaggtggacacacgggccagcagccgcgaaccttgaagctggggtgaccgcaggagaccctgtaaggcctgtgagcggagccctcgaccccgtgacaccctggccagacaccctgcttggactggggtggcctctgctacccaggggtctggcacgggggagggctggggctttctctgcctggtacacacggaaaggcggctgtgcggacgcagggtcaccgtgctccgggttttctgacagtcggtgtttcctgggcctttggagtggctgcgaggcctgaacgccttgtggatccgctgtgtccagcccggctgagcatcgccagggctagctcatgctgctcttgtcagcctctggttctcctcgagtccttggggacgtggcagatgccagcgaccatcagacaacgtggaggccctcatgggcaatggctgagggggccgggctgaggctgtgcacatgcagtctgcacgccactcttgggctctgctggcggagatccccttccttctgggtgcagactgcacctccggatgcagttttgatgtccatcttccaggagagagacggtctcgggtccagggagtggagggggctgcccctgccgtgcaggtcctggccgatggcgccttaccctgctgccctgggcttttggcctgaagcaaattcctgagtggggggtactggggcctgccgcatcctgtcctgtccactgcccacccccgtgtgctggctccctcacttctggctgcagtgggagccgccagtctgacccttgtcaccgcacgctctgcccccaccccgttgcaagaggtcacaccatgtcagcagccttgcactgaccgcagccggcccccaggcctcagagttctggatgcttccgtgcggctccaacaggcatcgtcttcccttccgcaggtggaggggccgcttcccgcaggcatctgagctctgtgccggggccgtggccatgggaagatgttccacgctgcctcctcctcgagttttcctcggaaacactcttgaatgtctgagtgagggtcctgcttagctctttggcctgtgagatgctttgaaaatttttatttttttaagatgaagcaagatgtctgtagcggtaattgcctcacattaaactgtcgccgactgcaggcgcagtgactgctgaatgtaccctgtgtggcgacttggaatcaataaaccatttgtggatcctgagttggccttgggcagagggaaggatctggctgtggtcctggcctctgcccagacacacccttgtagcctgggccaccttagaaggcccctgtgtgacctgggttcctccagggccccaaacaacagcccagccccctcgacctgtcactggcctgtgcctgtgggccggcagcccgggggtccttttggctcctcacagacgggtctggcactgcctctagctgccctggccacatccgcccttctgcctcccaccaccgaaggcttagagcatgggaagggtctcctgtaaaggccaagagaagtgtttccagatttgcgatcttggagcagcacatacagatggagctgtgtgtgcatagcgatt

SEQ ID NO: 444867 - DNA, 2690 bp, Homo sapiens
  misc_feature (95)..(95): n is a, c, g, or t
accgtcgtcagagccaccgcgagtgctgctcctggtccccgttcctgacgaggatgcacaggtctcagcggtcccgcacttgaagctggctgacntcgctgcatacttctccttggctgcggaacttggaacgtgtctcagggatcccaggaggtgcaggtgttctacctctgagtttgccctgctccctgggtgagtgccaagcccctgtgagatcacctgggctaacttctgcttttataaaccgcagtgtggctggggacgggatgtcacaggcaccccatctccccatcgggccacaggaggcttggcctctgtccctgccgggagggccgggcagaagacgggcgacccacacagctggcacgttgtgagggcttggatggagtcctgaggctgagggagatggagcagtctctgcggaggaagtaggcagcgaggtcagccagcttcaagtgcgggaccgctgagaccctgtgcatcctcgtcaggaacggggaccaggagcagcagcgtcgggtcggctcggagtgatggagtgtgtggttgtagttacgcatcaagatggtgctcatgtggaccagtggtgacgccttcaagacggcctacttcctgctgaagggtgcccctctgcagttctccgtgtgcggcctgctgcaggtgctggtggacctggccatcctggggcaggcctacgccttcgcccgccacccccagaagccggcgccccacgccgtgcaccccactggcaccaaggccctctgacagtggggaggacgaggatgtgggaccgccagccgcgggcactggtgggccctgacctccccgcggggagggtgggtgccgtggcccctgcaggtgtggcagagatggggcacgggcattggggtctccatcagcctctgtggggtgtctcagggtgggcagtgggggtggggctgggacgctgtttgtgctcagcggggacagccagggttgatctggccccgagggttttggatgtttttaggatgacataaaaagcaagtgttttccccatttcctcttatgaaacaccgtctgagcccaaggtacacattgggcggcctgcaggaacctgctccaggtggacacacgggccagcagccgcgaaccttgaagctggggtgaccgcaggagaccctgtaaggcctgtgagcggagccctcgaccccgtgacaccctggccagacaccctgcttggactggggtggcctctgctacccaggggtctggcacgggggagggctggggctttctctgcctggtacacacggaaaggcggctgtgcggacgcagggtcaccgtgctccgggttttctgacagtcggtgtttcctgggcctttggagtggctgcgaggcctgaacgccttgtggatccgctgtgtccagcccggctgagcatcgccagggctagctcatgctgctcttgtcagcctctggttctcctcgagtccttggggacgtggcagatgccagcgaccatcagacaacgtggaggccctcatgggcaatggctgagggggccgggctgaggctgtgcacatgcagtctgcacgccactcttgggctctgctggcggagatccccttccttctgggtgcagactgcacctccggatgcagttttgatgtccatcttccaggagagagacggtctcgggtccagggagtggagggggctgcccctgccgtgcaggtcctggccgatggcgccttaccctgctgccctgggcttttggcctgaagcaaattcctgagtggggggtactggggcctgccgcatcctgtcctgtccactgcccacccccgtgtgctggctccctcacttctggctgcagtgggagccgccagtctgacccttgtcaccgcacgctctgcccccaccccgttgcaagaggtcacaccatgtcagcagccttgcactgaccgcagccggcccccaggcctcagagttctggatgcttccgtgcggctccaacaggcatcgtcttcccttccgcaggtggaggggccgcttcccgcaggcatctgagctctgtgccggggccgtggccatgggaagatgttccacgctgcctcctcctcgagttttcctcggaaacactcttgaatgtctgagtgagggtcctgcttagctctttggcctgtgagatgctttgaaaatttttatttttttaagatgaagcaagatgtctgtagcggtaattgcctcacattaaactgtcgccgactgcaggcgcagtgactgctgaatgtaccctgtgtggcgacttggaatcaataaaccatttgtggatcctgagttggccttgggcagagggaaggatctggctgtggtcctggcctctgcccagacacacccttgtagcctgggccaccttagaaggcccctgtgtgacctgggttcctccagggccccaaacaacagcccagccccctcgacctgtcactggcctgtgcctgtgggccggcagcccgggggtccttttggctcctcacagacgggtctggcactgcctctagctgccctggccacatccgcccttctgcctcccaccaccgaaggcttagagcatgggaagggtctcctgtaaaggccaagagaagtgtttccagatttgcgatcttggagcagcacatacagatggagctgtgtgtgcatagcgatt

SEQ ID NO: 444868 - DNA, 1241 bp, Homo sapiens
tagggaagggcaaccgacttagtctaggtacgaggctgggtgttaatcggccgaggcagacaacgtggaggccctcatgggcaatggctgagggggccgggctgaggctgtgcacatgcagtctgcacgccactcttgggctctgctggcggagatccccttccttctgggtgcagactgcacctccggatgcagttttgatgtccatcttccaggagagagacggtctcgggtccagggagtggagggggctgcccctgccgtgcaggtcctggccgatggcgccttaccctgctgccctgggcttttggcctgaagcaaattcctgagtggggggtactggggcctgccgcatcctgtcctgtccactgcccacccccgtgtgctggctccctcacttctggctgcagtgggagccgccagtctgacccttgtcaccgcacgctctgcccccaccccgttgcaagaggtcacaccatgtcagcagccttgcactgaccgcagccggcccccaggcctcagagttctggatgcttccgtgcggctccaacaggcatcgtcttcccttccgcaggtggaggggccgcttcccgcaggcatctgagctctgtgccggggccgtggccatgggaagatgttccacgctgcctcctcctcgagttttcctcggaaacactcttgaatgtctgagtgagggtcctgcttagctctttggcctgtgagatgctttgaaaatttttatttttttaagatgaagcaagatgtctgtagcggtaattgcctcacattaaactgtcgccgactgcaggcgcagtgactgctgaatgtaccctgtgtggcgacttggaatcaataaaccatttgtggatcctgagttggccttgggcagagggaaggatctggctgtggtcctggcctctgcccagacacacccttgtagcctgggccaccttagaaggcccctgtgtgacctgggttcctccagggccccaaacaacagcccagccccctcgacctgtcactggcctgtgcctgtgggccggcagcccgggggtccttttggctcctcacagacgggtctggcactgcctctagctgccctggccacatccgcccttctgcctcccaccaccgaaggcttagagcatgggaagggtctcctgtaaaggccaagagaagtgtttccagatttgcgatcttggagcagcacatacagatggagctgtgtgtgcatagcgatt

SEQ ID NO: 444869 - DNA, 2187 bp, Homo sapiens
ttcccggcgcctgagcggactgacgccgagacgcgcgcgggtcagcggcgcggggacgcggggcgctgggcgcggggctgggggcgcaggccccgaggccgcaggagcgcgcggagcggcgatgagcaggcggccggtggcccgcggggcgcggagcccgtgacagcctcggccaggcgggcgctgcgatggaggccgagggcctggactggctcctggtgccactgcaccagctggtgtcctggggcgcggccgcggccatggtcttcggaggggtggtgccctacgtcccgcagtatcgggacattcgcaggacgcagaacgccgacggcttctccacctacgtgtgcctggtgctgctggtggccaacattttgcggatactcttctggtttggaaggcgctttgagtccccgctgctgtggcagagcgccatcatgatcctgaccatgctgctgatgctgaagctgtgcaccgaggtccgtgtggccaacgagctcaacgccaggcgccgctcctttacagctgcagatagcaaggatgaagaagtcaaggttgcccccaggcggtccttcctggacttcgacccccaccacttctggcagtggagcagcttctcggactacgtgcagtgcgtcctggccttcacgggcgtggcgggctacatcacctacctgtccattgactccgccctgtttgtggagaccctgggcttcctggctgtgctgaccgaagccatgctgggtgtgccccagctttaccgcaaccaccgccaccagtccacggagggcatgagcatcaagatggtgctcatgtggaccagtggtgacgccttcaagacggcctacttcctgctgaagggtgcccctctgcagttctccgtgtgcggcctgctgcaggtgctggtggacctggccatcctggggcaggcctacgccttcgcccgccacccccagaagccggcgccccacgccgtgcaccccactggcaccaaggccctctgacagtggggaggacgaggatgtgggaccgccagccgcgggcactggtgggccctgacctccccgcggggagggtgggtgccgtggcccctgcaggtgtggcagagatggggcacgggcattggggtctccatcagcctctgtggggtgtctcagggtgggcagtgggggtggggctgggacgctgtttgtgctcagcggggacagccagggttgatctggccccgagggttttggatgtttttaggatgacataaaaagcaagtgttttccccatttcctcttatgaaacaccgtctgagcccaaggtacacattgggcggcctgcaggaacctgctccaggtggacacacgggccagcagccgcgaaccttgaagctggggtgaccgcaggagaccctgtaaggcctgtgagcggagccctcgaccccgtgacaccctggccagacaccctgcttggactggggtggcctctgctacccaggggtctggcacgggggagggctggggctttctctgcctggtacacacggaaaggcggctgtgcggacgcagggtcaccgtgctccgggttttctgacagtcggtgtttcctgggcctttggagtggctgcgaggcctgaacgccttgtggatccgctgtgtccagcccggctgagcatcgccagggctagctcatgctgctcttgtcagcctctggttctcctcgagtccttggggacgtggcagatgccagcgaccatcagacaacgtggaggccctcatgggcaatggctgagggggccgggctgaggctgtgcacatgcagtctgcacgccactcttgggctctgctggcggagatccccttccttctgggtgcagactgcacctccggatgcagttttgatgtccatcttggggccgcttcccgcaggcatctgagctctgtgccggggccgtggccatgggaagatgttccacgctgcctcctcctcgagttttcctcggaaacactcttgaatgtctgagtgagggtcctgcttagctctttggcctgtgagatgctttgaaaatttttatttttttaagatgaagcaagatgtctgtagcggtaattgcctcacattaaactgtcgccgactgcaggcgcagtgactgctgaatgtaccctgtgtggcgacttggaatcaataaaccatttgtgg

SEQ ID NO: 444870 - DNA, 1277 bp, Homo sapiens
ttcccggcgcctgagcggactgacgccgagacgcgcgcgggtcagcggcgcggggacgcggggcgctgggcgcggggctgggggcgcaggccccgaggccgcaggagcgcgcggagcggcgatgagcaggcggccggtggcccgcggggcgcggagcccgtgacagcctcggccaggcgggcgctgcgatggaggccgagggcctggactggctcctggtgccactgcaccagctggtgtcctggggcgcggccgcggccatggtcttcggaggggtggtgccctacgtcccgcagtatcgggacattcgcaggacgcagaacgccgacggcttctccacctacgtgtgcctggtgctgctggtggccaacattttgcggatactcttctggtttggaaggcgctttgagtccccgctgctgtggcagagcgccatcatgatcctgaccatgctgctgatgctgaagctgtgcaccgaggtccgtgtggccaacgagctcaacgccaggcgccgctcctttacagctgcagatagcaaggatgaagaagtcaaggttgcccccaggcggtccttcctggacttcgacccccaccacttctggcagtggagcagcttctcggactacgtgcagtgcgtcctggccttcacgggcgtggcgggctacatcacctacctgtccattgactccgccctgtttgtggagaccctgggcttcctggctgtgctgaccgaagccatgctgggtgtgccccagctttaccgcaaccaccgccaccagtccacggagggcatgagcatcaagatggtgctcatgtggaccagtggtgacgccttcaagacggcctacttcctgctgaagggtgcccctctgcagttctccgtgtgcggcctgctgcaggtgctggtggacctggccatcctggggcaggcctacgccttcgcccgccacccccagaagccggcgccccacgccgtgcaccccactggcaccaaggccctctgacagtggggaggacgaggatgtgggaccgccagccgcgggcactggtgggccctgacctccccgcggggagggtgggtgccgtggcccctgcaggtgtggcagagatggggcacgggcattggggtctccatcagcctctgtggggtgtctcagggtgggcagtgggggtggggctgggacgctgtttgtgctcagcggggacagccagggttgatctggccccgagggttttggatgtttttaggatgacataaaaagcaagtgttttcccca

SEQ ID NO: 444871 - DNA, 769 bp, Homo sapiens
ttcccggcgcctgagcggactgacgccgagacgcgcgcgggtcagcggcgcggggacgcggggcgctgggcgcggggctgggggcgcaggccccgaggccgcaggagcgcgcggagcggcgatgagcaggcggccggtggcccgcggggcgcggagcccgtgacagcctcggccaggcgggcgctgcgatggaggccgagggcctggactggctcctggtgccactgcaccagctggtgtcctggggcgcggccgcggccatggtcttcggaggggtggtgccctacgtcccgcagtatcgggacattcgcaggacgcagaacgccgacggcttctccacctacgtgtgcctggtgctgctggtggccaacattttgcggatactcttctggtttggaaggcgctttgagtccccgctgctgtggcagagcgccatcatgatcctgaccatgctgagttctccgtgtgcggcctgctgcagggggccgcttcccgcaggcatctgagctctgtgccggggccgtggccatgggaagatgttccacgctgcctcctcctcgagttttcctcggaaacactcttgaatgtctgagtgagggtcctgcttagctctttggcctgtgagatgctttgaaaatttttatttttttaagatgaagcaagatgtctgtagcggtaattgcctcacattaaactgtcgccgactgcaggcgcagtgactgctgaatgtaccctgtgtggcgacttggaatcaataaaccatttgtgg

SEQ ID NO: 444872 - DNA, 2603 bp, Homo sapiens
gaccgagctacttccgggagagaatgggagggtggaaaattttgtgcgtttggcgggtttcgctctcttcataagtattgatcattccgcagccctgcggggaccggacacgtgaggaggtagtgacgccgacactgccagaacacactgctacaaggtcccagatggccacgtctctggattttaaaacttatgtagatcaggcatgtagagctgctgaggagtttgtcaatatttactatgagacaatggataaaagaagacgggcactaaccaggctgtatctggacaaggccaccttaatatggaatggaaatgctgtttcagggctggatgccctaaataatttttttgacacattgccttctagtgagttccaggtcaatatgttagattgccaaccagttcatgagcaagcaactcagtcccaaactacagttcttgttgtgaccagtggaactgtgaagtttgatggaaacaaacaacatttcttcaaccagaacttcctgctgactgctcagtccactcccaacaatactgtgtggaagattgcaagtgattgcttccgttttcaagattggtctagtagttaaaggggcaaaagtccattctcatttggtccattagttccagcaattgaaatttatgtgaattattttgattgtagaagcactataatatgtgctgaaactaaatttctttaatattttctattcctgtcagcaccttttctagcagctgccagtttggagcattgccctctaagagctttaaaactatttttttacatgccttatatacattccactaatgacattcttataataatattaaacacatgatcttggtactaacatactcactgtgaacccagcctattgcaaaaataaaatctttttataatattatctatgggatgtcagcacaatataacactctgggaagaagtggagttttttggttattaggttaattttctagtaaaacacgttgcctgttttcagttaacactggtaatgccattttaatatatggctttttcaaatcagttcagtgaaaatagtacagatttaggtttacataactactctgacatactggaattgcatatagagatgttcagtggtcgtttttcattttaagtaatttttgttttggcatttttttgtgtgaagtaaattaatcaactagagaggtgcaaaacgttctcagttgatatctgagtattgggtgcatttggtggcttaaaagcaaagcttcctaaaaagatttttcttggcagctccaggtctatacatttaggtaatgaatggtagtagaactaatagctttaacaggagaatagggaatgagaaatagaaatccaaggctgaagccaaaagtaaggagggtggccaaatggtaaactattggtacttgttttctacctcctaaaaatgtagcttatttttaggatttaaatcactaagtaaataagtatccttgccaagtgatcatgagtgtcatttttgttctaagactaatatttttagatctttttacttcacctcatacttatcaccaatgtatatctccatttattcaataacttactggggtaaaataacagcaataaacctaaccttttaacagggtctaacatgagagttggagtcaaagccattgttatcttttggtgacacccttaaattttaagtcttccagtcttccatgtgaactttaggcccaaagtttcttatgtatcacacatcccccaaataagtgattttttcccagtgctttgtactgtcaactgcattatctttaattatttaaaggtagaattatttaattttgtgatttgttcttccatatgacattgagcaaatagatctgtttcaaaatatgttcccgctatgtggataactcttctttttaaaaagaaaatagagaatagcaaatcttcatgataatcctcaaaagaacaaaatgcttaactttatctcttaatttctaaaggtaaataacctaggttcagcttttgcttaaacattaaatatcttttccattttttaatgtttgtaagctagatatgccagctttgtttctacattgcaaccaaaaactgtttcttttcacttaattataaaaccagtaattcatttactcttgcccaaaactatacactgtatttctgttatagtaacaaaatagagttatgtagaattgtatggaactcaaatttaaaccatgctttcttgtagtactgattgaaacttacacgttttattctactcatagtgagcttattcttattttggattgattttccaaaaccacagcttcagcagcaacaatcagaatgtccaaatgctgtcctttcccttacagagaagaacaatggtaactaaaagctgcatataactagcaataactacattgaacggtgtgcattgttcatgattgttgtgttttaagacttgtatataaactgctttttccaaactctgtataacttttaaatggctggaactactcgtataaggactagactgtatttttgacatgctcctatttttgtaacttgaaaaaataaaattttgccttgtgacagattttctcaa

SEQ ID NO: 444873 - DNA, 2708 bp, Homo sapiens
agtgagccagtcagaggttaacggaaaacggaagctggctggctgagaagaagcttccgttagtcctaccttgaagagaaaagagccagataaagagaaagattaaaagtatgagaaaatacagaagccactggtctcagggagacagagaaggataccaaagaagaagtaactattatgaggggccacacaccagccactcaagggaccggacacgtgaggaggtagtgacgccgacactgccagaacacactgctacaaggtcccagatggccacgtctctggattttaaaacttatgtagatcaggcatgtagagctgctgaggagtttgtcaatatttactatgagacaatggataaaagaagacgggcactaaccaggctgtatctggacaaggccaccttaatatggaatggaaatgctgtttcagggctggatgccctaaataatttttttgacacattgccttctagtgagttccaggtcaatatgttagattgccaaccagttcatgagcaagcaactcagtcccaaactacagttcttgttgtgaccagtggaactgtgaagtttgatggaaacaaacaacatttcttcaaccagaacttcctgctgactgctcagtccactcccaacaatactgtgtggaagattgcaagtgattgcttccgttttcaagattggtctagtagttaaaggggcaaaagtccattctcatttggtccattagttccagcaattgaaatttatgtgaattattttgattgtagaagcactataatatgtgctgaaactaaatttctttaatattttctattcctgtcagcaccttttctagcagctgccagtttggagcattgccctctaagagctttaaaactatttttttacatgccttatatacattccactaatgacattcttataataatattaaacacatgatcttggtactaacatactcactgtgaacccagcctattgcaaaaataaaatctttttataatattatctatgggatgtcagcacaatataacactctgggaagaagtggagttttttggttattaggttaattttctagtaaaacacgttgcctgttttcagttaacactggtaatgccattttaatatatggctttttcaaatcagttcagtgaaaatagtacagatttaggtttacataactactctgacatactggaattgcatatagagatgttcagtggtcgtttttcattttaagtaatttttgttttggcatttttttgtgtgaagtaaattaatcaactagagaggtgcaaaacgttctcagttgatatctgagtattgggtgcatttggtggcttaaaagcaaagcttcctaaaaagatttttcttggcagctccaggtctatacatttaggtaatgaatggtagtagaactaatagctttaacaggagaatagggaatgagaaatagaaatccaaggctgaagccaaaagtaaggagggtggccaaatggtaaactattggtacttgttttctacctcctaaaaatgtagcttatttttaggatttaaatcactaagtaaataagtatccttgccaagtgatcatgagtgtcatttttgttctaagactaatatttttagatctttttacttcacctcatacttatcaccaatgtatatctccatttattcaataacttactggggtaaaataacagcaataaacctaaccttttaacagggtctaacatgagagttggagtcaaagccattgttatcttttggtgacacccttaaattttaagtcttccagtcttccatgtgaactttaggcccaaagtttcttatgtatcacacatcccccaaataagtgattttttcccagtgctttgtactgtcaactgcattatctttaattatttaaaggtagaattatttaattttgtgatttgttcttccatatgacattgagcaaatagatctgtttcaaaatatgttcccgctatgtggataactcttctttttaaaaagaaaatagagaatagcaaatcttcatgataatcctcaaaagaacaaaatgcttaactttatctcttaatttctaaaggtaaataacctaggttcagcttttgcttaaacattaaatatcttttccattttttaatgtttgtaagctagatatgccagctttgtttctacattgcaaccaaaaactgtttcttttcacttaattataaaaccagtaattcatttactcttgcccaaaactatacactgtatttctgttatagtaacaaaatagagttatgtagaattgtatggaactcaaatttaaaccatgctttcttgtagtactgattgaaacttacacgttttattctactcatagtgagcttattcttattttggattgattttccaaaaccacagcttcagcagcaacaatcagaatgtccaaatgctgtcctttcccttacagagaagaacaatggtaactaaaagctgcatataactagcaataactacattgaacggtgtgcattgttcatgattgttgtgttttaagacttgtatataaactgctttttccaaactctgtataacttttaaatggctggaactactcgtataaggactagactgtatttttgacatgctcctatttttgtaacttgaaaaaataaaattttgccttgtgacagattttctcaa

SEQ ID NO: 444874 - DNA, 2597 bp, Homo sapiens
gaccgagctacttccgggagagaatgggagggtggaaaattttgtgcgtttggcgggtttcgctctcttcataagtattgatcattccgcagccctgcggcctggttagcagtcgctttctgatcccggaaaggaccctgagctgggaaatagcgagaggcggggatgttggggattttaaaacttatgtagatcaggcatgtagagctgctgaggagtttgtcaatatttactatgagacaatggataaaagaagacgggcactaaccaggctgtatctggacaaggccaccttaatatggaatggaaatgctgtttcagggctggatgccctaaataatttttttgacacattgccttctagtgagttccaggtcaatatgttagattgccaaccagttcatgagcaagcaactcagtcccaaactacagttcttgttgtgaccagtggaactgtgaagtttgatggaaacaaacaacatttcttcaaccagaacttcctgctgactgctcagtccactcccaacaatactgtgtggaagattgcaagtgattgcttccgttttcaagattggtctagtagttaaaggggcaaaagtccattctcatttggtccattagttccagcaattgaaatttatgtgaattattttgattgtagaagcactataatatgtgctgaaactaaatttctttaatattttctattcctgtcagcaccttttctagcagctgccagtttggagcattgccctctaagagctttaaaactatttttttacatgccttatatacattccactaatgacattcttataataatattaaacacatgatcttggtactaacatactcactgtgaacccagcctattgcaaaaataaaatctttttataatattatctatgggatgtcagcacaatataacactctgggaagaagtggagttttttggttattaggttaattttctagtaaaacacgttgcctgttttcagttaacactggtaatgccattttaatatatggctttttcaaatcagttcagtgaaaatagtacagatttaggtttacataactactctgacatactggaattgcatatagagatgttcagtggtcgtttttcattttaagtaatttttgttttggcatttttttgtgtgaagtaaattaatcaactagagaggtgcaaaacgttctcagttgatatctgagtattgggtgcatttggtggcttaaaagcaaagcttcctaaaaagatttttcttggcagctccaggtctatacatttaggtaatgaatggtagtagaactaatagctttaacaggagaatagggaatgagaaatagaaatccaaggctgaagccaaaagtaaggagggtggccaaatggtaaactattggtacttgttttctacctcctaaaaatgtagcttatttttaggatttaaatcactaagtaaataagtatccttgccaagtgatcatgagtgtcatttttgttctaagactaatatttttagatctttttacttcacctcatacttatcaccaatgtatatctccatttattcaataacttactggggtaaaataacagcaataaacctaaccttttaacagggtctaacatgagagttggagtcaaagccattgttatcttttggtgacacccttaaattttaagtcttccagtcttccatgtgaactttaggcccaaagtttcttatgtatcacacatcccccaaataagtgattttttcccagtgctttgtactgtcaactgcattatctttaattatttaaaggtagaattatttaattttgtgatttgttcttccatatgacattgagcaaatagatctgtttcaaaatatgttcccgctatgtggataactcttctttttaaaaagaaaatagagaatagcaaatcttcatgataatcctcaaaagaacaaaatgcttaactttatctcttaatttctaaaggtaaataacctaggttcagcttttgcttaaacattaaatatcttttccattttttaatgtttgtaagctagatatgccagctttgtttctacattgcaaccaaaaactgtttcttttcacttaattataaaaccagtaattcatttactcttgcccaaaactatacactgtatttctgttatagtaacaaaatagagttatgtagaattgtatggaactcaaatttaaaccatgctttcttgtagtactgattgaaacttacacgttttattctactcatagtgagcttattcttattttggattgattttccaaaaccacagcttcagcagcaacaatcagaatgtccaaatgctgtcctttcccttacagagaagaacaatggtaactaaaagctgcatataactagcaataactacattgaacggtgtgcattgttcatgattgttgtgttttaagacttgtatataaactgctttttccaaactctgtataacttttaaatggctggaactactcgtataaggactagactgtatttttgacatgctcctatttttgtaacttgaaaaaataaaattttgccttgtgacagattttctcaa

SEQ ID NO: 444875 - DNA, 2656 bp, Homo sapiens
ccccaggcttgtcgttagaaaagtaggggactttcctgttgagtatcatgtttacaaaagcaaagtggcttttaaattttaaactaagtatcaaacaagtagataaggtggatgggagggatcttcaggaactgaagggaagtggaacttaagggaccggacacgtgaggaggtagtgacgccgacactgccagaacacactgctacaaggtcccagatggccacgtctctggattttaaaacttatgtagatcaggcatgtagagctgctgaggagtttgtcaatatttactatgagacaatggataaaagaagacgggcactaaccaggctgtatctggacaaggccaccttaatatggaatggaaatgctgtttcagggctggatgccctaaataatttttttgacacattgccttctagtgagttccaggtcaatatgttagattgccaaccagttcatgagcaagcaactcagtcccaaactacagttcttgttgtgaccagtggaactgtgaagtttgatggaaacaaacaacatttcttcaaccagaacttcctgctgactgctcagtccactcccaacaatactgtgtggaagattgcaagtgattgcttccgttttcaagattggtctagtagttaaaggggcaaaagtccattctcatttggtccattagttccagcaattgaaatttatgtgaattattttgattgtagaagcactataatatgtgctgaaactaaatttctttaatattttctattcctgtcagcaccttttctagcagctgccagtttggagcattgccctctaagagctttaaaactatttttttacatgccttatatacattccactaatgacattcttataataatattaaacacatgatcttggtactaacatactcactgtgaacccagcctattgcaaaaataaaatctttttataatattatctatgggatgtcagcacaatataacactctgggaagaagtggagttttttggttattaggttaattttctagtaaaacacgttgcctgttttcagttaacactggtaatgccattttaatatatggctttttcaaatcagttcagtgaaaatagtacagatttaggtttacataactactctgacatactggaattgcatatagagatgttcagtggtcgtttttcattttaagtaatttttgttttggcatttttttgtgtgaagtaaattaatcaactagagaggtgcaaaacgttctcagttgatatctgagtattgggtgcatttggtggcttaaaagcaaagcttcctaaaaagatttttcttggcagctccaggtctatacatttaggtaatgaatggtagtagaactaatagctttaacaggagaatagggaatgagaaatagaaatccaaggctgaagccaaaagtaaggagggtggccaaatggtaaactattggtacttgttttctacctcctaaaaatgtagcttatttttaggatttaaatcactaagtaaataagtatccttgccaagtgatcatgagtgtcatttttgttctaagactaatatttttagatctttttacttcacctcatacttatcaccaatgtatatctccatttattcaataacttactggggtaaaataacagcaataaacctaaccttttaacagggtctaacatgagagttggagtcaaagccattgttatcttttggtgacacccttaaattttaagtcttccagtcttccatgtgaactttaggcccaaagtttcttatgtatcacacatcccccaaataagtgattttttcccagtgctttgtactgtcaactgcattatctttaattatttaaaggtagaattatttaattttgtgatttgttcttccatatgacattgagcaaatagatctgtttcaaaatatgttcccgctatgtggataactcttctttttaaaaagaaaatagagaatagcaaatcttcatgataatcctcaaaagaacaaaatgcttaactttatctcttaatttctaaaggtaaataacctaggttcagcttttgcttaaacattaaatatcttttccattttttaatgtttgtaagctagatatgccagctttgtttctacattgcaaccaaaaactgtttcttttcacttaattataaaaccagtaattcatttactcttgcccaaaactatacactgtatttctgttatagtaacaaaatagagttatgtagaattgtatggaactcaaatttaaaccatgctttcttgtagtactgattgaaacttacacgttttattctactcatagtgagcttattcttattttggattgattttccaaaaccacagcttcagcagcaacaatcagaatgtccaaatgctgtcctttcccttacagagaagaacaatggtaactaaaagctgcatataactagcaataactacattgaacggtgtgcattgttcatgattgttgtgttttaagacttgtatataaactgctttttccaaactctgtataacttttaaatggctggaactactcgtataaggactagactgtatttttgacatgctcctatttttgtaacttgaaaaaataaaattttgccttgtgacagattttctcaa

SEQ ID NO: 444876 - DNA, 2549 bp, Homo sapiens
gaccgagctacttccgggagagaatgggagggtggaaaattttgtgcgtttggcgggtttcgctctcttcataagtattgatcattccgcagccctgcggggaccggacacgtgaggaggtagtgacgccgacactgccagaacacactgctacaaggtcccagatggccacgtctctggattttaaaacttatgtagatcaggcatgtagagctgctgaggagtttgtcaatatttactatgagacaatggataaaagaagacgggcactaaccaggctgtatctggacaaggccaccttaatatggaatggaaatgctgtttcagggctggatgccctaaataatttttttgacacattgccttctagtgagttccaggtcaatatgttagattgccaaccagttcatgagcaagcaactcagtcccaaactacagttcttgttgtgaccagtggaactgtgaagtttgatggaaacaaacaacatttcttcaaccagaacttcctgctgactgctcagtccactcccaacaatactgtgtggaagattgcaagtgattgcttccgttttcaagattggtctagtagttaaaggggctattttgattgtagaagcactataatatgtgctgaaactaaatttctttaatattttctattcctgtcagcaccttttctagcagctgccagtttggagcattgccctctaagagctttaaaactatttttttacatgccttatatacattccactaatgacattcttataataatattaaacacatgatcttggtactaacatactcactgtgaacccagcctattgcaaaaataaaatctttttataatattatctatgggatgtcagcacaatataacactctgggaagaagtggagttttttggttattaggttaattttctagtaaaacacgttgcctgttttcagttaacactggtaatgccattttaatatatggctttttcaaatcagttcagtgaaaatagtacagatttaggtttacataactactctgacatactggaattgcatatagagatgttcagtggtcgtttttcattttaagtaatttttgttttggcatttttttgtgtgaagtaaattaatcaactagagaggtgcaaaacgttctcagttgatatctgagtattgggtgcatttggtggcttaaaagcaaagcttcctaaaaagatttttcttggcagctccaggtctatacatttaggtaatgaatggtagtagaactaatagctttaacaggagaatagggaatgagaaatagaaatccaaggctgaagccaaaagtaaggagggtggccaaatggtaaactattggtacttgttttctacctcctaaaaatgtagcttatttttaggatttaaatcactaagtaaataagtatccttgccaagtgatcatgagtgtcatttttgttctaagactaatatttttagatctttttacttcacctcatacttatcaccaatgtatatctccatttattcaataacttactggggtaaaataacagcaataaacctaaccttttaacagggtctaacatgagagttggagtcaaagccattgttatcttttggtgacacccttaaattttaagtcttccagtcttccatgtgaactttaggcccaaagtttcttatgtatcacacatcccccaaataagtgattttttcccagtgctttgtactgtcaactgcattatctttaattatttaaaggtagaattatttaattttgtgatttgttcttccatatgacattgagcaaatagatctgtttcaaaatatgttcccgctatgtggataactcttctttttaaaaagaaaatagagaatagcaaatcttcatgataatcctcaaaagaacaaaatgcttaactttatctcttaatttctaaaggtaaataacctaggttcagcttttgcttaaacattaaatatcttttccattttttaatgtttgtaagctagatatgccagctttgtttctacattgcaaccaaaaactgtttcttttcacttaattataaaaccagtaattcatttactcttgcccaaaactatacactgtatttctgttatagtaacaaaatagagttatgtagaattgtatggaactcaaatttaaaccatgctttcttgtagtactgattgaaacttacacgttttattctactcatagtgagcttattcttattttggattgattttccaaaaccacagcttcagcagcaacaatcagaatgtccaaatgctgtcctttcccttacagagaagaacaatggtaactaaaagctgcatataactagcaataactacattgaacggtgtgcattgttcatgattgttgtgttttaagacttgtatataaactgctttttccaaactctgtataacttttaaatggctggaactactcgtataaggactagactgtatttttgacatgctcctatttttgtaacttgaaaaaataaaattttgccttgtgacagattttctcaa

SEQ ID NO: 444877 - DNA, 2561 bp, Homo sapiens
gaccgagctacttccgggagagaatgggagggtggaaaattttgtgcgtttggcgggtttcgctctcttcataagtattgatcattccgcagccctgcggggaccggacacgtgaggaggtagtgacgccgacactgccagaacacactgctacaaggtcccagatggccacgtctctggattttaaaacttatgtagatcaggcatgtagagctgctgaggagtttgtcaatatttactatgagacaatggataaaagaagacggaatggaaatgctgtttcagggctggatgccctaaataatttttttgacacattgccttctagtgagttccaggtcaatatgttagattgccaaccagttcatgagcaagcaactcagtcccaaactacagttcttgttgtgaccagtggaactgtgaagtttgatggaaacaaacaacatttcttcaaccagaacttcctgctgactgctcagtccactcccaacaatactgtgtggaagattgcaagtgattgcttccgttttcaagattggtctagtagttaaaggggcaaaagtccattctcatttggtccattagttccagcaattgaaatttatgtgaattattttgattgtagaagcactataatatgtgctgaaactaaatttctttaatattttctattcctgtcagcaccttttctagcagctgccagtttggagcattgccctctaagagctttaaaactatttttttacatgccttatatacattccactaatgacattcttataataatattaaacacatgatcttggtactaacatactcactgtgaacccagcctattgcaaaaataaaatctttttataatattatctatgggatgtcagcacaatataacactctgggaagaagtggagttttttggttattaggttaattttctagtaaaacacgttgcctgttttcagttaacactggtaatgccattttaatatatggctttttcaaatcagttcagtgaaaatagtacagatttaggtttacataactactctgacatactggaattgcatatagagatgttcagtggtcgtttttcattttaagtaatttttgttttggcatttttttgtgtgaagtaaattaatcaactagagaggtgcaaaacgttctcagttgatatctgagtattgggtgcatttggtggcttaaaagcaaagcttcctaaaaagatttttcttggcagctccaggtctatacatttaggtaatgaatggtagtagaactaatagctttaacaggagaatagggaatgagaaatagaaatccaaggctgaagccaaaagtaaggagggtggccaaatggtaaactattggtacttgttttctacctcctaaaaatgtagcttatttttaggatttaaatcactaagtaaataagtatccttgccaagtgatcatgagtgtcatttttgttctaagactaatatttttagatctttttacttcacctcatacttatcaccaatgtatatctccatttattcaataacttactggggtaaaataacagcaataaacctaaccttttaacagggtctaacatgagagttggagtcaaagccattgttatcttttggtgacacccttaaattttaagtcttccagtcttccatgtgaactttaggcccaaagtttcttatgtatcacacatcccccaaataagtgattttttcccagtgctttgtactgtcaactgcattatctttaattatttaaaggtagaattatttaattttgtgatttgttcttccatatgacattgagcaaatagatctgtttcaaaatatgttcccgctatgtggataactcttctttttaaaaagaaaatagagaatagcaaatcttcatgataatcctcaaaagaacaaaatgcttaactttatctcttaatttctaaaggtaaataacctaggttcagcttttgcttaaacattaaatatcttttccattttttaatgtttgtaagctagatatgccagctttgtttctacattgcaaccaaaaactgtttcttttcacttaattataaaaccagtaattcatttactcttgcccaaaactatacactgtatttctgttatagtaacaaaatagagttatgtagaattgtatggaactcaaatttaaaccatgctttcttgtagtactgattgaaacttacacgttttattctactcatagtgagcttattcttattttggattgattttccaaaaccacagcttcagcagcaacaatcagaatgtccaaatgctgtcctttcccttacagagaagaacaatggtaactaaaagctgcatataactagcaataactacattgaacggtgtgcattgttcatgattgttgtgttttaagacttgtatataaactgctttttccaaactctgtataacttttaaatggctggaactactcgtataaggactagactgtatttttgacatgctcctatttttgtaacttgaaaaaataaaattttgccttgtgacagattttctcaa

SEQ ID NO: 444878 - DNA, 821 bp, Homo sapiens
agtgagccagtcagaggttaacggaaaacggaagctggctggctgagaagaagcttccgttagtcctaccttgaagagaaaagagcagcccagcatcaacagcagcaaagcattcaccacagtcatgcagcaacacatcaccagcaagcccactggtcatccagggcagcaccagcagcaaggcatcaccaaaagcaagcacagtaactcattcatgcagagggccaaaacaccagcccactccaagcccctgcgagaccggacacaccgtgacggacggtacgtgaccgccgaccacgtgccagacacaacaactgcatacacaggtcccaagatggcacacgtcatctgagcttttaaaaacttactgtcagatcacggcatgatagacgctgactgacggacgtaagtacaaatattatcactcatgacgacaacgtggcatacacacgacagcaccgggcgactaaaaccatggcatgctatctaggcacacaggcacacacattaactactaggacatgagcaaacatgctggctatcacggggcatggactgccccctacactcacgttatagtatgagaacgacaattggcactatcatagatgaagataccaacggatacaaaatacatgtccacgactcggcaccaaacacaagtaaccaatcggctgacaacacgccaacaatccaggtcacccaaaaactaaaccacgaataccaaggataagctgaccccagacgagacgacataggtgacacgacacagacaagcagcacacaaacaaaaaacaactcacatgcaaaacacaagcaac

SEQ ID NO: 444879 - DNA, 2523 bp, Homo sapiens
cgacgctatatgagtggcatggaccggacacgtgaggaggtagtgacgccgacactgccagaacacactgctacaaggtcccagatggccacgtctctggattttaaaacttatgtagatcaggcatgtagagctgctgaggagtttgtcaatatttactatgagacaatggataaaagaagacgggcactaaccaggctgtatctggacaaggccaccttaatatggaatggaaatgctgtttcagggctggatgccctaaataatttttttgacacattgccttctagtgagttccaggtcaatatgttagattgccaaccagttcatgagcaagcaactcagtcccaaactacagttcttgttgtgaccagtggaactgtgaagtttgatggaaacaaacaacatttcttcaaccagaacttcctgctgactgctcagtccactcccaacaatactgtgtggaagattgcaagtgattgcttccgttttcaagattggtctagtagttaaaggggcaaaagtccattctcatttggtccattagttccagcaattgaaatttatgtgaattattttgattgtagaagcactataatatgtgctgaaactaaatttctttaatattttctattcctgtcagcaccttttctagcagctgccagtttggagcattgccctctaagagctttaaaactatttttttacatgccttatatacattccactaatgacattcttataataatattaaacacatgatcttggtactaacatactcactgtgaacccagcctattgcaaaaataaaatctttttataatattatctatgggatgtcagcacaatataacactctgggaagaagtggagttttttggttattaggttaattttctagtaaaacacgttgcctgttttcagttaacactggtaatgccattttaatatatggctttttcaaatcagttcagtgaaaatagtacagatttaggtttacataactactctgacatactggaattgcatatagagatgttcagtggtcgtttttcattttaagtaatttttgttttggcatttttttgtgtgaagtaaattaatcaactagagaggtgcaaaacgttctcagttgatatctgagtattgggtgcatttggtggcttaaaagcaaagcttcctaaaaagatttttcttggcagctccaggtctatacatttaggtaatgaatggtagtagaactaatagctttaacaggagaatagggaatgagaaatagaaatccaaggctgaagccaaaagtaaggagggtggccaaatggtaaactattggtacttgttttctacctcctaaaaatgtagcttatttttaggatttaaatcactaagtaaataagtatccttgccaagtgatcatgagtgtcatttttgttctaagactaatatttttagatctttttacttcacctcatacttatcaccaatgtatatctccatttattcaataacttactggggtaaaataacagcaataaacctaaccttttaacagggtctaacatgagagttggagtcaaagccattgttatcttttggtgacacccttaaattttaagtcttccagtcttccatgtgaactttaggcccaaagtttcttatgtatcacacatcccccaaataagtgattttttcccagtgctttgtactgtcaactgcattatctttaattatttaaaggtagaattatttaattttgtgatttgttcttccatatgacattgagcaaatagatctgtttcaaaatatgttcccgctatgtggataactcttctttttaaaaagaaaatagagaatagcaaatcttcatgataatcctcaaaagaacaaaatgcttaactttatctcttaatttctaaaggtaaataacctaggttcagcttttgcttaaacattaaatatcttttccattttttaatgtttgtaagctagatatgccagctttgtttctacattgcaaccaaaaactgtttcttttcacttaattataaaaccagtaattcatttactcttgcccaaaactatacactgtatttctgttatagtaacaaaatagagttatgtagaattgtatggaactcaaatttaaaccatgctttcttgtagtactgattgaaacttacacgttttattctactcatagtgagcttattcttattttggattgattttccaaaaccacagcttcagcagcaacaatcagaatgtccaaatgctgtcctttcccttacagagaagaacaatggtaactaaaagctgcatataactagcaataactacattgaacggtgtgcattgttcatgattgttgtgttttaagacttgtatataaactgctttttccaaactctgtataacttttaaatggctggaactactcgtataaggactagactgtatttttgacatgctcctatttttgtaacttgaaaaaataaaattttgccttgtgacagattttctcaa

SEQ ID NO: 444880 - DNA, 2577 bp, Homo sapiens
gtgacgaatcacgtcccggctctctgcactgcggggcggggcccacgctttgctgcccgccctgccggccccacccccagcctggttagcagtcgctttctgatcccggaaaggaccctgagctgggaaatagcgagaggcggggatgttggggattttaaaacttatgtagatcaggcatgtagagctgctgaggagtttgtcaatatttactatgagacaatggataaaagaagacgggcactaaccaggctgtatctggacaaggccaccttaatatggaatggaaatgctgtttcagggctggatgccctaaataatttttttgacacattgccttctagtgagttccaggtcaatatgttagattgccaaccagttcatgagcaagcaactcagtcccaaactacagttcttgttgtgaccagtggaactgtgaagtttgatggaaacaaacaacatttcttcaaccagaacttcctgctgactgctcagtccactcccaacaatactgtgtggaagattgcaagtgattgcttccgttttcaagattggtctagtagttaaaggggcaaaagtccattctcatttggtccattagttccagcaattgaaatttatgtgaattattttgattgtagaagcactataatatgtgctgaaactaaatttctttaatattttctattcctgtcagcaccttttctagcagctgccagtttggagcattgccctctaagagctttaaaactatttttttacatgccttatatacattccactaatgacattcttataataatattaaacacatgatcttggtactaacatactcactgtgaacccagcctattgcaaaaataaaatctttttataatattatctatgggatgtcagcacaatataacactctgggaagaagtggagttttttggttattaggttaattttctagtaaaacacgttgcctgttttcagttaacactggtaatgccattttaatatatggctttttcaaatcagttcagtgaaaatagtacagatttaggtttacataactactctgacatactggaattgcatatagagatgttcagtggtcgtttttcattttaagtaatttttgttttggcatttttttgtgtgaagtaaattaatcaactagagaggtgcaaaacgttctcagttgatatctgagtattgggtgcatttggtggcttaaaagcaaagcttcctaaaaagatttttcttggcagctccaggtctatacatttaggtaatgaatggtagtagaactaatagctttaacaggagaatagggaatgagaaatagaaatccaaggctgaagccaaaagtaaggagggtggccaaatggtaaactattggtacttgttttctacctcctaaaaatgtagcttatttttaggatttaaatcactaagtaaataagtatccttgccaagtgatcatgagtgtcatttttgttctaagactaatatttttagatctttttacttcacctcatacttatcaccaatgtatatctccatttattcaataacttactggggtaaaataacagcaataaacctaaccttttaacagggtctaacatgagagttggagtcaaagccattgttatcttttggtgacacccttaaattttaagtcttccagtcttccatgtgaactttaggcccaaagtttcttatgtatcacacatcccccaaataagtgattttttcccagtgctttgtactgtcaactgcattatctttaattatttaaaggtagaattatttaattttgtgatttgttcttccatatgacattgagcaaatagatctgtttcaaaatatgttcccgctatgtggataactcttctttttaaaaagaaaatagagaatagcaaatcttcatgataatcctcaaaagaacaaaatgcttaactttatctcttaatttctaaaggtaaataacctaggttcagcttttgcttaaacattaaatatcttttccattttttaatgtttgtaagctagatatgccagctttgtttctacattgcaaccaaaaactgtttcttttcacttaattataaaaccagtaattcatttactcttgcccaaaactatacactgtatttctgttatagtaacaaaatagagttatgtagaattgtatggaactcaaatttaaaccatgctttcttgtagtactgattgaaacttacacgttttattctactcatagtgagcttattcttattttggattgattttccaaaaccacagcttcagcagcaacaatcagaatgtccaaatgctgtcctttcccttacagagaagaacaatggtaactaaaagctgcatataactagcaataactacattgaacggtgtgcattgttcatgattgttgtgttttaagacttgtatataaactgctttttccaaactctgtataacttttaaatggctggaactactcgtataaggactagactgtatttttgacatgctcctatttttgtaacttgaaaaaataaaattttgccttgtgacagattttctcaa

SEQ ID NO: 444881 - DNA, 2523 bp, Homo sapiens
gtgacgaatcacgtcccggctctctgcactgcggggcggggcccacgctttgctgcccgccctgccggccccacccccagcctggttagcagtcgctttctgatcccggaaaggaccctgagctgggaaatagcgagaggcggggatgttggggattttaaaacttatgtagatcaggcatgtagagctgctgaggagtttgtcaatatttactatgagacaatggataaaagaagacgggcactaaccaggctgtatctggacaaggccaccttaatatggaatggaaatgctgtttcagggctggatgccctaaataatttttttgacacattgccttctagtgagttccaggtcaatatgttagattgccaaccagttcatgagcaagcaactcagtcccaaactacagttcttgttgtgaccagtggaactgtgaagtttgatggaaacaaacaacatttcttcaaccagaacttcctgctgactgctcagtccactcccaacaatactgtgtggaagattgcaagtgattgcttccgttttcaagattggtctagtagttaaaggggctattttgattgtagaagcactataatatgtgctgaaactaaatttctttaatattttctattcctgtcagcaccttttctagcagctgccagtttggagcattgccctctaagagctttaaaactatttttttacatgccttatatacattccactaatgacattcttataataatattaaacacatgatcttggtactaacatactcactgtgaacccagcctattgcaaaaataaaatctttttataatattatctatgggatgtcagcacaatataacactctgggaagaagtggagttttttggttattaggttaattttctagtaaaacacgttgcctgttttcagttaacactggtaatgccattttaatatatggctttttcaaatcagttcagtgaaaatagtacagatttaggtttacataactactctgacatactggaattgcatatagagatgttcagtggtcgtttttcattttaagtaatttttgttttggcatttttttgtgtgaagtaaattaatcaactagagaggtgcaaaacgttctcagttgatatctgagtattgggtgcatttggtggcttaaaagcaaagcttcctaaaaagatttttcttggcagctccaggtctatacatttaggtaatgaatggtagtagaactaatagctttaacaggagaatagggaatgagaaatagaaatccaaggctgaagccaaaagtaaggagggtggccaaatggtaaactattggtacttgttttctacctcctaaaaatgtagcttatttttaggatttaaatcactaagtaaataagtatccttgccaagtgatcatgagtgtcatttttgttctaagactaatatttttagatctttttacttcacctcatacttatcaccaatgtatatctccatttattcaataacttactggggtaaaataacagcaataaacctaaccttttaacagggtctaacatgagagttggagtcaaagccattgttatcttttggtgacacccttaaattttaagtcttccagtcttccatgtgaactttaggcccaaagtttcttatgtatcacacatcccccaaataagtgattttttcccagtgctttgtactgtcaactgcattatctttaattatttaaaggtagaattatttaattttgtgatttgttcttccatatgacattgagcaaatagatctgtttcaaaatatgttcccgctatgtggataactcttctttttaaaaagaaaatagagaatagcaaatcttcatgataatcctcaaaagaacaaaatgcttaactttatctcttaatttctaaaggtaaataacctaggttcagcttttgcttaaacattaaatatcttttccattttttaatgtttgtaagctagatatgccagctttgtttctacattgcaaccaaaaactgtttcttttcacttaattataaaaccagtaattcatttactcttgcccaaaactatacactgtatttctgttatagtaacaaaatagagttatgtagaattgtatggaactcaaatttaaaccatgctttcttgtagtactgattgaaacttacacgttttattctactcatagtgagcttattcttattttggattgattttccaaaaccacagcttcagcagcaacaatcagaatgtccaaatgctgtcctttcccttacagagaagaacaatggtaactaaaagctgcatataactagcaataactacattgaacggtgtgcattgttcatgattgttgtgttttaagacttgtatataaactgctttttccaaactctgtataacttttaaatggctggaactactcgtataaggactagactgtatttttgacatgctcctatttttgtaacttgaaaaaataaaattttgccttgtgacagattttctcaa

SEQ ID NO: 444882 - DNA, 8561 bp, Homo sapiens
  misc_feature (330)..(330): n is a, c, g, or t
  misc_feature (421)..(421): n is a, c, g, or t
  misc_feature (1269)..(1269): n is a, c, g, or t
  misc_feature (3636)..(3636): n is a, c, g, or t
  misc_feature (4437)..(4437): n is a, c, g, or t
gggcgagcgcctccgtccccggatgtgagctccggctgcccgcggtcccgagccagcggcgcgcgggcggcggcggcgggcaccgggcaccgcggcgggcgggcagacgggcgggcatggggggagcgccgagcggccccggcggccgggccggcatcaccgcggcgtctctccgctagaggaggggacaagccagttctcctttgcagcaaaaaattacatgtatatattattaagataatatatacattggattttatttttttaaaaagtttattttgctccatttttgaaaaagagagagcttgggtggcgagcggtttttttttnaaatcaattatccttattttctgttatttgtccccgtccctccccacccccctgctgaagcgagaataagggcagggaccgcggctcctanctcttggtgatccccttccccattccgcccccgcctcaacgcccagcacagtgccctgcacacagtagtcgctcaataaatgttcgtggatgatgatgatgatgatgatgaaaaaaatgcagcatcaacggcagcagcaagcggaccacgcgaacgaggcaaactatgcaagaggcaccagacttcctctttctggtgaaggaccaacttctcagccgaatagctccaagcaaactgtcctgtcttggcaagctgcaatcgatgctgctagacaggccaaggctgcccaaactatgagcacctctgcacccccacctgtaggatctctctcccaaagaaaacgtcagcaatacgccaagagcaaaaaacagggtaactcgtccaacagccgacctgcccgcgcccttttctgtttatcactcaataaccccatccgaagagcctgcattagtatagtggaatggaaaccatttgacatatttatattattggctatttttgccaattgtgtggccttagctatttacatcccattccctgaagatgattctaattcaacaaatcataacttggaaaaagtagaatatgccttcctgattatttttacagtcgagacatttttgaagattatagcgtatggattattgctacatcctaatgcttatgttaggaatggatggaatttactggattttgttatagtaatagtaggattgtttagtgtaattttggaacaattaaccaaagaaacagaaggcgggaaccactcaagcggcaaatctggaggctttgatgtcaaagccctccgtgcctttcgagtgttgcgaccacttcgactagtgtcaggngtgcccagtttacaagttgtcctgaactccattataaaagccatggttcccctccttcacatagcccttttggtattatttgtaatcataatctatgctattataggattggaactttttattggaaaaatgcacaaaacatgtttttttgctgactcagatatcgtagctgaagaggacccagctccatgtgcgttctcagggaatggacgccagtgtactgccaatggcacggaatgtaggagtggctgggttggcccgaacggaggcatcaccaactttgataactttgcctttgccatgcttactgtgtttcagtgcatcaccatggagggctggacagacgtgctctactgggtaaatgatgcgataggatgggaatggccatgggtgtattttgttagtctgatcatccttggctcatttttcgtccttaacctggttcttggtgtccttagtggagaattctcaaaggaaagagagaaggcaaaagcacggggagatttccagaagctccgggagaagcagcagctggaggaggatctaaagggctacttggattggatcacccaagctgaggacatcgatccggagaatgaggaagaaggaggagaggaaggcaaacgaaatactagcatgcccaccagcgagactgagtctgtgaacacagagaacgtcagcggtgaaggcgagaaccgaggctgctgtggaagtctctggtgctggtggagacggagaggcgcggccaaggcggggccctctgggtgtcggcggtggggtcaagccatctcaaaatccaaactcagccgacgctggcgtcgctggaaccgattcaatcgcagaagatgtagggccgccgtgaagtctgtcacgttttactggctggttatcgtcctggtgtttctgaacaccttaaccatttcctctgagcactacaatcagccagattggttgacacagattcaagatattgccaacaaagtcctcttggctctgttcacctgcgagatgctggtaaaaatgtacagcttgggcctccaagcatatttcgtctctcttttcaaccggtttgattgcttcgtggtgtgtggtggaatcactgagacgatcttggtggaactggaaatcatgtctcccctggggatctctgtgtttcggtgtgtgcgcctcttaagaatcttcaaagtgaccaggcactggacttccctgagcaacttagtggcatccttattaaactccatgaagtccatcgcttcgctgttgcttctgctttttctcttcattatcatcttttccttgcttgggatgcagctgtttggcggcaagtttaattttgatgaaacgcaaaccaagcggagcacctttgacaatttccctcaagcacttctcacagtgttccagatcctgacaggcgaagactggaatgctgtgatgtacgatggcatcatggcttacgggggcccatcctcttcaggaatgatcgtctgcatctacttcatcatcctcttcatttgtggtaactatattctactgaatgtcttcttggccatcgctgtagacaatttggctgatgctgaaagtctgaacactgctcagaaagaagaagcggaagaaaaggagaggaaaaagattgccagaaaagagagcctagaaaataaaaagaacaacaaaccagaagtcaaccagatagccaacagtgacaacaaggttacaattgatgactatagagaagaggatgaagacaaggacccctatccgccttgcgatgtgccagtaggggaagaggaagaggaagaggaggaggatgaacctgaggttcctgccggaccccgtcctcgaaggatctcggagttgaacatgaaggaaaaaattgcccccatccctgaagggagcgctttcttcattcttagcaagaccaacccgatccgcgtaggctgccacaagctcatcaaccaccacatcttcaccaacctcatccttgtcttcatcatgctgagcagcgctgccctggccgcagaggaccccatccgcagccactccttccggaacacgatactgggttactttgactatgccttcacagccatctttactgttgagatcctgttgaagatgacaacttttggagctttcctccacaaaggggccttctgcaggaactacttcaatttgctggatatgctggtggttggggtgtctctggtgtcatttgggattcaatccagtgccatctccgttgtgaagattctgagggtcttaagggtcctgcgtcccctcagggccatcaacagagcaaaaggacttaagcacgtggtccagtgcgtcttcgtggccatccggaccatcggcaacatcatgatcgtcacnaccctcctgcagttcatgtttgcctgtatcggggtccagttgttcaaggggaagttctatcgctgtacggatgaagccaaaagtaaccctgaagaatgcaggggacttttcatcctctacaaggatggggatgttgacagtcctgtggtccgtgaacggatctggcaaaacagtgatttcaacttcgacaacgtcctctctgctatgatggcgctcttcacagtctccacgtttgagggctggcctgcgttgctgtataaagccatcgactcgaatggagagaacatcggcccaatctacaaccaccgcgtggagatctccatcttcttcatcatctacatcatcattgtagctttcttcatgatgaacatctttgtgggctttgtcatcgttacatttcaggaacaaggagaaaaagagtataagaactgtgagctggacaaaaatcagcgtcagtgtgttgaatacgccttgaaagcacgtcccttgcggagatacatccccaaaaacccctaccagtacaagttctggtacgtggtgaactcttcgcctttcgaatacatgatgtttgtcctcatcatgctcaacacactctgcttggccatgcagcactacgagcagtccaagatgttcaatgatgccatggacattctgaacatggtcttcaccggggtgttcaccgtcgagatggttttgaaagtcatcgcatttaagcctaaggggtattttagtgacgcctggaacacgtttgactccctcatcgtaatcggcagcattatagacgtggccctcagcgaagcngacccaactgaaagtgaaaatgtccctgtcccaactgctacacctgggaactctgaagagagcaatagaatctccatcacctttttccgtcttttccgagtgatgcgattggtgaagcttctcagcaggggggaaggcatccggacattgctgtggacttttattaagtcctttcaggcgctcccgtatgtggccctcctcatagccatgctgttcttcatctatgcggtcattggcatgcagatgtttgggaaagttgccatgagagataacaaccagatcaataggaacaataacttccagacgtttccccaggcggtgctgctgctcttcaggtgtgcaacaggtgaggcctggcaggagatcatgctggcctgtctcccagggaagctctgtgaccctgagtcagattacaaccccggggaggagtatacatgtgggagcaactttgccattgtctatttcatcagtttttacatgctctgtgcatttctgatcatcaatctgtttgtggctgtcatcatggataatttcgactatctgacccgggactggtctattttggggcctcaccatttagatgaattcaaaagaatatggtcagaatatgaccctgaggcaaagggaaggataaaacaccttgatgtggtcactctgcttcgacgcatccagcctcccctggggtttgggaagttatgtccacacagggtagcgtgcaagagattagttgccatgaacatgcctctcaacagtgacgggacagtcatgtttaatgcaaccctgtttgctttggttcgaacggctcttaagatcaagaccgaagggaacctggagcaagctaatgaagaacttcgggctgtgataaagaaaatttggaagaaaaccagcatgaaattacttgaccaagttgtccctccagctggtgatgatgaggtaaccgtggggaagttctatgccactttcctgatacaggactactttaggaaattcaagaaacggaaagaacaaggactggtgggaaagtaccctgcgaagaacaccacaattgccctacaggcgggattaaggacactgcatgacattgggccagaaatccggcgtgctatatcgtgtgatttgcaagatgacgagcctgaggaaacaaaacgagaagaagaagatgatgtgttcaaaagaaatggtgccctgcttggaaaccatgtcaatcatgttaatagtgataggagagattcccttcagcagaccaataccacccaccgtcccctgcatgtccaaaggccttcaattccacctgcaagtgatactgagaaaccgctgtttcctccagcaggaaattcggtgtgtcataaccatcataaccataattccataggaaagcaagttcccacctcaacaaatgccaatctcaataatgccaatatgtccaaagctgcccatggaaagcggcccagcattgggaaccttgagcatgtgtctgaaaatgggcatcattcttcccacaagcatgaccgggagcctcagagaaggtccagtgtgaaaagaacccgctattatgaaacttacattaggtccgactcaggagatgaacagctcccaactatttgccgggaagacccagagatacatggctatttcagggacccccactgcttgggggagcaggagtatttcagtagtgaggaatgctacgaggatgacagctcgcccacctggagcaggcaaaactatggctactacagcagatacccaggcagaaacatcgactctgagaggccccgaggctaccatcatccccaaggattcttggaggacgatgactcgcccgtttgctatgattcacggagatctccaaggagacgcctactacctcccaccccagcatcccaccggagatcctccttcaactttgagtgcctgcgccggcagagcagccaggaagaggtcccgtcgtctcccatcttcccccatcgcacggccctgcctctgcatctaatgcagcaacagatcatggcagttgccggcctagattcaagtaaagcccagaagtactcaccgagtcactcgacccggtcgtgggccacccctccagcaacccctccctaccgggactggacaccgtgctacacccccctgatccaagtggagcagtcagaggccctggaccaggtgaacggcagcctgccgtccctgcaccgcagctcctggtacacagacgagcccgacatctcctaccggactttcacaccagccagcctgactgtccccagcagcttccggaacaaaaacagcgacaagcagaggagtgcggacagcttggtggaggcagtcctgatatccgaaggcttgggacgctatgcaagggacccaaaatttgtgtcagcaacaaaacacgaaatcgctgatgcctgtgacctcaccatcgacgagatggagagtgcagccagcaccctgcttaatgggaacgtgcgtccccgagccaacggggatgtgggccccctctcacaccggcaggactatgagctacaggactttggtcctggctacagcgacgaagagccagaccctgggagggatgaggaggacctggcggatgaaatgatatgcatcaccaccttgtagcccccagcgaggggcagactggctctggcctcaggtggggcgcaggagagccaggggaaaagtgcctcatagttaggaaagtttaggcactagttgggagtaatattcaattaattagacttttgtataagagatgtcatgcctcaagaaagccataaacctggtaggaacaggtcccaagcggttgagcctggcagagtaccatgcgctcggccccagctgcaggaaacagcaggccccgccctctcacagaggatgggtgaggaggccagacctgccctgccccattgtccagatgggcactgctgtggagtctgcttctcccatgtaccagggcaccaggcccacccaactgaaggcatggcggcggggtgcaggggaaagttaaaggtgatgacgatcatcacacctcgtgtcgttacctcagccatcggtctagcatatcagtcactgggcccaacatatccatttttaaaccctttcccccaaatacactgcgtcctggttcctgtttagctgttctgaaatacggtgtgtaagtaagtcagaacccagctaccagtgattattgcgagggcaatgggacctcataaataaggttttctgtgatgtgacgccagtttacataagagaatatcactccgatggtcggtttctgactgtcacgctaagggcaactgtaaactggaataataatgcactcgcaaccaggtaaacttagatacactagtttgtttaaaattatagatttactgtacatgacttgtaatatactataatttgtatttgtaaagagatggtctatattttgtaattactgtattgtatttgaactgcagcaatatccatgggtcctaataattgtagttccccactaaaatctagaaattattagtatttttactcgggctatccagaagtagaagaaatagagccaattctcatttattcagcgaaaatcctctggggttaaaattttaagtttgaaagaacttgacactacagaaatttttctaaaatattttgagtcactataaacctatcatctttccacaagatataccagatgactatttgcagtcttttctttgggcaagagttccatgattttgatactgtacctttggatccaccatgggttgcaactgtctttggttttgtttgtttgacttgaaccaccctctggtaagtaagtgaattacagagcaggtccagctggctgctctgccccttgggtatccatagttacggttttctctgtggcccacccagggtgttttttgcatcgctggtgcagaaatgcacaggtggatgagatatagctgctcttgtcctctggggactggtggtgctgcttaagaaataaggggtgctggggacagaggagcaacgtggtgatctataggattggagtgtcggggtctgtacaaatcgtattgttgccttttacaaaactgctgtactgtatgttctctttgagggcttttatatgcaattgaatgagg

SEQ ID NO: 444883 - DNA, 8501 bp, Homo sapiens
  misc_feature (330)..(330): n is a, c, g, or t
  misc_feature (421)..(421): n is a, c, g, or t
  misc_feature (1269)..(1269): n is a, c, g, or t
  misc_feature (3576)..(3576): n is a, c, g, or t
  misc_feature (4377)..(4377): n is a, c, g, or t
gggcgagcgcctccgtccccggatgtgagctccggctgcccgcggtcccgagccagcggcgcgcgggcggcggcggcgggcaccgggcaccgcggcgggcgggcagacgggcgggcatggggggagcgccgagcggccccggcggccgggccggcatcaccgcggcgtctctccgctagaggaggggacaagccagttctcctttgcagcaaaaaattacatgtatatattattaagataatatatacattggattttatttttttaaaaagtttattttgctccatttttgaaaaagagagagcttgggtggcgagcggtttttttttnaaatcaattatccttattttctgttatttgtccccgtccctccccacccccctgctgaagcgagaataagggcagggaccgcggctcctanctcttggtgatccccttccccattccgcccccgcctcaacgcccagcacagtgccctgcacacagtagtcgctcaataaatgttcgtggatgatgatgatgatgatgatgaaaaaaatgcagcatcaacggcagcagcaagcggaccacgcgaacgaggcaaactatgcaagaggcaccagacttcctctttctggtgaaggaccaacttctcagccgaatagctccaagcaaactgtcctgtcttggcaagctgcaatcgatgctgctagacaggccaaggctgcccaaactatgagcacctctgcacccccacctgtaggatctctctcccaaagaaaacgtcagcaatacgccaagagcaaaaaacagggtaactcgtccaacagccgacctgcccgcgcccttttctgtttatcactcaataaccccatccgaagagcctgcattagtatagtggaatggaaaccatttgacatatttatattattggctatttttgccaattgtgtggccttagctatttacatcccattccctgaagatgattctaattcaacaaatcataacttggaaaaagtagaatatgccttcctgattatttttacagtcgagacatttttgaagattatagcgtatggattattgctacatcctaatgcttatgttaggaatggatggaatttactggattttgttatagtaatagtaggattgtttagtgtaattttggaacaattaaccaaagaaacagaaggcgggaaccactcaagcggcaaatctggaggctttgatgtcaaagccctccgtgcctttcgagtgttgcgaccacttcgactagtgtcaggngtgcccagtttacaagttgtcctgaactccattataaaagccatggttcccctccttcacatagcccttttggtattatttgtaatcataatctatgctattataggattggaactttttattggaaaaatgcacaaaacatgtttttttgctgactcagatatcgtagctgaagaggacccagctccatgtgcgttctcagggaatggacgccagtgtactgccaatggcacggaatgtaggagtggctgggttggcccgaacggaggcatcaccaactttgataactttgcctttgccatgcttactgtgtttcagtgcatcaccatggagggctggacagacgtgctctactggatgaatgatgctatgggatttgaattgccctgggtgtattttgtcagtctcgtcatctttgggtcatttttcgtactaaatcttgtacttggtgtattgagcggagaattctcaaaggaaagagagaaggcaaaagcacggggagatttccagaagctccgggagaagcagcagctggaggaggatctaaagggctacttggattggatcacccaagctgaggacatcgatccggagaatgaggaagaaggaggagaggaaggcaaacgaaatactagcatgcccaccagcgagactgagtctgtgaacacagagaacgtcagcggtgaaggcgagaaccgaggctgctgtggaagtctctgtcaagccatctcaaaatccaaactcagccgacgctggcgtcgctggaaccgattcaatcgcagaagatgtagggccgccgtgaagtctgtcacgttttactggctggttatcgtcctggtgtttctgaacaccttaaccatttcctctgagcactacaatcagccagattggttgacacagattcaagatattgccaacaaagtcctcttggctctgttcacctgcgagatgctggtaaaaatgtacagcttgggcctccaagcatatttcgtctctcttttcaaccggtttgattgcttcgtggtgtgtggtggaatcactgagacgatcttggtggaactggaaatcatgtctcccctggggatctctgtgtttcggtgtgtgcgcctcttaagaatcttcaaagtgaccaggcactggacttccctgagcaacttagtggcatccttattaaactccatgaagtccatcgcttcgctgttgcttctgctttttctcttcattatcatcttttccttgcttgggatgcagctgtttggcggcaagtttaattttgatgaaacgcaaaccaagcggagcacctttgacaatttccctcaagcacttctcacagtgttccagatcctgacaggcgaagactggaatgctgtgatgtacgatggcatcatggcttacgggggcccatcctcttcaggaatgatcgtctgcatctacttcatcatcctcttcatttgtggtaactatattctactgaatgtcttcttggccatcgctgtagacaatttggctgatgctgaaagtctgaacactgctcagaaagaagaagcggaagaaaaggagaggaaaaagattgccagaaaagagagcctagaaaataaaaagaacaacaaaccagaagtcaaccagatagccaacagtgacaacaaggttacaattgatgactatagagaagaggatgaagacaaggacccctatccgccttgcgatgtgccagtaggggaagaggaagaggaagaggaggaggatgaacctgaggttcctgccggaccccgtcctcgaaggatctcggagttgaacatgaaggaaaaaattgcccccatccctgaagggagcgctttcttcattcttagcaagaccaacccgatccgcgtaggctgccacaagctcatcaaccaccacatcttcaccaacctcatccttgtcttcatcatgctgagcagcgctgccctggccgcagaggaccccatccgcagccactccttccggaacacgatactgggttactttgactatgccttcacagccatctttactgttgagatcctgttgaagatgacaacttttggagctttcctccacaaaggggccttctgcaggaactacttcaatttgctggatatgctggtggttggggtgtctctggtgtcatttgggattcaatccagtgccatctccgttgtgaagattctgagggtcttaagggtcctgcgtcccctcagggccatcaacagagcaaaaggacttaagcacgtggtccagtgcgtcttcgtggccatccggaccatcggcaacatcatgatcgtcacnaccctcctgcagttcatgtttgcctgtatcggggtccagttgttcaaggggaagttctatcgctgtacggatgaagccaaaagtaaccctgaagaatgcaggggacttttcatcctctacaaggatggggatgttgacagtcctgtggtccgtgaacggatctggcaaaacagtgatttcaacttcgacaacgtcctctctgctatgatggcgctcttcacagtctccacgtttgagggctggcctgcgttgctgtataaagccatcgactcgaatggagagaacatcggcccaatctacaaccaccgcgtggagatctccatcttcttcatcatctacatcatcattgtagctttcttcatgatgaacatctttgtgggctttgtcatcgttacatttcaggaacaaggagaaaaagagtataagaactgtgagctggacaaaaatcagcgtcagtgtgttgaatacgccttgaaagcacgtcccttgcggagatacatccccaaaaacccctaccagtacaagttctggtacgtggtgaactcttcgcctttcgaatacatgatgtttgtcctcatcatgctcaacacactctgcttggccatgcagcactacgagcagtccaagatgttcaatgatgccatggacattctgaacatggtcttcaccggggtgttcaccgtcgagatggttttgaaagtcatcgcatttaagcctaaggggtattttagtgacgcctggaacacgtttgactccctcatcgtaatcggcagcattatagacgtggccctcagcgaagcngacccaactgaaagtgaaaatgtccctgtcccaactgctacacctgggaactctgaagagagcaatagaatctccatcacctttttccgtcttttccgagtgatgcgattggtgaagcttctcagcaggggggaaggcatccggacattgctgtggacttttattaagtcctttcaggcgctcccgtatgtggccctcctcatagccatgctgttcttcatctatgcggtcattggcatgcagatgtttgggaaagttgccatgagagataacaaccagatcaataggaacaataacttccagacgtttccccaggcggtgctgctgctcttcaggtgtgcaacaggtgaggcctggcaggagatcatgctggcctgtctcccagggaagctctgtgaccctgagtcagattacaaccccggggaggagtatacatgtgggagcaactttgccattgtctatttcatcagtttttacatgctctgtgcatttctgatcatcaatctgtttgtggctgtcatcatggataatttcgactatctgacccgggactggtctattttggggcctcaccatttagatgaattcaaaagaatatggtcagaatatgaccctgaggcaaagggaaggataaaacaccttgatgtggtcactctgcttcgacgcatccagcctcccctggggtttgggaagttatgtccacacagggtagcgtgcaagagattagttgccatgaacatgcctctcaacagtgacgggacagtcatgtttaatgcaaccctgtttgctttggttcgaacggctcttaagatcaagaccgaagggaacctggagcaagctaatgaagaacttcgggctgtgataaagaaaatttggaagaaaaccagcatgaaattacttgaccaagttgtccctccagctggtgatgatgaggtaaccgtggggaagttctatgccactttcctgatacaggactactttaggaaattcaagaaacggaaagaacaaggactggtgggaaagtaccctgcgaagaacaccacaattgccctacaggcgggattaaggacactgcatgacattgggccagaaatccggcgtgctatatcgtgtgatttgcaagatgacgagcctgaggaaacaaaacgagaagaagaagatgatgtgttcaaaagaaatggtgccctgcttggaaaccatgtcaatcatgttaatagtgataggagagattcccttcagcagaccaataccacccaccgtcccctgcatgtccaaaggccttcaattccacctgcaagtgatactgagaaaccgctgtttcctccagcaggaaattcggtgtgtcataaccatcataaccataattccataggaaagcaagttcccacctcaacaaatgccaatctcaataatgccaatatgtccaaagctgcccatggaaagcggcccagcattgggaaccttgagcatgtgtctgaaaatgggcatcattcttcccacaagcatgaccgggagcctcagagaaggtccagtgtgaaaagaacccgctattatgaaacttacattaggtccgactcaggagatgaacagctcccaactatttgccgggaagacccagagatacatggctatttcagggacccccactgcttgggggagcaggagtatttcagtagtgaggaatgctacgaggatgacagctcgcccacctggagcaggcaaaactatggctactacagcagatacccaggcagaaacatcgactctgagaggccccgaggctaccatcatccccaaggattcttggaggacgatgactcgcccgtttgctatgattcacggagatctccaaggagacgcctactacctcccaccccagcatcccaccggagatcctccttcaactttgagtgcctgcgccggcagagcagccaggaagaggtcccgtcgtctcccatcttcccccatcgcacggccctgcctctgcatctaatgcagcaacagatcatggcagttgccggcctagattcaagtaaagcccagaagtactcaccgagtcactcgacccggtcgtgggccacccctccagcaacccctccctaccgggactggacaccgtgctacacccccctgatccaagtggagcagtcagaggccctggaccaggtgaacggcagcctgccgtccctgcaccgcagctcctggtacacagacgagcccgacatctcctaccggactttcacaccagccagcctgactgtccccagcagcttccggaacaaaaacagcgacaagcagaggagtgcggacagcttggtggaggcagtcctgatatccgaaggcttgggacgctatgcaagggacccaaaatttgtgtcagcaacaaaacacgaaatcgctgatgcctgtgacctcaccatcgacgagatggagagtgcagccagcaccctgcttaatgggaacgtgcgtccccgagccaacggggatgtgggccccctctcacaccggcaggactatgagctacaggactttggtcctggctacagcgacgaagagccagaccctgggagggatgaggaggacctggcggatgaaatgatatgcatcaccaccttgtagcccccagcgaggggcagactggctctggcctcaggtggggcgcaggagagccaggggaaaagtgcctcatagttaggaaagtttaggcactagttgggagtaatattcaattaattagacttttgtataagagatgtcatgcctcaagaaagccataaacctggtaggaacaggtcccaagcggttgagcctggcagagtaccatgcgctcggccccagctgcaggaaacagcaggccccgccctctcacagaggatgggtgaggaggccagacctgccctgccccattgtccagatgggcactgctgtggagtctgcttctcccatgtaccagggcaccaggcccacccaactgaaggcatggcggcggggtgcaggggaaagttaaaggtgatgacgatcatcacacctcgtgtcgttacctcagccatcggtctagcatatcagtcactgggcccaacatatccatttttaaaccctttcccccaaatacactgcgtcctggttcctgtttagctgttctgaaatacggtgtgtaagtaagtcagaacccagctaccagtgattattgcgagggcaatgggacctcataaataaggttttctgtgatgtgacgccagtttacataagagaatatcactccgatggtcggtttctgactgtcacgctaagggcaactgtaaactggaataataatgcactcgcaaccaggtaaacttagatacactagtttgtttaaaattatagatttactgtacatgacttgtaatatactataatttgtatttgtaaagagatggtctatattttgtaattactgtattgtatttgaactgcagcaatatccatgggtcctaataattgtagttccccactaaaatctagaaattattagtatttttactcgggctatccagaagtagaagaaatagagccaattctcatttattcagcgaaaatcctctggggttaaaattttaagtttgaaagaacttgacactacagaaatttttctaaaatattttgagtcactataaacctatcatctttccacaagatataccagatgactatttgcagtcttttctttgggcaagagttccatgattttgatactgtacctttggatccaccatgggttgcaactgtctttggttttgtttgtttgacttgaaccaccctctggtaagtaagtgaattacagagcaggtccagctggctgctctgccccttgggtatccatagttacggttttctctgtggcccacccagggtgttttttgcatcgctggtgcagaaatgcacaggtggatgagatatagctgctcttgtcctctggggactggtggtgctgcttaagaaataaggggtgctggggacagaggagcaacgtggtgatctataggattggagtgtcggggtctgtacaaatcgtattgttgccttttacaaaactgctgtactgtatgttctctttgagggcttttatatgcaattgaatgagg

SEQ ID NO: 444884 - DNA, 8435 bp, Homo sapiens
  misc_feature (330)..(330): n is a, c, g, or t
  misc_feature (421)..(421): n is a, c, g, or t
  misc_feature (1269)..(1269): n is a, c, g, or t
  misc_feature (3636)..(3636): n is a, c, g, or t
  misc_feature (4437)..(4437): n is a, c, g, or t
gggcgagcgcctccgtccccggatgtgagctccggctgcccgcggtcccgagccagcggcgcgcgggcggcggcggcgggcaccgggcaccgcggcgggcgggcagacgggcgggcatggggggagcgccgagcggccccggcggccgggccggcatcaccgcggcgtctctccgctagaggaggggacaagccagttctcctttgcagcaaaaaattacatgtatatattattaagataatatatacattggattttatttttttaaaaagtttattttgctccatttttgaaaaagagagagcttgggtggcgagcggtttttttttnaaatcaattatccttattttctgttatttgtccccgtccctccccacccccctgctgaagcgagaataagggcagggaccgcggctcctanctcttggtgatccccttccccattccgcccccgcctcaacgcccagcacagtgccctgcacacagtagtcgctcaataaatgttcgtggatgatgatgatgatgatgatgaaaaaaatgcagcatcaacggcagcagcaagcggaccacgcgaacgaggcaaactatgcaagaggcaccagacttcctctttctggtgaaggaccaacttctcagccgaatagctccaagcaaactgtcctgtcttggcaagctgcaatcgatgctgctagacaggccaaggctgcccaaactatgagcacctctgcacccccacctgtaggatctctctcccaaagaaaacgtcagcaatacgccaagagcaaaaaacagggtaactcgtccaacagccgacctgcccgcgcccttttctgtttatcactcaataaccccatccgaagagcctgcattagtatagtggaatggaaaccatttgacatatttatattattggctatttttgccaattgtgtggccttagctatttacatcccattccctgaagatgattctaattcaacaaatcataacttggaaaaagtagaatatgccttcctgattatttttacagtcgagacatttttgaagattatagcgtatggattattgctacatcctaatgcttatgttaggaatggatggaatttactggattttgttatagtaatagtaggattgtttagtgtaattttggaacaattaaccaaagaaacagaaggcgggaaccactcaagcggcaaatctggaggctttgatgtcaaagccctccgtgcctttcgagtgttgcgaccacttcgactagtgtcaggngtgcccagtttacaagttgtcctgaactccattataaaagccatggttcccctccttcacatagcccttttggtattatttgtaatcataatctatgctattataggattggaactttttattggaaaaatgcacaaaacatgtttttttgctgactcagatatcgtagctgaagaggacccagctccatgtgcgttctcagggaatggacgccagtgtactgccaatggcacggaatgtaggagtggctgggttggcccgaacggaggcatcaccaactttgataactttgcctttgccatgcttactgtgtttcagtgcatcaccatggagggctggacagacgtgctctactgggtaaatgatgcgataggatgggaatggccatgggtgtattttgttagtctgatcatccttggctcatttttcgtccttaacctggttcttggtgtccttagtggagaattctcaaaggaaagagagaaggcaaaagcacggggagatttccagaagctccgggagaagcagcagctggaggaggatctaaagggctacttggattggatcacccaagctgaggacatcgatccggagaatgaggaagaaggaggagaggaaggcaaacgaaatactagcatgcccaccagcgagactgagtctgtgaacacagagaacgtcagcggtgaaggcgagaaccgaggctgctgtggaagtctctggtgctggtggagacggagaggcgcggccaaggcggggccctctgggtgtcggcggtggggtcaagccatctcaaaatccaaactcagccgacgctggcgtcgctggaaccgattcaatcgcagaagatgtagggccgccgtgaagtctgtcacgttttactggctggttatcgtcctggtgtttctgaacaccttaaccatttcctctgagcactacaatcagccagattggttgacacagattcaagatattgccaacaaagtcctcttggctctgttcacctgcgagatgctggtaaaaatgtacagcttgggcctccaagcatatttcgtctctcttttcaaccggtttgattgcttcgtggtgtgtggtggaatcactgagacgatcttggtggaactggaaatcatgtctcccctggggatctctgtgtttcggtgtgtgcgcctcttaagaatcttcaaagtgaccaggcactggacttccctgagcaacttagtggcatccttattaaactccatgaagtccatcgcttcgctgttgcttctgctttttctcttcattatcatcttttccttgcttgggatgcagctgtttggcggcaagtttaattttgatgaaacgcaaaccaagcggagcacctttgacaatttccctcaagcacttctcacagtgttccagatcctgacaggcgaagactggaatgctgtgatgtacgatggcatcatggcttacgggggcccatcctcttcaggaatgatcgtctgcatctacttcatcatcctcttcatttgtggtaactatattctactgaatgtcttcttggccatcgctgtagacaatttggctgatgctgaaagtctgaacactgctcagaaagaagaagcggaagaaaaggagaggaaaaagattgccagaaaagagagcctagaaaataaaaagaacaacaaaccagaagtcaaccagatagccaacagtgacaacaaggttacaattgatgactatagagaagaggatgaagacaaggacccctatccgccttgcgatgtgccagtaggggaagaggaagaggaagaggaggaggatgaacctgaggttcctgccggaccccgtcctcgaaggatctcggagttgaacatgaaggaaaaaattgcccccatccctgaagggagcgctttcttcattcttagcaagaccaacccgatccgcgtaggctgccacaagctcatcaaccaccacatcttcaccaacctcatccttgtcttcatcatgctgagcagcgctgccctggccgcagaggaccccatccgcagccactccttccggaacacgatactgggttactttgactatgccttcacagccatctttactgttgagatcctgttgaagatgacaacttttggagctttcctccacaaaggggccttctgcaggaactacttcaatttgctggatatgctggtggttggggtgtctctggtgtcatttgggattcaatccagtgccatctccgttgtgaagattctgagggtcttaagggtcctgcgtcccctcagggccatcaacagagcaaaaggacttaagcacgtggtccagtgcgtcttcgtggccatccggaccatcggcaacatcatgatcgtcacnaccctcctgcagttcatgtttgcctgtatcggggtccagttgttcaaggggaagttctatcgctgtacggatgaagccaaaagtaaccctgaagaatgcaggggacttttcatcctctacaaggatggggatgttgacagtcctgtggtccgtgaacggatctggcaaaacagtgatttcaacttcgacaacgtcctctctgctatgatggcgctcttcacagtctccacgtttgagggctggcctgcgttgctgtataaagccatcgactcgaatggagagaacatcggcccaatctacaaccaccgcgtggagatctccatcttcttcatcatctacatcatcattgtagctttcttcatgatgaacatctttgtgggctttgtcatcgttacatttcaggaacaaggagaaaaagagtataagaactgtgagctggacaaaaatcagcgtcagtgtgttgaatacgccttgaaagcacgtcccttgcggagatacatccccaaaaacccctaccagtacaagttctggtacgtggtgaactcttcgcctttcgaatacatgatgtttgtcctcatcatgctcaacacactctgcttggccatgcagcactacgagcagtccaagatgttcaatgatgccatggacattctgaacatggtcttcaccggggtgttcaccgtcgagatggttttgaaagtcatcgcatttaagcctaaggggtattttagtgacgcctggaacacgtttgactccctcatcgtaatcggcagcattatagacgtggccctcagcgaagcngacccaactgaaagtgaaaatgtccctgtcccaactgctacacctgggaactctgaagagagcaatagaatctccatcacctttttccgtcttttccgagtgatgcgattggtgaagcttctcagcaggggggaaggcatccggacattgctgtggacttttattaagtcctttcaggcgctcccgtatgtggccctcctcatagccatgctgttcttcatctatgcggtcattggcatgcagatgtttgggaaagttgccatgagagataacaaccagatcaataggaacaataacttccagacgtttccccaggcggtgctgctgctcttcaggtgtgcaacaggtgaggcctggcaggagatcatgctggcctgtctcccagggaagctctgtgaccctgagtcagattacaaccccggggaggagtatacatgtgggagcaactttgccattgtctatttcatcagtttttacatgctctgtgcatttctgatcatcaatctgtttgtggctgtcatcatggataatttcgactatctgacccgggactggtctattttggggcctcaccatttagatgaattcaaaagaatatggtcagaatatgaccctgaggcaaagggaaggataaaacaccttgatgtggtcactctgcttcgacgcatccagcctcccctggggtttgggaagttatgtccacacagggtagcgtgcaagagattagttgccatgaacatgcctctcaacagtgacgggacagtcatgtttaatgcaaccctgtttgctttggttcgaacggctcttaagatcaagaccgaagggaacctggagcaagctaatgaagaacttcgggctgtgataaagaaaatttggaagaaaaccagcatgaaattacttgaccaagttgtccctccagctggtgatgatgaggtaaccgtggggaagttctatgccactttcctgatacaggactactttaggaaattcaagaaacggaaagaacaaggactggtgggaaagtaccctgcgaagaacaccacaattgccctacaggcgggattaaggacactgcatgacattgggccagaaatccggcgtgctatatcgtgtgatttgcaagatgacgagcctgaggaaacaaaacgagaagaagaagatgatgtgttcaaaagaaatggtgccctgcttggaaaccatgtcaatcatgttaatagtgataggagagattcccttcagcagaccaataccacccaccgtcccctgcatgtccaaaggccttcaattccacctgcaagtgatactgagaaaccgctgtttcctccagcaggaaattcggtgtgtcataaccatcataaccataattccataggaaagcaagttcccacctcaacaaatgccaatctcaataatgccaatatgtccaaagctgcccatggaaagcggcccagcattgggaaccttgagcatgtgtctgaaaatgggcatcattcttcccacaagcatgaccgggagcctcagagaaggtccagtgtgaaaaggtccgactcaggagatgaacagctcccaactatttgccgggaagacccagagatacatggctatttcagggacccccactgcttgggggagcaggagtatttcagtagtgaggaatgctacgaggatgacagctcgcccacctggagcaggcaaaactatggctactacagcagatacccaggcagaaacatcgactctgagaggccccgaggctaccatcatccccaaggattcttggaggacgatgactcgcccgtttgctatgattcacggagatctccaaggagacgcctactacctcccaccccagcatcccaccggagatcctccttcaactttgagtgcctgcgccggcagagcagccaggaagaggtcccgtcgtctcccatcttcccccatcgcacggccctgcctctgcatctaatgcagcaacagatcatggcagttgccggcctagattcaagtaaagcccagaagtactcaccgagtcactcgacccggtcgtgggccacccctccagcaacccctccctaccgggactggacaccgtgctacacccccctgatccaagtggagcagtcagaggccctggaccaggtgaacggcagcctgccgtccctgcaccgcagctcctggtacacagacgagcccgacatctcctaccggactttcacaccagccagcctgactgtccccagcagcttccggaacaaaaacagcgacaagcagaggagtgcggacagcttggtggaggcagtcctgatatccgaaggcttgggacgctatgcaagggacccaaaatttgtgtcagcaacaaaacacgaaatcgctgatgcctgtgacctcaccatcgacgagatggagagtgcagccagcaccctgcttaatgggaacgtgcgtccccgagccaacggggatgtgggccccctctcacaccggcaggactatgagctacaggactttggtcctggctacagcgacgaagagccagaccctgggagggatgaggaggacctggcggatgaaatgatatgcatcaccaccttgtagcccccagcgaggggcagactggctctggcctcaggtggggcgcaggagagccaggggaaaagtgcctcatagttaggaaagtttaggcactagttgggagtaatattcaattaattagacttttgtataagagatgtcatgcctcaagaaagccataaacctggtaggaacaggtcccaagcggttgagcctggcagagtaccatgcgctcggccccagctgcaggaaacagcaggccccgccctctcacagaggatgggtgaggaggccagacctgccctgccccattgtccagatgggcactgctgtggagtctgcttctcccatgtaccagggcaccaggcccacccaactgaaggcatggcggcggggtgcaggggaaagttaaaggtgatgacgatcatcacacctcgtgtcgttacctcagccatcggtctagcatatcagtcactgggcccaacatatccatttttaaaccctttcccccaaatacaataaggttttctgtgatgtgacgccagtttacataagagaatatcactccgatggtcggtttctgactgtcacgctaagggcaactgtaaactggaataataatgcactcgcaaccaggtaaacttagatacactagtttgtttaaaattatagatttactgtacatgacttgtaatatactataatttgtatttgtaaagagatggtctatattttgtaattactgtattgtatttgaactgcagcaatatccatgggtcctaataattgtagttccccactaaaatctagaaattattagtatttttactcgggctatccagaagtagaagaaatagagccaattctcatttattcagcgaaaatcctctggggttaaaattttaagtttgaaagaacttgacactacagaaatttttctaaaatattttgagtcactataaacctatcatctttccacaagatataccagatgactatttgcagtcttttctttgggcaagagttccatgattttgatactgtacctttggatccaccatgggttgcaactgtctttggttttgtttgtttgacttgaaccaccctctggtaagtaagtgaattacagagcaggtccagctggctgctctgccccttgggtatccatagttacggttttctctgtggcccacccagggtgttttttgcatcgctggtgcagaaatgcacaggtggatgagatatagctgctcttgtcctctggggactggtggtgctgcttaagaaataaggggtgctggggacagaggagcaacgtggtgatctataggattggagtgtcggggtctgtacaaatcgtattgttgccttttacaaaactgctgtactgtatgttctctttgagggcttttatatgcaattgaatgagg

SEQ ID NO: 444885 - DNA, 1972 bp, Homo sapiens
  misc_feature (330)..(330): n is a, c, g, or t
  misc_feature (421)..(421): n is a, c, g, or t
  misc_feature (1269)..(1269): n is a, c, g, or t
gggcgagcgcctccgtccccggatgtgagctccggctgcccgcggtcccgagccagcggcgcgcgggcggcggcggcgggcaccgggcaccgcggcgggcgggcagacgggcgggcatggggggagcgccgagcggccccggcggccgggccggcatcaccgcggcgtctctccgctagaggaggggacaagccagttctcctttgcagcaaaaaattacatgtatatattattaagataatatatacattggattttatttttttaaaaagtttattttgctccatttttgaaaaagagagagcttgggtggcgagcggtttttttttnaaatcaattatccttattttctgttatttgtccccgtccctccccacccccctgctgaagcgagaataagggcagggaccgcggctcctanctcttggtgatccccttccccattccgcccccgcctcaacgcccagcacagtgccctgcacacagtagtcgctcaataaatgttcgtggatgatgatgatgatgatgatgaaaaaaatgcagcatcaacggcagcagcaagcggaccacgcgaacgaggcaaactatgcaagaggcaccagacttcctctttctggtgaaggaccaacttctcagccgaatagctccaagcaaactgtcctgtcttggcaagctgcaatcgatgctgctagacaggccaaggctgcccaaactatgagcacctctgcacccccacctgtaggatctctctcccaaagaaaacgtcagcaatacgccaagagcaaaaaacagggtaactcgtccaacagccgacctgcccgcgcccttttctgtttatcactcaataaccccatccgaagagcctgcattagtatagtggaatggaaaccatttgacatatttatattattggctatttttgccaattgtgtggccttagctatttacatcccattccctgaagatgattctaattcaacaaatcataacttggaaaaagtagaatatgccttcctgattatttttacagtcgagacatttttgaagattatagcgtatggattattgctacatcctaatgcttatgttaggaatggatggaatttactggattttgttatagtaatagtaggattgtttagtgtaattttggaacaattaaccaaagaaacagaaggcgggaaccactcaagcggcaaatctggaggctttgatgtcaaagccctccgtgcctttcgagtgttgcgaccacttcgactagtgtcaggngtgcccagtttacaagttgtcctgaactccattataaaagccatggttcccctccttcacatagcccttttggtattatttgtaatcataatctatgctattataggattggaactttttattggaaaaatgcacaaaacatgtttttttgctgactcagatatcgtagctgaagaggacccagctccatgtgcgttctcagggaatggacgccagtgtactgccaatggcacggaatgtaggagtggctgggttggcccgaacggaggcatcaccaactttgataactttgcctttgccatgcttactgtgtttcagtgcatcaccatggagggctggacagacgtgctctactgggtaaatgatgcgataggatgggaatggccatgggtgtattttgttagtctgatcatccttggctcatttttcgtccttaacctggttcttggtgtccttagtgggtaagcagtcggatccgtgttgcaccttctcctgctgccacgtgtgaggcaactctgcgtgtctcctagctgctccctgacagcttctctgcatgtgtttggactctgatgtcctctcagtgtgttgcttttggattgaactgtgattctttctgcctgtatctgtctgtgagattccgtgtttccaatgcttgccaaacactgttaatttaatgaaaacgttcccccaaagccagttgtgt

SEQ ID NO: 444886 - DNA, 887 bp, Homo sapiens
tttacttctgtagactgtccttttacaggtttttacttttgttttgttttgttttgttttgttttgtttgaaaagcagggctctggtactctagttttgctgtgtgagtataacacttgggacggtcacttactaccagcttcccgggatgcagaggtgtgtggcgttgccattgttggccgcacgtagttgcatttagtagtgtgttgtgcccttaaaaagttgaaattagatattctactgaatgtcttcttggccatcgctgtagacaatttggctgatgctgaaagtctgaacactgctcagaaagaagaagcggaagaaaaggagaggaaaaagattgccaggtaaccctattttcccctgacgtgtttgtccaggggctgtgttgggagccctgcaacagttgcagcctgccaggcttacccccgcatcacggcagctgcagcccccgggttgctgctttgtggatcatggttgaccatgcactgcagaccaaaacggatggaatcttgggcagaagccaggctcttggctgtcatccctcggggctgagagtgggagtcacgtgtccccatgcttaaagaatcactgcagttaattttggtgtcataaaataaatgatgcattcaatgctgattagctctcagatgagaattttaataagatggtctgtgtaatgaatccatcgcattgagattaccaggaagctctgagtttgggttgtgctaggctcttgtggttagtgttgtttctaattaaattctgtccttcattggagcattattgattcagaatcctgattagcatttttatacagagtaacatggttatttggtttcttgtgctcttttctcttctctttagaaaagagagcctagaaaata

SEQ ID NO: 444887 - DNA, 208 bp, Homo sapiens
atgatatctcagctgaaatgatggggagtgtgtgctcaagccctcggaaccagaatcttaacactttttgtctttctttcagtcaagccatctcaaaatccaaactcaggtcagtatcttctttctgtttcttcgtcagcctgtgtgttgcctttgtatgttctcacttctgaattttacgtagtattgctctggacttgagttttcc

SEQ ID NO: 444888 - DNA, 352 bp, Homo sapiens
ctggcagatcttttttgaatgagtgaagtgccaggtaccatgagaaaaccctagctggtaaagatcaaacctgagttagttctaaattcacatacggattttttttgcatgacgaaatctattctctttttcctgacaacttctccacctagatgtttgggaaagttgccatgagagataacaaccagatcaataggaacaataacttccagacgtttccccaggcggtgctgctgctcttcaggtgactgcaactggcttgggcggtgctcctgggcaggggggtccgctaggcgtgggtccagagggacggaggacacaggttattaaagcagtgtgcctttctcagttg

SEQ ID NO: 444889 - DNA, 8111 bp, Homo sapiens
  misc_feature (330)..(330): n is a, c, g, or t
  misc_feature (421)..(421): n is a, c, g, or t
  misc_feature (1269)..(1269): n is a, c, g, or t
  misc_feature (3636)..(3636): n is a, c, g, or t
  misc_feature (4437)..(4437): n is a, c, g, or t
gggcgagcgcctccgtccccggatgtgagctccggctgcccgcggtcccgagccagcggcgcgcgggcggcggcggcgggcaccgggcaccgcggcgggcgggcagacgggcgggcatggggggagcgccgagcggccccggcggccgggccggcatcaccgcggcgtctctccgctagaggaggggacaagccagttctcctttgcagcaaaaaattacatgtatatattattaagataatatatacattggattttatttttttaaaaagtttattttgctccatttttgaaaaagagagagcttgggtggcgagcggtttttttttnaaatcaattatccttattttctgttatttgtccccgtccctccccacccccctgctgaagcgagaataagggcagggaccgcggctcctanctcttggtgatccccttccccattccgcccccgcctcaacgcccagcacagtgccctgcacacagtagtcgctcaataaatgttcgtggatgatgatgatgatgatgatgaaaaaaatgcagcatcaacggcagcagcaagcggaccacgcgaacgaggcaaactatgcaagaggcaccagacttcctctttctggtgaaggaccaacttctcagccgaatagctccaagcaaactgtcctgtcttggcaagctgcaatcgatgctgctagacaggccaaggctgcccaaactatgagcacctctgcacccccacctgtaggatctctctcccaaagaaaacgtcagcaatacgccaagagcaaaaaacagggtaactcgtccaacagccgacctgcccgcgcccttttctgtttatcactcaataaccccatccgaagagcctgcattagtatagtggaatggaaaccatttgacatatttatattattggctatttttgccaattgtgtggccttagctatttacatcccattccctgaagatgattctaattcaacaaatcataacttggaaaaagtagaatatgccttcctgattatttttacagtcgagacatttttgaagattatagcgtatggattattgctacatcctaatgcttatgttaggaatggatggaatttactggattttgttatagtaatagtaggattgtttagtgtaattttggaacaattaaccaaagaaacagaaggcgggaaccactcaagcggcaaatctggaggctttgatgtcaaagccctccgtgcctttcgagtgttgcgaccacttcgactagtgtcaggngtgcccagtttacaagttgtcctgaactccattataaaagccatggttcccctccttcacatagcccttttggtattatttgtaatcataatctatgctattataggattggaactttttattggaaaaatgcacaaaacatgtttttttgctgactcagatatcgtagctgaagaggacccagctccatgtgcgttctcagggaatggacgccagtgtactgccaatggcacggaatgtaggagtggctgggttggcccgaacggaggcatcaccaactttgataactttgcctttgccatgcttactgtgtttcagtgcatcaccatggagggctggacagacgtgctctactgggtaaatgatgcgataggatgggaatggccatgggtgtattttgttagtctgatcatccttggctcatttttcgtccttaacctggttcttggtgtccttagtggagaattctcaaaggaaagagagaaggcaaaagcacggggagatttccagaagctccgggagaagcagcagctggaggaggatctaaagggctacttggattggatcacccaagctgaggacatcgatccggagaatgaggaagaaggaggagaggaaggcaaacgaaatactagcatgcccaccagcgagactgagtctgtgaacacagagaacgtcagcggtgaaggcgagaaccgaggctgctgtggaagtctctggtgctggtggagacggagaggcgcggccaaggcggggccctctgggtgtcggcggtggggtcaagccatctcaaaatccaaactcagccgacgctggcgtcgctggaaccgattcaatcgcagaagatgtagggccgccgtgaagtctgtcacgttttactggctggttatcgtcctggtgtttctgaacaccttaaccatttcctctgagcactacaatcagccagattggttgacacagattcaagatattgccaacaaagtcctcttggctctgttcacctgcgagatgctggtaaaaatgtacagcttgggcctccaagcatatttcgtctctcttttcaaccggtttgattgcttcgtggtgtgtggtggaatcactgagacgatcttggtggaactggaaatcatgtctcccctggggatctctgtgtttcggtgtgtgcgcctcttaagaatcttcaaagtgaccaggcactggacttccctgagcaacttagtggcatccttattaaactccatgaagtccatcgcttcgctgttgcttctgctttttctcttcattatcatcttttccttgcttgggatgcagctgtttggcggcaagtttaattttgatgaaacgcaaaccaagcggagcacctttgacaatttccctcaagcacttctcacagtgttccagatcctgacaggcgaagactggaatgctgtgatgtacgatggcatcatggcttacgggggcccatcctcttcaggaatgatcgtctgcatctacttcatcatcctcttcatttgtggtaactatattctactgaatgtcttcttggccatcgctgtagacaatttggctgatgctgaaagtctgaacactgctcagaaagaagaagcggaagaaaaggagaggaaaaagattgccagaaaagagagcctagaaaataaaaagaacaacaaaccagaagtcaaccagatagccaacagtgacaacaaggttacaattgatgactatagagaagaggatgaagacaaggacccctatccgccttgcgatgtgccagtaggggaagaggaagaggaagaggaggaggatgaacctgaggttcctgccggaccccgtcctcgaaggatctcggagttgaacatgaaggaaaaaattgcccccatccctgaagggagcgctttcttcattcttagcaagaccaacccgatccgcgtaggctgccacaagctcatcaaccaccacatcttcaccaacctcatccttgtcttcatcatgctgagcagcgctgccctggccgcagaggaccccatccgcagccactccttccggaacacgatactgggttactttgactatgccttcacagccatctttactgttgagatcctgttgaagatgacaacttttggagctttcctccacaaaggggccttctgcaggaactacttcaatttgctggatatgctggtggttggggtgtctctggtgtcatttgggattcaatccagtgccatctccgttgtgaagattctgagggtcttaagggtcctgcgtcccctcagggccatcaacagagcaaaaggacttaagcacgtggtccagtgcgtcttcgtggccatccggaccatcggcaacatcatgatcgtcacnaccctcctgcagttcatgtttgcctgtatcggggtccagttgttcaaggggaagttctatcgctgtacggatgaagccaaaagtaaccctgaagaatgcaggggacttttcatcctctacaaggatggggatgttgacagtcctgtggtccgtgaacggatctggcaaaacagtgatttcaacttcgacaacgtcctctctgctatgatggcgctcttcacagtctccacgtttgagggctggcctgcgttgctgtataaagccatcgactcgaatggagagaacatcggcccaatctacaaccaccgcgtggagatctccatcttcttcatcatctacatcatcattgtagctttcttcatgatgaacatctttgtgggctttgtcatcgttacatttcaggaacaaggagaaaaagagtataagaactgtgagctggacaaaaatcagcgtcagtgtgttgaatacgccttgaaagcacgtcccttgcggagatacatccccaaaaacccctaccagtacaagttctggtacgtggtgaactcttcgcctttcgaatacatgatgtttgtcctcatcatgctcaacacactctgcttggccatgcagcactacgagcagtccaagatgttcaatgatgccatggacattctgaacatggtcttcaccggggtgttcaccgtcgagatggttttgaaagtcatcgcatttaagcctaaggggtattttagtgacgcctggaacacgtttgactccctcatcgtaatcggcagcattatagacgtggccctcagcgaagcngacccaactgaaagtgaaaatgtccctgtcccaactgctacacctgggaactctgaagagagcaatagaatctccatcacctttttccgtcttttccgagtgatgcgattggtgaagcttctcagcaggggggaaggcatccggacattgctgtggacttttattaagtcctttcaggcgctcccgtatgtggccctcctcatagccatgctgttcttcatctatgcggtcattggcatgcagatgtttgggaaagttgccatgagagataacaaccagatcaataggaacaataacttccagacgtttccccaggcggtgctgctgctcttcaggtgtgcaacaggtgaggcctggcaggagatcatgctggcctgtctcccagggaagctctgtgaccctgagtcagattacaaccccggggaggagtatacatgtgggagcaactttgccattgtctatttcatcagtttttacatgctctgtgcatttctgatcatcaatctgtttgtggctgtcatcatggataatttcgactatctgacccgggactggtctattttggggcctcaccatttagatgaattcaaaagaatatggtcagaatatgaccctgaggcaaagggaaggataaaacaccttgatgtggtcactctgcttcgacgcatccagcctcccctggggtttgggaagttatgtccacacagggtagcgtgcaagagattagttgccatgaacatgcctctcaacagtgacgggacagtcatgtttaatgcaaccctgtttgctttggttcgaacggctcttaagatcaagaccgaagggaacctggagcaagctaatgaagaacttcgggctgtgataaagaaaatttggaagaaaaccagcatgaaattacttgaccaagttgtccctccagctggtgatgatgaggtaaccgtggggaagttctatgccactttcctgatacaggactactttaggaaattcaagaaacggaaagaacaaggactggtgggaaagtaccctgcgaagaacaccacaattgccctacaggcgggattaaggacactgcatgacattgggccagaaatccggcgtgctatatcgtgtgatttgcaagatgacgagcctgaggaaacaaaacgagaagaagaagatgatgtgttcaaaagaaatggtgccctgcttggaaaccatgtcaatcatgttaatagtgataggagagattcccttcagcagaccaataccacccaccgtcccctgcatgtccaaaggccttcaattccacctgcaagtgatactgagaaaccgctgtttcctccagcaggaaattcggtgtgtcataaccatcataaccataattccataggaaagcaagttcccacctcaacaaatgccaatctcaataatgccaatatgtccaaagctgcccatggaaagcggcccagcattgggaaccttgagcatgtgtctgaaaatgggcatcattcttcccacaagcatgaccgggagcctcagagaaggtccagtgtgaaaagaacccgctattatgaaacttacattaggtccgactcaggagatgaacagctcccaactatttgccgggaagacccagagatacatggctatttcagggacccccactgcttgggggagcaggagtatttcagtagtgaggaatgctacgaggatgacagctcgcccacctggagcaggcaaaactatggctactacagcagatacccaggcagaaacatcgactctgagaggccccgaggctaccatcatccccaaggattcttggaggacgatgactcgcccgtttgctatgattcacggagatctccaaggagacgcctactacctcccaccccagcatcccaccggagatcctccttcaactttgagtgcctgcgccggcagagcagccaggaagaggtcccgtcgtctcccatcttcccccatcgcacggccctgcctctgcatctaatgcagcaacagatcatggcagttgccggcctagattcaagtaaagcccagaagtactcaccgagtcactcgacccggtcgtgggccacccctccagcaacccctccctaccgggactggacaccgtgctacacccccctgatccaagtggagcagtcagaggccctggaccaggtgaacggcagcctgccgtccctgcaccgcagctcctggtacacagacgagcccgacatctcctaccggactttcacaccagccagcctgactgtccccagcagcttccggaacaaaaacagcgacaagcagaggagtgcggacagcttggtggaggcagtcctgatatccgaaggcttgggacgctatgcaagggacccaaaatttgtgtcagcaacaaaacacgaaatcgctgatgcctgtgacctcaccatcgacgagatggagagtgcagccagcaccctgcttaatgggaacgtgcgtccccgagccaacggggatgtgggccccctctcacaccggcaggactatgagctacaggactttggtcctggctacagcgacgaagagccagaccctgggagggatgaggaggacctggcggatgaaatgatatgcatcaccaccttgtagcccccagcgaggggcagactggctctggcctcaggtggggcgcaggagagccaggggaaaagtgcctcatagttaggaaagtttaggcactagttgggagtaatattcaattaattagacttttgtataagagatgtcatgcctcaagaaagccataaacctggtaggaacaggtcccaagcggttgagcctggcagagtaccatgcgctcggccccagctgcaggaaacagcaggccccgccctctcacagaggatgggtgaggaggccagacctgccctgccccattgtccagatgggcactgctgtggagtctgcttctcccatgtaccagggcaccaggcccacccaactgaaggcatggcggcggggtgcaggggaaagttaaaggtgatgacgatcatcacacctcgtgtcgttacctcagccatcggtctagcatatcagtcactgggcccaacatatccatttttaaaccctttcccccaaatacactgcgtcctggttcctgtttagctgttctgaaatacggtgtgtaagtaagtcagaacccagctaccagtgattattgcgagggcaatgggacctcataaataaggttttctgtgatgtgacgccagtttacataagagaatatcactccgatggtcggtttctgactgtcacgctaagggcaactgtaaactggaataataatgcactcgcaaccaggtaaacttagatacactagtttgtttaaaattatagatttactgtacatgacttgtaatatactataatttgtatttgtaaagagatggtctatattttgtaattactgtattgtatttgaactgcagcaatatccatgggtcctaataattgtagttccccactaaaatctagaaattattagtatttttactcgggctatccagaagtagaagaaatagagccaattctcatttattcagcgaaaatcctctggggttaaaattttaagtttgaaagaacttgacactacagaaatttttctaaaatattttgagtcactataaacctatcatctttccaca

SEQ ID NO: 444890 - DNA, 8534 bp, Homo sapiens
  misc_feature (330)..(330): n is a, c, g, or t
  misc_feature (421)..(421): n is a, c, g, or t
  misc_feature (1269)..(1269): n is a, c, g, or t
  misc_feature (3636)..(3636): n is a, c, g, or t
  misc_feature (4437)..(4437): n is a, c, g, or t
gggcgagcgcctccgtccccggatgtgagctccggctgcccgcggtcccgagccagcggcgcgcgggcggcggcggcgggcaccgggcaccgcggcgggcgggcagacgggcgggcatggggggagcgccgagcggccccggcggccgggccggcatcaccgcggcgtctctccgctagaggaggggacaagccagttctcctttgcagcaaaaaattacatgtatatattattaagataatatatacattggattttatttttttaaaaagtttattttgctccatttttgaaaaagagagagcttgggtggcgagcggtttttttttnaaatcaattatccttattttctgttatttgtccccgtccctccccacccccctgctgaagcgagaataagggcagggaccgcggctcctanctcttggtgatccccttccccattccgcccccgcctcaacgcccagcacagtgccctgcacacagtagtcgctcaataaatgttcgtggatgatgatgatgatgatgatgaaaaaaatgcagcatcaacggcagcagcaagcggaccacgcgaacgaggcaaactatgcaagaggcaccagacttcctctttctggtgaaggaccaacttctcagccgaatagctccaagcaaactgtcctgtcttggcaagctgcaatcgatgctgctagacaggccaaggctgcccaaactatgagcacctctgcacccccacctgtaggatctctctcccaaagaaaacgtcagcaatacgccaagagcaaaaaacagggtaactcgtccaacagccgacctgcccgcgcccttttctgtttatcactcaataaccccatccgaagagcctgcattagtatagtggaatggaaaccatttgacatatttatattattggctatttttgccaattgtgtggccttagctatttacatcccattccctgaagatgattctaattcaacaaatcataacttggaaaaagtagaatatgccttcctgattatttttacagtcgagacatttttgaagattatagcgtatggattattgctacatcctaatgcttatgttaggaatggatggaatttactggattttgttatagtaatagtaggattgtttagtgtaattttggaacaattaaccaaagaaacagaaggcgggaaccactcaagcggcaaatctggaggctttgatgtcaaagccctccgtgcctttcgagtgttgcgaccacttcgactagtgtcaggngtgcccagtttacaagttgtcctgaactccattataaaagccatggttcccctccttcacatagcccttttggtattatttgtaatcataatctatgctattataggattggaactttttattggaaaaatgcacaaaacatgtttttttgctgactcagatatcgtagctgaagaggacccagctccatgtgcgttctcagggaatggacgccagtgtactgccaatggcacggaatgtaggagtggctgggttggcccgaacggaggcatcaccaactttgataactttgcctttgccatgcttactgtgtttcagtgcatcaccatggagggctggacagacgtgctctactgggtaaatgatgcgataggatgggaatggccatgggtgtattttgttagtctgatcatccttggctcatttttcgtccttaacctggttcttggtgtccttagtggagaattctcaaaggaaagagagaaggcaaaagcacggggagatttccagaagctccgggagaagcagcagctggaggaggatctaaagggctacttggattggatcacccaagctgaggacatcgatccggagaatgaggaagaaggaggagaggaaggcaaacgaaatactagcatgcccaccagcgagactgagtctgtgaacacagagaacgtcagcggtgaaggcgagaaccgaggctgctgtggaagtctctggtgctggtggagacggagaggcgcggccaaggcggggccctctgggtgtcggcggtggggtcaagccatctcaaaatccaaactcagccgacgctggcgtcgctggaaccgattcaatcgcagaagatgtagggccgccgtgaagtctgtcacgttttactggctggttatcgtcctggtgtttctgaacaccttaaccatttcctctgagcactacaatcagccagattggttgacacagattcaagatattgccaacaaagtcctcttggctctgttcacctgcgagatgctggtaaaaatgtacagcttgggcctccaagcatatttcgtctctcttttcaaccggtttgattgcttcgtggtgtgtggtggaatcactgagacgatcttggtggaactggaaatcatgtctcccctggggatctctgtgtttcggtgtgtgcgcctcttaagaatcttcaaagtgaccaggcactggacttccctgagcaacttagtggcatccttattaaactccatgaagtccatcgcttcgctgttgcttctgctttttctcttcattatcatcttttccttgcttgggatgcagctgtttggcggcaagtttaattttgatgaaacgcaaaccaagcggagcacctttgacaatttccctcaagcacttctcacagtgttccagatcctgacaggcgaagactggaatgctgtgatgtacgatggcatcatggcttacgggggcccatcctcttcaggaatgatcgtctgcatctacttcatcatcctcttcatttgtggtaactatattctactgaatgtcttcttggccatcgctgtagacaatttggctgatgctgaaagtctgaacactgctcagaaagaagaagcggaagaaaaggagaggaaaaagattgccagaaaagagagcctagaaaataaaaagaacaacaaaccagaagtcaaccagatagccaacagtgacaacaaggttacaattgatgactatagagaagaggatgaagacaaggacccctatccgccttgcgatgtgccagtaggggaagaggaagaggaagaggaggaggatgaacctgaggttcctgccggaccccgtcctcgaaggatctcggagttgaacatgaaggaaaaaattgcccccatccctgaagggagcgctttcttcattcttagcaagaccaacccgatccgcgtaggctgccacaagctcatcaaccaccacatcttcaccaacctcatccttgtcttcatcatgctgagcagcgctgccctggccgcagaggaccccatccgcagccactccttccggaacacgatactgggttactttgactatgccttcacagccatctttactgttgagatcctgttgaagatgacaacttttggagctttcctccacaaaggggccttctgcaggaactacttcaatttgctggatatgctggtggttggggtgtctctggtgtcatttgggattcaatccagtgccatctccgttgtgaagattctgagggtcttaagggtcctgcgtcccctcagggccatcaacagagcaaaaggacttaagcacgtggtccagtgcgtcttcgtggccatccggaccatcggcaacatcatgatcgtcacnaccctcctgcagttcatgtttgcctgtatcggggtccagttgttcaaggggaagttctatcgctgtacggatgaagccaaaagtaaccctgaagaatgcaggggacttttcatcctctacaaggatggggatgttgacagtcctgtggtccgtgaacggatctggcaaaacagtgatttcaacttcgacaacgtcctctctgctatgatggcgctcttcacagtctccacgtttgagggctggcctgcgttgctgtataaagccatcgactcgaatggagagaacatcggcccaatctacaaccaccgcgtggagatctccatcttcttcatcatctacatcatcattgtagctttcttcatgatgaacatctttgtgggctttgtcatcgttacatttcaggaacaaggagaaaaagagtataagaactgtgagctggacaaaaatcagcgtcagtgtgttgaatacgccttgaaagcacgtcccttgcggagatacatccccaaaaacccctaccagtacaagttctggtacgtggtgaactcttcgcctttcgaatacatgatgtttgtcctcatcatgctcaacacactctgcttggccatgcagcactacgagcagtccaagatgttcaatgatgccatggacattctgaacatggtcttcaccggggtgttcaccgtcgagatggttttgaaagtcatcgcatttaagcctaaggggtattttagtgacgcctggaacacgtttgactccctcatcgtaatcggcagcattatagacgtggccctcagcgaagcngacccaactgaaagtgaaaatgtccctgtcccaactgctacacctgggaactctgaagagagcaatagaatctccatcacctttttccgtcttttccgagtgatgcgattggtgaagcttctcagcaggggggaaggcatccggacattgctgtggacttttattaagtcctttcaggcgctcccgtatgtggccctcctcatagccatgctgttcttcatctatgcggtcattggcatgcagatgtttgggaaagttgccatgagagataacaaccagatcaataggaacaataacttccagacgtttccccaggcggtgctgctgctcttcaggtgtgcaacaggtgaggcctggcaggagatcatgctggcctgtctcccagggaagctctgtgaccctgagtcagattacaaccccggggaggagtatacatgtgggagcaactttgccattgtctatttcatcagtttttacatgctctgtgcatttctgatcatcaatctgtttgtggctgtcatcatggataatttcgactatctgacccgggactggtctattttggggcctcaccatttagatgaattcaaaagaatatggtcagaatatgaccctgaggcaaagggaaggataaaacaccttgatgtggtcactctgcttcgacgcatccagcctcccctggggtttgggaagttatgtccacacagggtagcgtgcaagagattagttgccatgaacatgcctctcaacagtgacgggacagtcatgtttaatgcaaccctgtttgctttggttcgaacggctcttaagatcaagaccgaagggaacctggagcaagctaatgaagaacttcgggctgtgataaagaaaatttggaagaaaaccagcatgaaattacttgaccaagttgtccctccagctggtgatgatgaggtaaccgtggggaagttctatgccactttcctgatacaggactactttaggaaattcaagaaacggaaagaacaaggactggtgggaaagtaccctgcgaagaacaccacaattgccctacaggcgggattaaggacactgcatgacattgggccagaaatccggcgtgctatatcgtgtgatttgcaagatgacgagcctgaggaaacaaaacgagaagaagaagatgatgtgttcaaaagaaatggtgccctgcttggaaaccatgtcaatcatgttaatagtgataggagagattcccttcagcagaccaataccacccaccgtcccctgcatgtccaaaggccttcaattccacctgcaagtgatactgagaaaccgctgtttcctccagcaggaaattcggtgtgtcataaccatcataaccataattccataggaaagcaagttcccacctcaacaaatgccaatctcaataatgccaatatgtccaaagctgcccatggaaagcggcccagcattgggaaccttgagcatgtgtctgaaaatgggcatcattcttcccacaagcatgaccgggagcctcagagaaggtccagtgtgaaaaggtccgactcaggagatgaacagctcccaactatttgccgggaagacccagagatacatggctatttcagggacccccactgcttgggggagcaggagtatttcagtagtgaggaatgctacgaggatgacagctcgcccacctggagcaggcaaaactatggctactacagcagatacccaggcagaaacatcgactctgagaggccccgaggctaccatcatccccaaggattcttggaggacgatgactcgcccgtttgctatgattcacggagatctccaaggagacgcctactacctcccaccccagcatcccaccggagatcctccttcaactttgagtgcctgcgccggcagagcagccaggaagaggtcccgtcgtctcccatcttcccccatcgcacggccctgcctctgcatctaatgcagcaacagatcatggcagttgccggcctagattcaagtaaagcccagaagtactcaccgagtcactcgacccggtcgtgggccacccctccagcaacccctccctaccgggactggacaccgtgctacacccccctgatccaagtggagcagtcagaggccctggaccaggtgaacggcagcctgccgtccctgcaccgcagctcctggtacacagacgagcccgacatctcctaccggactttcacaccagccagcctgactgtccccagcagcttccggaacaaaaacagcgacaagcagaggagtgcggacagcttggtggaggcagtcctgatatccgaaggcttgggacgctatgcaagggacccaaaatttgtgtcagcaacaaaacacgaaatcgctgatgcctgtgacctcaccatcgacgagatggagagtgcagccagcaccctgcttaatgggaacgtgcgtccccgagccaacggggatgtgggccccctctcacaccggcaggactatgagctacaggactttggtcctggctacagcgacgaagagccagaccctgggagggatgaggaggacctggcggatgaaatgatatgcatcaccaccttgtagcccccagcgaggggcagactggctctggcctcaggtggggcgcaggagagccaggggaaaagtgcctcatagttaggaaagtttaggcactagttgggagtaatattcaattaattagacttttgtataagagatgtcatgcctcaagaaagccataaacctggtaggaacaggtcccaagcggttgagcctggcagagtaccatgcgctcggccccagctgcaggaaacagcaggccccgccctctcacagaggatgggtgaggaggccagacctgccctgccccattgtccagatgggcactgctgtggagtctgcttctcccatgtaccagggcaccaggcccacccaactgaaggcatggcggcggggtgcaggggaaagttaaaggtgatgacgatcatcacacctcgtgtcgttacctcagccatcggtctagcatatcagtcactgggcccaacatatccatttttaaaccctttcccccaaatacactgcgtcctggttcctgtttagctgttctgaaatacggtgtgtaagtaagtcagaacccagctaccagtgattattgcgagggcaatgggacctcataaataaggttttctgtgatgtgacgccagtttacataagagaatatcactccgatggtcggtttctgactgtcacgctaagggcaactgtaaactggaataataatgcactcgcaaccaggtaaacttagatacactagtttgtttaaaattatagatttactgtacatgacttgtaatatactataatttgtatttgtaaagagatggtctatattttgtaattactgtattgtatttgaactgcagcaatatccatgggtcctaataattgtagttccccactaaaatctagaaattattagtatttttactcgggctatccagaagtagaagaaatagagccaattctcatttattcagcgaaaatcctctggggttaaaattttaagtttgaaagaacttgacactacagaaatttttctaaaatattttgagtcactataaacctatcatctttccacaagatataccagatgactatttgcagtcttttctttgggcaagagttccatgattttgatactgtacctttggatccaccatgggttgcaactgtctttggttttgtttgtttgacttgaaccaccctctggtaagtaagtgaattacagagcaggtccagctggctgctctgccccttgggtatccatagttacggttttctctgtggcccacccagggtgttttttgcatcgctggtgcagaaatgcacaggtggatgagatatagctgctcttgtcctctggggactggtggtgctgcttaagaaataaggggtgctggggacagaggagcaacgtggtgatctataggattggagtgtcggggtctgtacaaatcgtattgttgccttttacaaaactgctgtactgtatgttctctttgagggcttttatatgcaattgaatgagg

SEQ ID NO: 444891 - DNA, 2170 bp, Homo sapiens
  misc_feature (330)..(330): n is a, c, g, or t
  misc_feature (421)..(421): n is a, c, g, or t
  misc_feature (1269)..(1269): n is a, c, g, or t
gggcgagcgcctccgtccccggatgtgagctccggctgcccgcggtcccgagccagcggcgcgcgggcggcggcggcgggcaccgggcaccgcggcgggcgggcagacgggcgggcatggggggagcgccgagcggccccggcggccgggccggcatcaccgcggcgtctctccgctagaggaggggacaagccagttctcctttgcagcaaaaaattacatgtatatattattaagataatatatacattggattttatttttttaaaaagtttattttgctccatttttgaaaaagagagagcttgggtggcgagcggtttttttttnaaatcaattatccttattttctgttatttgtccccgtccctccccacccccctgctgaagcgagaataagggcagggaccgcggctcctanctcttggtgatccccttccccattccgcccccgcctcaacgcccagcacagtgccctgcacacagtagtcgctcaataaatgttcgtggatgatgatgatgatgatgatgaaaaaaatgcagcatcaacggcagcagcaagcggaccacgcgaacgaggcaaactatgcaagaggcaccagacttcctctttctggtgaaggaccaacttctcagccgaatagctccaagcaaactgtcctgtcttggcaagctgcaatcgatgctgctagacaggccaaggctgcccaaactatgagcacctctgcacccccacctgtaggatctctctcccaaagaaaacgtcagcaatacgccaagagcaaaaaacagggtaactcgtccaacagccgacctgcccgcgcccttttctgtttatcactcaataaccccatccgaagagcctgcattagtatagtggaatggaaaccatttgacatatttatattattggctatttttgccaattgtgtggccttagctatttacatcccattccctgaagatgattctaattcaacaaatcataacttggaaaaagtagaatatgccttcctgattatttttacagtcgagacatttttgaagattatagcgtatggattattgctacatcctaatgcttatgttaggaatggatggaatttactggattttgttatagtaatagtaggattgtttagtgtaattttggaacaattaaccaaagaaacagaaggcgggaaccactcaagcggcaaatctggaggctttgatgtcaaagccctccgtgcctttcgagtgttgcgaccacttcgactagtgtcaggngtgcccagtttacaagttgtcctgaactccattataaaagccatggttcccctccttcacatagcccttttggtattatttgtaatcataatctatgctattataggattggaactttttattggaaaaatgcacaaaacatgtttttttgctgactcagatatcgtagctgaagaggacccagctccatgtgcgttctcagggaatggacgccagtgtactgccaatggcacggaatgtaggagtggctgggttggcccgaacggaggcatcaccaactttgataactttgcctttgccatgcttactgtgtttcagtgcatcaccatggagggctggacagacgtgctctactggatgaatgatgctatgggatttgaattgccctgggtgtattttgtcagtctcgtcatctttgggtcatttttcgtactaaatcttgtacttggtgtattgagcgggtaagctacacctctttcatcttgaaagcagagtcctgaggacagttgccaagaccacacaagctttgctggatgagggccgccaagaggggttgccagacattttatgtgtcctctgagatgctttcttttctgctgaggcttcccaaatcaagctgtttcctggaacctcaccaggcttcatgaaggagaactatagaacgattattgaccagaaattaatcagcattgttgcttgagatttaaacaatttccatagcatgccctttttttgtctgttctaaagtgagatacatttataattgctttatttgtctggatccaaatataatgcagattaattgttataaaacgatagcaaaatgagctggattgggtgggcttttggtagtccccatttgtagatttcagccgctgagcttgtccttatttgcagaaaa

SEQ ID NO: 444892 - DNA, 2186 bp, Homo sapiens
tctttggcttttttggcggagctggggcgccctccggaagcgtttccaactttccagaagtttctcgggacgggcaggagggggtggggactgccatatatagatcccgggagcaggggagcgggctaagagtagaatcgtgtcgcggctcgagagcgagagtcacgtcccggcgctagcccagcccgacccaggcccaccgtggtgcacgcaaaccacttcctggccatgcgctccctcctgcttctcagcgccttctgcctcctggaggcggccctggccgccgaggtgaagaaacctgcagccgcagcagctcctggcactgcggagaagttgagccccaaggcggccacgcttgccgagcgcagcgccggcctggccttcagcttgtaccaggccatggccaaggaccaggcagtggagaacatcctggtgtcacccgtggtggtggcctcgtcgctggggctcgtgtcgctgggcggcaaggcgaccacggcgtcgcaggccaaggcagtgctgagcgccgagcagctgcgcgacgaggaggtgcacgccggcctgggcgagctgctgcgctcactcagcaactccacggcgcgcaacgtgacctggaagctgggcagccgactgtacggacccagctcagtgagcttcgctgatgacttcgtgcgcagcagcaagcagcactacaactgcgagcactccaagatcaacttccgcgacaagcgcagcgcgctgcagtccatcaacgagtgggccgcgcagaccaccgacggcaagctgcccgaggtcaccaaggacgtggagcgcacggacggcgccctgttagtcaacgccatgttcttcaagccacactgggatgagaaattccaccacaagatggtggacaaccgtggcttcatggtgactcggtcctataccgtgggtgtcatgatgatgcaccggacaggcctctacaactactacgacgacgagaaggaaaagctgcaaatcgtggagatgcccctggcccacaagctctccagcctcatcatcctcatgccccatcacgtggagcctctcgagcgccttgaaaagctgctaaccaaagagcagctgaagatctggatggggaagatgcagaagaaggctgttgccatctccttgcccaagggtgtggtggaggtgacccatgacctgcagaaacacctggctgggctgggcctgactgaggccattgacaagaacaaggccgacttgtcacgcatgtcaggcaagaaggacctgtacctggcccagcgtgttccacgccaccgcctttgagttggacacagatggcaacccctttgaccaggacatctacgggcgcgaggagctgcgcagccccaagctgttctacgccgaccaccccttcatcttcctagtgcgggacacccaaagcggctccctgctattcattgggcgcctggtccggcctaagggtgacaagatgcgagacgagttatagggcctcagggtgcacacaggatggcaggaggcatccaaaggctcctgagacacatgggtgctattggggttgggggggaggtgaggtaccagccttggatactccatggggtgggggtggaaaagcagaccggggttcccgtgtgcctgagcggaccttcccagctagaattcactccacttggacatgggccccagataccatgatgctgagcccggaaactccacatcctgtgggacctgggccatagtcattctgcctgccctgaaagtcccagatcaagcctgcctcaatcagtattcatatttatagccaggtaccttctcacctgtgagaccaaattgagctaggggggtcagccagccctcttctgacactaaaacacctcagctgcctccccagctctatcccaacctctcccaactataaaactaggtgctgcagcccctgggaccaggcacccccagaatgacctggccgcagtgaggcggattgagaaggagctcccaggaggggcttctgggcagactctggtcaagaagcatcgtgtctggcgttgtggggatgaactttttgttttgtttcttccttttttagttcttcaaagatagggagggaagggggaacatgagcctttgttgctatcaatccaagaacttatttgtacattttttttttcaataaaacttttccaatgaca

SEQ ID NO: 444893 - DNA, 476 bp, Homo sapiens
tccccctccctccctgcctcctccccaccgcactctccgccccccccacctccccactcactgagttccagagtattcatatttatagccaggtaccttctcacctgtgagaccaaattgagctaggggggtcagccagccctcttctgacactaaaacacctcagctgcctccccagctctatcccaacctctcccaactataaaactaggtgctgcagcccctgggaccaggcacccccagaatgacctggccgcagtgaggcggattgagaaggagctcccaggaggggcttctgggcagactctggtcaagaagcatcgtgtctggcgttgtggggatgaactttttgttttgtttcttccttttttagttcttcaaagatagggagggaagggggaacatgagcctttgttgctatcaatccaagaacttatttgtacattttttttttcaataaaacttttccaatgaca

SEQ ID NO: 444894 - DNA, 2547 bp, Homo sapiens
tctttggcttttttggcggagctggggcgccctccggaagcgtttccaactttccagaagtttctcgggacgggcaggagggggtggggactgccatatatagatcccgggagcaggggagcgggctaagagtagaatcgtgtcgcggctcgagagcgagagtcacgtcccggcgctagcccagcccgacccaggcccaccgtggtgcacgcaaaccacttcctggccatgcgctccctcctgcttctcagcgccttctgcctcctggaggcggccctggccgccgaggtgaagaaacctgcagccgcagcagctcctggcactgcggagaagttgagccccaaggcggccacgcttgccgagcgcagcgccggcctggccttcagcttgtaccaggccatggccaaggaccaggcagtggagaacatcctggtgtcacccgtggtggtggcctcgtcgctggggctcgtgtcgctgggcggcaaggcgaccacggcgtcgcaggccaaggcagtgctgagcgccgagcagctgcgcgacgaggaggtgcacgccggcctgggcgagctgctgcgctcactcagcaactccacggcgcgcaacgtgacctggaagctgggcagccgactgtacggacccagctcagtgagcttcgctgatgacttcgtgcgcagcagcaagcagcactacaactgcgagcactccaagatcaacttccgcgacaagcgcagcgcgctgcagtccatcaacgagtgggccgcgcagaccaccgacggcaagctgcccgaggtcaccaaggacgtggagcgcacggacggcgccctgttagtcaacgccatgttcttcaagccacactgggatgagaaattccaccacaagatggtggacaaccgtggcttcatggtgactcggtcctataccgtgggtgtcatgatgatgcaccggacaggcctctacaactactacgacgacgagaaggaaaagctgcaaatcgtggagatgcccctggcccacaagctctccagcctcatcatcctcatgccccatcacgtggagcctctcgagcgccttgaaaagctgctaaccaaagagcagctgaagatctggatggggaagatgcagaagaaggctgttgccatctccttgcccaagggtgtggtggaggtgacccatgacctgcagaaacacctggctgggctgggcctgactgaggccattgacaagaacaaggccgacttgtcacgcatgtcaggcaagaaggacctgtacctggcccagcgtgttccacgccaccgcctttgagttggacacagatggcaacccctttgaccaggacatctacgggcgcgaggagctgcgcagccccaagctgttctacgccgaccaccccttcatcttcctagtgcgggacacccaaagcggctccctgctattcattgggcgcctggtccggcctaagggtgacaagatgcgagacgagttatagggcctcagggtgcacacaggatggcaggaggcatccaaaggctcctgagacacatgggtgctattggggttgggggggaggtgaggtaccagccttggatactccatggggtgggggtggaaaagcagaccggggttcccgtgtgcctgagcggaccttcccagctagaattcactccacttggacatgggccccagataccatgatgctgagcccggaaactccacatcctgtgggacctgggccatagtcattctgcctgccctgaaagtcccagatcaagcctgcctcaatcagtattcatatttatagccaggtaccttctcacctgtgagaccaaattgagctaggggggtcagccagccctcttctgacactaaaacacctcagctgcctccccagctctatcccaacctctcccaactataaaactaggtgctgcagcccctgggaccaggcacccccagaatgacctggccgcagtgaggcggattgagaaggagctcccaggaggggcttctgggcagactctggtcaagaagcatcgtgtctggcgttgtggggatgaactttttgttttgtttcttccttttttagttcttcaaagatagggagggaagggggaacatgagcctttgttgctatcaatccaagaacttatttgtacattttttttttcaataaaacttttccaatgacaaacaccaacaaacaaaaaaaaaacccgcgggggccttctatgcgccggggcggccgggaaacaagcgggtaattgaaatgggcccatgggtccttcagcggtttccgggaccccaggtttcttggtccacaggtggtacgaaccgggccggggccccctaataggggcgtcgattaaattcgaataagcccgggtaacctggtagatactcgcgagaacaccacggaaacaaaaacgagcgagcaagaacgacaacattcgtcaacaaacggtcgacaccagaacacagagtaaagtactcaacaacatgagataagagagaaagaatgacaaaccagaaaggcagcagactacaaacata

SEQ ID NO: 444895 - DNA, 2208 bp, Homo sapiens
tctttggcttttttggcggagctggggcgccctccggaagcgtttccaactttccagaagtttctcgggacgggcaggagggggtggggactgccatatatagatcccgggagcaggggagcgggctaagagtagaatcgtgtcgcggctcgagagcgagagtcacgtcccggcgctagcccagcccgacccaggcccaccgtggtgcacgcaaaccacttcctggccatgcgctccctcctgcttctcagcgccttctgcctcctggaggcggccctggccgccgaggtgaagaaacctgcagccgcagcagctcctggcactgcggagaagttgagccccaaggcggccacgcttgccgagcgcagcgccggcctggccttcagcttgtaccaggccatggccaaggaccaggcagtggagaacatcctggtgtcacccgtggtggtggcctcgtcgctggggctcgtgtcgctgggcggcaaggcgaccacggcgtcgcaggccaaggcagtgctgagcgccgagcagctgcgcgacgaggaggtgcacgccggcctgggcgagctgctgcgctcactcagcaactccacggcgcgcaacgtgacctggaagctgggcagccgactgtacggacccagctcagtgagcttcgctgatgacttcgtgcgcagcagcaagcagcactacaactgcgagcactccaagatcaacttccgcgacaagcgcagcgcgctgcagtccatcaacgagtgggccgcgcagaccaccgacggcaagctgcccgaggtcaccaaggacgtggagcgcacggacggcgccctgttagtcaacgccatgttcttcaagccacactgggatgagaaattccaccacaagatggtggacaaccgtggcttcatggtgactcggtcctataccgtgggtgtcatgatgatgcaccggacaggcctctacaactactacgacgacgagaaggaaaagctgcaaatcgtggagatgcccctggcccacaagctctccagcctcatcatcctcatgccccatcacgtggagcctctcgagcgccttgaaaagctgctaaccaaagagcagctgaagatctggatggggaagatgcagaagaaggctgttgccatctccttgcccaagggtgtggtggaggtgacccatgacctgcagaaacacctggctgggctgggcctgactgaggccattgacaagaacaaggccgacttgtcacgcatgtcaggcaagaaggacctgtacctggcccagcgtgttccacgccaccgcctttgagttggacacagatggcaacccctttgaccaggacatctacgggcgcgaggagctgcgcagccccaagctgttctacgccgaccaccccttcatcttcctagtgcgggacacccaaagcggctccctgctattcattgggcgcctggtccggcctaagggtgacaagatgcgagacgagttatagggcctcagggtgcacacaggatggcaggaggcatccaaaggctcctgagacacatgggtgctattggggttgggggggaggtgaggtaccagccttggatactccatggggtgggggtggaaaagcagaccggggttcccgtgtgcctgagcggaccttcccagctagaattcactccacttggacatgggccccagataccatgatgctgagcccggaaactccacatcctgtgggacctgggccatagtcattctgcctgccctgaaagtcccagatcaagcctgcctcaatcagtattcatatttatagccaggtaccttctcacctgtgagaccaaattgagctaggggggtcagccagccctcttctgacactaaaacacctcagctgcctccccagctctatcccaacctctcccaactataaaactaggtgctgcagcccctgggaccaggcacccccagaatgacctggccgcagtgaggcggattgagaaggagctcccaggaggggcttctgggcagactctggtcaagaagcatcgtgtctggcgttgtggggatgaactttttgttttgtttcttccttttttagttcttcaaagatagggagggaagggggaacatgagcctttgttgctatcaatccaagaacttatttgtacattttttttttcaataaaacttttccaatgacattttgttggagcgtggaaaaaa

SEQ ID NO: 444896 - DNA, 2058 bp, Homo sapiens
tctttggcttttttggcggagctggggcgccctccggaagcgtttccaactttccagaagtttctcgggacgggcaggagggggtggggactgccatatatagatcccgggagcaggggagcgggctaagagtagaatcgtgtcgcggctcgagagcgagagtcacgtcccggcgctagcccagcccgacccaggcccaccgtggtgcacgcaaaccacttcctggccatgcgctccctcctgcttctcagcgccttctgcctcctggaggcggccctggccgccgaggtgaagaaacctgcagccgcagcagctcctggcactgcggagaagttgagccccaaggcggccacgcttgccgagcgcagcgccggcctggccttcagcttgtaccaggccatggccaaggaccaggcagtggagaacatcctggtgtcacccgtggtggtggcctcgtcgctggggctcgtgtcgctgggcggcaaggcgaccacggcgtcgcaggccaaggcagtgctgagcgccgagcagctgcgcgacgaggaggtgcacgccggcctgggcgagctgctgcgctcactcagcaactccacggcgcgcaacgtgacctggaagctgggcagccgactgtacggacccagctcagtgagcttcgctgatgacttcgtgcgcagcagcaagcagcactacaactgcgagcactccaagatcaacttccgcgacaagcgcagcgcgctgcagtccatcaacgagtgggccgcgcagaccaccgacggcaagctgcccgaggtcaccaaggacgtggagcgcacggacggcgccctgttagtcaacgccatgttcttcaagccacactgggatgagaaattccaccacaagatggtggacaaccgtggcttcatggtgactcggtcctataccgtgggtgtcatgatgatgcaccggacaggcctctacaactactacgacgacgagaaggaaaagctgcaaatcgtggagatgcccctggcccacaagctctccagcctcatcatcctcatgccccatcacgtggagcctctcgagcgccttgaaaagctgctaaccaaagagcagctgaagatctggatggggaagatgcagaagaaggctgttgccatctccttgcccaagggtgtggtggaggtgacccatgacctgcagaaacacctggctgggctgggcctgactgaggccattgacaagaacaaggccgacttgtcacgcatgtcaggcaagaaggacctgtacctggcccagcgtgttccacgccaccgcctttgagttggacacagatggcaacccctttgaccaggacatctacgggcgcgaggagctgcgcagccccaagctgttctacgccgaccaccccttcatcttcctagtgcgggacacccaaagcggctccctgctattcattgggcgcctggtccggcctaagggtgacaagatgcgagacgagttatagggcctcagggtgcacacaggatggcaggaggcatccaaaggattcactccacttggacatgggccccagataccatgatgctgagcccggaaactccacatcctgtgggacctgggccatagtcattctgcctgccctgaaagtcccagatcaagcctgcctcaatcagtattcatatttatagccaggtaccttctcacctgtgagaccaaattgagctaggggggtcagccagccctcttctgacactaaaacacctcagctgcctccccagctctatcccaacctctcccaactataaaactaggtgctgcagcccctgggaccaggcacccccagaatgacctggccgcagtgaggcggattgagaaggagctcccaggaggggcttctgggcagactctggtcaagaagcatcgtgtctggcgttgtggggatgaactttttgttttgtttcttccttttttagttcttcaaagatagggagggaagggggaacatgagcctttgttgctatcaatccaagaacttatttgtacattttttttttcaataaaacttttccaatgaca

SEQ ID NO: 444897 - DNA, 2121 bp, Homo sapiens
cgggactcccagcagagattttttttttgtactggctgtgtaacaggacaccgcatgcagccctcaggaggggctctgtgcttctaatgaaaaaggcaggcattgacctccctctgaggcagtttccaggcccaccgtggtgcacgcaaaccacttcctggccatgcgctccctcctgcttctcagcgccttctgcctcctggaggcggccctggccgccgaggtgaagaaacctgcagccgcagcagctcctggcactgcggagaagttgagccccaaggcggccacgcttgccgagcgcagcgccggcctggccttcagcttgtaccaggccatggccaaggaccaggcagtggagaacatcctggtgtcacccgtggtggtggcctcgtcgctggggctcgtgtcgctgggcggcaaggcgaccacggcgtcgcaggccaaggcagtgctgagcgccgagcagctgcgcgacgaggaggtgcacgccggcctgggcgagctgctgcgctcactcagcaactccacggcgcgcaacgtgacctggaagctgggcagccgactgtacggacccagctcagtgagcttcgctgatgacttcgtgcgcagcagcaagcagcactacaactgcgagcactccaagatcaacttccgcgacaagcgcagcgcgctgcagtccatcaacgagtgggccgcgcagaccaccgacggcaagctgcccgaggtcaccaaggacgtggagcgcacggacggcgccctgttagtcaacgccatgttcttcaagccacactgggatgagaaattccaccacaagatggtggacaaccgtggcttcatggtgactcggtcctataccgtgggtgtcatgatgatgcaccggacaggcctctacaactactacgacgacgagaaggaaaagctgcaaatcgtggagatgcccctggcccacaagctctccagcctcatcatcctcatgccccatcacgtggagcctctcgagcgccttgaaaagctgctaaccaaagagcagctgaagatctggatggggaagatgcagaagaaggctgttgccatctccttgcccaagggtgtggtggaggtgacccatgacctgcagaaacacctggctgggctgggcctgactgaggccattgacaagaacaaggccgacttgtcacgcatgtcaggcaagaaggacctgtacctggcccagcgtgttccacgccaccgcctttgagttggacacagatggcaacccctttgaccaggacatctacgggcgcgaggagctgcgcagccccaagctgttctacgccgaccaccccttcatcttcctagtgcgggacacccaaagcggctccctgctattcattgggcgcctggtccggcctaagggtgacaagatgcgagacgagttatagggcctcagggtgcacacaggatggcaggaggcatccaaaggctcctgagacacatgggtgctattggggttgggggggaggtgaggtaccagccttggatactccatggggtgggggtggaaaagcagaccggggttcccgtgtgcctgagcggaccttcccagctagaattcactccacttggacatgggccccagataccatgatgctgagcccggaaactccacatcctgtgggacctgggccatagtcattctgcctgccctgaaagtcccagatcaagcctgcctcaatcagtattcatatttatagccaggtaccttctcacctgtgagaccaaattgagctaggggggtcagccagccctcttctgacactaaaacacctcagctgcctccccagctctatcccaacctctcccaactataaaactaggtgctgcagcccctgggaccaggcacccccagaatgacctggccgcagtgaggcggattgagaaggagctcccaggaggggcttctgggcagactctggtcaagaagcatcgtgtctggcgttgtggggatgaactttttgttttgtttcttccttttttagttcttcaaagatagggagggaagggggaacatgagcctttgttgctatcaatccaagaacttatttgtacattttttttttcaataaaacttttccaatgaca

SEQ ID NO: 444898 - DNA, 2164 bp, Homo sapiens
gcacgagcgggacgtgactctcgctctcgagccttctgcctcctggaggcggccctggccgccgaggtgaagaaacctgcagccgcagcagctcctggcactgcggagaagttgagccccaaggcggccacgcttgccgagcgcagcgccggcctggccttcagcttgtaccgcccaccgtggtgcacgcaaaccacttcctggccatgcgctccctcctgcttctcagcgccttctgcctcctggaggcggccctggccgccgaggtgaagaaacctgcagccgcagcagctcctggcactgcggagaagttgagccccaaggcggccacgcttgccgagcgcagcgccggcctggccttcagcttgtaccaggccatggccaaggaccaggcagtggagaacatcctggtgtcacccgtggtggtggcctcgtcgctggggctcgtgtcgctgggcggcaaggcgaccacggcgtcgcaggccaaggcagtgctgagcgccgagcagctgcgcgacgaggaggtgcacgccggcctgggcgagctgctgcgctcactcagcaactccacggcgcgcaacgtgacctggaagctgggcagccgactgtacggacccagctcagtgagcttcgctgatgacttcgtgcgcagcagcaagcagcactacaactgcgagcactccaagatcaacttccgcgacaagcgcagcgcgctgcagtccatcaacgagtgggccgcgcagaccaccgacggcaagctgcccgaggtcaccaaggacgtggagcgcacggacggcgccctgttagtcaacgccatgttcttcaagccacactgggatgagaaattccaccacaagatggtggacaaccgtggcttcatggtgactcggtcctataccgtgggtgtcatgatgatgcaccggacaggcctctacaactactacgacgacgagaaggaaaagctgcaaatcgtggagatgcccctggcccacaagctctccagcctcatcatcctcatgccccatcacgtggagcctctcgagcgccttgaaaagctgctaaccaaagagcagctgaagatctggatggggaagatgcagaagaaggctgttgccatctccttgcccaagggtgtggtggaggtgacccatgacctgcagaaacacctggctgggctgggcctgactgaggccattgacaagaacaaggccgacttgtcacgcatgtcaggcaagaaggacctgtacctggcccagcgtgttccacgccaccgcctttgagttggacacagatggcaacccctttgaccaggacatctacgggcgcgaggagctgcgcagccccaagctgttctacgccgaccaccccttcatcttcctagtgcgggacacccaaagcggctccctgctattcattgggcgcctggtccggcctaagggtgacaagatgcgagacgagttatagggcctcagggtgcacacaggatggcaggaggcatccaaaggctcctgagacacatgggtgctattggggttgggggggaggtgaggtaccagccttggatactccatggggtgggggtggaaaagcagaccggggttcccgtgtgcctgagcggaccttcccagctagaattcactccacttggacatgggccccagataccatgatgctgagcccggaaactccacatcctgtgggacctgggccatagtcattctgcctgccctgaaagtcccagatcaagcctgcctcaatcagtattcatatttatagccaggtaccttctcacctgtgagaccaaattgagctaggggggtcagccagccctcttctgacactaaaacacctcagctgcctccccagctctatcccaacctctcccaactataaaactaggtgctgcagcccctgggaccaggcacccccagaatgacctggccgcagtgaggcggattgagaaggagctcccaggaggggcttctgggcagactctggtcaagaagcatcgtgtctggcgttgtggggatgaactttttgttttgtttcttccttttttagttcttcaaagatagggagggaagggggaacatgagcctttgttgctatcaatccaagaacttatttgtacattttttttttcaataaaacttttccaatgaca

SEQ ID NO: 444899 - DNA, 1890 bp, Homo sapiens
  misc_feature (1785)..(1785): n is a, c, g, or t
tctttggcttttttggcggagctggggcgccctccggaagcgtttccaactttccagaagtttctcgggacgggcaggagggggtggggactgccatatatagatcccgggagcaggggagcgggctaagagtagaatcgtgtcgcggctcgagagcgagagtcacgtcccggcgctagcccagcccgacccaggcccaccgtggtgcacgcaaaccacttcctggccatgcgctccctcctgcttctcagcgccttctgcctcctggaggcggccctggccgccgaggtgaagaaacctgcagccgcagcagctcctggcactgcggagaagttgagccccaaggcggccacgcttgccgagcgcagcgccggcctggccttcagcttgtaccaggccatggccaaggaccaggcagtggagaacatcctggtgtcacccgtggtggtggcctcgtcgctggggctcgtgtcgctgggcggcaaggcgaccacggcgtcgcaggccaaggcagtgctgagcgccgagcagctgcgcgacgaggaggtgcacgccggcctgggcgagctgctgcgctcactcagcaactccacggcgcgcaacgtgacctggaagctgggcagccgactgtacggacccagctcagtgagcttcgctgatgacttcgtgcgcagcagcaagcagcactacaactgcgagcactccaagatcaacttccgcgacaagcgcagcgcgctgcagtccatcaacgagtgggccgcgcagaccaccgacggcaagctgcccgaggtcaccaaggacgtggagcgcacggacggcgccctgttagtcaacgccatgttcttcaagccacactgggatgagaaattccaccacaagatggtggacaaccgtggcttcatggtgactcggtcctataccgtgggtgtcatgatgatgcaccggacaggcctctacaactactacgacgacgagaaggaaaagctgcaaatcgtggagatgcccctggcccacaagctctccagcctcatcatcctcatgccccatcacgtggagcctctcgagcgccttgaaaagctgctaaccaaagagcagctgaagatctggatggggaagatgcagaagaaggctgttgccatctccttgcccaagggtgtggtggaggtgacccatgacctgcagaaacacctggctgggctgggcctgactgaggccattgacaagaacaaggccgacttgtcacgcatgtcaggcaagaaggacctgtacctggcccagcgtgttccacgccaccgcctttgagttggacacagatggcaacccctttgaccaggacatctacgggcgcgaggagctgcgcagccccaagctgttctacgccgaccaccccttcatcttcctagtgcgggacacccaaagcggctccctgctattcattgggcgcctggtccggcctaagggtgacaagatgcgagacgagttatagggcctcagggtgcacacaggatggcaggaggcatccaaaggctcctgagacacatgggtgctattggggttgggggggaggtgaggtaccagccttggatactccatggggtgggggtggaaaagcagaccggggttcccgtgtgcctgagcggaccttcccagctagaattcactccacttggacatgggccccagataccatgatgctgagcccggaaactccacatcctgtgggacctgggccatagtcattctgcctgccctgaaagtcccagatcaagcctgcctcaatcaagntcaatttaagcagcccttccccttagaccatgagcggggtcccctttgaaaaactagggcccgtttccctccaaaaatagggcggaagcccaagtgctggtagac

SEQ ID NO: 444900 - DNA, 1946 bp, Homo sapiens
tctttggcttttttggcggagctggggcgccctccggaagcgtttccaactttccagaagtttctcgggacgggcaggagggggtggggactgccatatatagatcccgggagcaggggagcgggctaagagtagaatcgtgtcgcggctcgagagcgagagtcacgtcccggcgctagcccagcccgacccaggcccaccgtggtgcacgcaaaccacttcctggccatgcgctccctcctgcttctcagcgccttctgcctcctggaggcggccctggccgccgaggtgaagaaacctgcagccgcagcagctcctggcactgcggagaagttgagccccaaggcggccacgcttgccgagcgcagcgccggcctggccttcagcttgtaccaggccatggccaaggaccaggcagtggagaacatcctggtgtcacccgtggtggtggcctcgtcgctggggctcgtgtcgctgggcggcaaggcgaccacggcgtcgcaggccaaggcagtgctgagcgccgagcagctgcgcgacgaggaggtgcacgccggcctgggcgagctgctgcgctcactcagcaactccacggcgcgcaacgtgacctggaagctgggcagccgactgtacggacccagctcagtgagcttcgctgatgacttcgtgcgcagcagcaagcagcactacaactgcgagcactccaagatcaacttccgcgacaagcgcagcgcgctgcagtccatcaacgagtgggccgcgcagaccaccgacggcaagctgcccgaggtcaccaaggacgtggagcgcacggacggcgccctgttagtcaacgccatgttcttcaagccacactgggatgagaaattccaccacaagatggtggacaaccgtggcttcatggtgactcggtcctataccgtgggtgtcatgatgatgcaccggacaggcctctacaactactacgacgacgagaaggaaaagctgcaaatcgtggagatgcccctggcccacaagctctccagcctcatcatcctcatgccccatcacgtggagcctctcgagcgccttgaaaagctgctaaccaaagagcagctgaagatctggatggggaagatgcagaagaaggctgttgccatctccttgcccaagggtgtggtggaggtgacccatgacctgcagaaacacctggctgggctgggcctgactgaggccattgacaagaacaaggccgacttgtcacgcatgtcaggcaagaaggacctgtacctggcccagcgtgttccacgccaccgcctttgagttggacacagatggcaacccctttgaccaggacatctacgggcgcgaggagctgcgcagccccaagctgttctacgccgaccaccccttcatcttcctagtgcgggacacccaaagcggctccctgctattcattgggcgcctggtccggcctaagggtgacaagatgcgagacgagttatagggcctcagggtgcacacaggatggcaggaggcatccaaaggctcctgagacacatgggtgctattggggttgggggggaggtgaggtaccagccttggatactccatggggtgggggtggaaaagcagaccggggttcccgtgtgcctgagcggaccttcccagctagaccaacctctcccaactataaaactaggtgctgcagcccctgggaccaggcacccccagaatgacctggccgcagtgaggcggattgagaaggagctcccaggaggggcttctgggcagactctggtcaagaagcatcgtgtctggcgttgtggggatgaactttttgttttgtttcttccttttttagttcttcaaagatagggagggaagggggaacatgagcctttgttgctatcaatccaagaacttatttgtacattttttttttcaataaaacttttccaatgaca

SEQ ID NO: 444901 - DNA, 1609 bp, Homo sapiens
tctttggcttttttggcggagctggggcgccctccggaagcgtttccaactttccagaagtttctcgggacgggcaggagggggtggggactgccatatatagatcccgggagcaggggagcgggctaagagtagaatcgtgtcgcggctcgagagcgagagtcacgtcccggcgctagcccagcccgacccaggcccaccgtggtgcacgcaaaccacttcctggccatgcgctccctcctgcttctcagcgccttctgcctcctggaggcggccctggccgccgaggtgaagaaacctgcagccgcagcagctcctggcactgcggagaagttgagccccaaggcggccacgcttgccgagcgcagcgccggcctggccttcagcttgtaccaggccatggccaaggaccaggcagtggagaacatcctggtgtcacccgtggtggtggcctcgtcgctggggctcgtgtcgctgggcggcaaggcgaccacggcgtcgcaggccaaggcagtgctgagcgccgagcagctgcgcgacgaggaggtgcacgccggcctgggcgagctgctgcgctcactcagcaactccacggcgcgcaacgtgacctggaagctgggcagccgactgtacggacccagctcagtgagcttcgctgatgacttcgtgcgcagcagcaagcagcactacaactgcgagcactccaagatcaacttccgcgacaagcgcagcgcgctgcagtccatcaacgagtgggccgcgcagaccaccgacggcaagctgcccgaggtcaccaaggacgtggagcgcacggacggcgccctgttagtcaacgccatgttcttcaagccacactgggatgagaaattccaccacaagatggtggacaaccgtggcttcatggtgactcggtcctataccgtgggtgtcatgatgatgcaccggacaggcctctacaactactacgacgacgagaaggaaaagctgcaaatcgtggagatgcccctggcccacaagctctccagcctcatcatcctcatgccccatcacgtggagcctctcgagcgccttgaaaagctgctaaccaaagagcagctgaagatctggatggggaagatgcagaagaaggctgttgccatctccttgcccaagggtgtggtggaggtgacccatgacctgcagaaacacctggctgggctgggcctgactgaggccattgacaagaacaaggccgacttgtcacgcatgtcaggcaagaaggacctgtacctggcccagcgtgttccacgccaccgcctttgagttggacacagatggcaacccctttgaccaggacatctacgggcgcgaggagctgcgcagccccaagctgttctacgccgaccaccccttcatcttcctagtagaaggagctcccaggaggggcttctgggcagactctggtcaagaagcatcgtgtctggcgttgtggggatgaactttttgttttgtttcttccttttttagttcttcaaagatagggagggaagggggaacatgagcctttgttgctatcaatccaagaacttatttgtacattttttttttcaataaaacttttccaatgaca

SEQ ID NO: 444902 - DNA, 1127 bp, Homo sapiens
tctttggcttttttggcggagctggggcgccctccggaagcgtttccaactttccagaagtttctcgggacgggcaggagggggtggggactgccatatatagatcccgggagcaggggagcgggctaagagtagaatcgtgtcgcggctcgagagcgagagtcacgtcccggcgctagcccagcccgacccaggcccaccgtggtgcacgcaaaccacttcctggccatgcgctccctcctgcttctcagcgccttctgcctcctggaggcggccctggccgccgaggtgaagaaacctgcaccccaagctgttctacgccgaccaccccttcatcttcctagtgcgggacacccaaagcggctccctgctattcattgggcgcctggtccggcctaagggtgacaagatgcgagacgagttatagggcctcagggtgcacacaggatggcaggaggcatccaaaggctcctgagacacatgggtgctattggggttgggggggaggtgaggtaccagccttggatactccatggggtgggggtggaaaagcagaccggggttcccgtgtgcctgagcggaccttcccagctagaattcactccacttggacatgggccccagataccatgatgctgagcccggaaactccacatcctgtgggacctgggccatagtcattctgcctgccctgaaagtcccagatcaagcctgcctcaatcagtattcatatttatagccaggtaccttctcacctgtgagaccaaattgagctaggggggtcagccagccctcttctgacactaaaacacctcagctgcctccccagctctatcccaacctctcccaactataaaactaggtgctgcagcccctgggaccaggcacccccagaatgacctggccgcagtgaggcggattgagaaggagctcccaggaggggcttctgggcagactctggtcaagaagcatcgtgtctggcgttgtggggatgaactttttgttttgtttcttccttttttagttcttcaaagatagggagggaagggggaacatgagcctttgttgctatcaatccaagaacttatttgtacattttttttttcaataaaacttttccaatgaca

SEQ ID NO: 444903 - DNA, 162 bp, Homo sapiens
actgtgggctctcttgcccccatctccaggggacttgtggcagccagagagctgagggtggttgttggggaggaaggccttgggcttcaagaccaccctgtctgtgcaatcctcacagcccaccgtggtgcacgcaaaccacttcctggccatgcgctccct

SEQ ID NO: 444904 - DNA, 882 bp, Homo sapiens
tctttggcttttttggcggagctggggcgccctccggaagcgtttccaactttccagaagtttctcgggacgggcaggagggggtggggactgccatatatagatcccgggagcaggggagcgggctaagagtagaatcgtgtcgcggctcgagagcgagagtcacgtcccggcgctagcccagcccgacccaggcccaccgtggtgcacgcaaaccacttcctggccatgcgctccctcctgcttctcagcgccttctgcctcctggaggcggccctggccgccgaggtgaagaaacctgcagccgcagcagctcctggcactgcggagaagttgagccccaaggcggccacgcttgccgagcgcagcgccggcctggccttcagcttgtaccaggccatggccaaggaccaggcagtggagaacatcctggtgtcacccgtggtggtggcctcgtcgctggggctcgtgtcgctgggcggcaaggcgaccacggcgtcgcaggccaaggcagtgctgagcgccgagcagctgcgcgacgaggaggtgcacgccggcctgggcgagctgctgcgctcactcagcaactccacggcgcgcaacgtgacctggaagctgggcagccgactgtacggacccagctcagtgagcttcgctgatgacttcgtgcgcagcagcaagcagcactacaactgcgagcactccaagatcaacttccgcgacaagcgcagcgcgctgcagtccatcaacgagtgggccgcgcagaccaccgacggcaagctgcccgaggtcaccaaggacgtggagcgcacggacggcgccccttgttaagtcaaacggccattggttcttttaaaagcccccaacttggggaattgaaga

SEQ ID NO: 444905 - DNA, 2335 bp, Homo sapiens
tctttggcttttttggcggagctggggcgccctccggaagcgtttccaactttccagaagtttctcgggacgggcaggagggggtggggactgccatatatagatcccgggagcaggggagcgggctaagagtagaatcgtgtcgcggctcgagagcgagagtcacgtcccggcgctagcccagcccgacccaggcccaccgtggtgcacgcaaaccacttcctggccatgcgctccctcctgcttctcagcgccttctgcctcctggaggcggccctggccgccgaggtgaagaaacctgcagccgcagcagctcctggcactgcggagaagttgagccccaaggcggccacgcttgccgagcgcagcgccggcctggccttcagcttgtaccaggccatggccaaggaccaggcagtggagaacatcctggtgtcacccgtggtggtggcctcgtcgctggggctcgtgtcgctgggcggcaaggcgaccacggcgtcgcaggccaaggcagtgctgagcgccgagcagctgcgcgacgaggaggtgcacgccggcctgggcgagctgctgcgctcactcagcaactccacggcgcgcaacgtgacctggaagctgggcagccgactgtacggacccagctcagtgagcttcgctgatgacttcgtgcgcagcagcaagcagcactacaactgcgagcactccaagatcaacttccgcgacaagcgcagcgcgctgcagtccatcaacgagtgggccgcgcagaccaccgacggcaagctgcccgaggtcaccaaggacgtggagcgcacggacggcgccctgttagtcaacgccatgttcttcaagccacactgggatgagaaattccaccacaagatggtggacaaccgtggcttcatggtgactcggtcctataccgtgggtgtcatgatgatgcaccggacaggcctctacaactactacgacgacgagaaggaaaagctgcaaatcgtggagatgcccctggcccacaagctctccagcctcatcatcctcatgccccatcacgtggagcctctcgagcgccttgaaaagctgctaaccaaagagcagctgaagatctggatggggaagatgcagaagaaggctgttgccatctccttgcccaagggtgtggtggaggtgacccatgacctgcagaaacacctggctgggctgggcctgactgaggccattgacaagaacaaggccgacttgtcacgcatgtcaggcaagaaggacctgtacctggcccagcgtgttccacgccaccgcctttgagttggacacagatggcaacccctttgaccaggacatctacgggcgcgaggagctgcgcagccccaagctgttctacgccgaccaccccttcatcttcctagtgcgggacacccaaagcggctccctgctattcattgggcgcctggtccggcctaagggtgacaagatgcgagacgagttatagggcctcagggtgcacacaggatggcaggaggcatccaaaggctcctgagacacatgggtgctattggggttgggggggaggtgaggtaccagccttggatactccatggggtgggggtggaaaagcagaccggggttcccgtgtgcctgagcggaccttcccagctagaattcactccacttggacatgggccccagataccatgatgctgagcccggaaactccacatcctgtgggacctgggccatagtcattctgcctgccctgaaagtcccagatcaagcctgcctcaatcagtattcatatttatagccaggtaccttctcacctgtgagaccaaattgagctaggggggtcagccagccctcttctgacactaaaacacctcagctgcctccccagctctatcccaacctctcccaactataaaactaggtgctgcagcccctgggaccaggcacccccagaatgacctggccgcagtgaggcggattgagaaggagctcccaggaggggcttctgggcagactctggtcaagaagcatcgtgtctggcgttgtggggatgaactttttgttttgtttcttccttttttagttcttcaaagatagggagggaagggggaacatgagcctttgttgctatcaatccaagaacttatttgtacattttttttttcaataaaacttttccaatgacaaaaaaaaaaaaaaaaaactcgggggccatcatatgcggggccggggaacaacgggggtcggactgggcctggccatacctgtccctgccccatttctggccccgtggaaaccgcggccctagggggcgatatccgatagcaggtccgtg

SEQ ID NO: 444906 - DNA, 2230 bp, Homo sapiens
tctttggcttttttggcggagctggggcgccctccggaagcgtttccaactttccagaagtttctcgggacgggcaggagggggtggggactgccatatatagatcccgggagcaggggagcgggctaagagtagaatcgtgtcgcggctcgagagcgagagtcacgtcccggcgctagcccagcccgacccagaatgaaaaaggcaggcattgacctccctctgaggcagtttccaggcccaccgtggtgcacgcaaaccacttcctggccatgcgctccctcctgcttctcagcgccttctgcctcctggaggcggccctggccgccgaggtgaagaaacctgcagccgcagcagctcctggcactgcggagaagttgagccccaaggcggccacgcttgccgagcgcagcgccggcctggccttcagcttgtaccaggccatggccaaggaccaggcagtggagaacatcctggtgtcacccgtggtggtggcctcgtcgctggggctcgtgtcgctgggcggcaaggcgaccacggcgtcgcaggccaaggcagtgctgagcgccgagcagctgcgcgacgaggaggtgcacgccggcctgggcgagctgctgcgctcactcagcaactccacggcgcgcaacgtgacctggaagctgggcagccgactgtacggacccagctcagtgagcttcgctgatgacttcgtgcgcagcagcaagcagcactacaactgcgagcactccaagatcaacttccgcgacaagcgcagcgcgctgcagtccatcaacgagtgggccgcgcagaccaccgacggcaagctgcccgaggtcaccaaggacgtggagcgcacggacggcgccctgttagtcaacgccatgttcttcaagccacactgggatgagaaattccaccacaagatggtggacaaccgtggcttcatggtgactcggtcctataccgtgggtgtcatgatgatgcaccggacaggcctctacaactactacgacgacgagaaggaaaagctgcaaatcgtggagatgcccctggcccacaagctctccagcctcatcatcctcatgccccatcacgtggagcctctcgagcgccttgaaaagctgctaaccaaagagcagctgaagatctggatggggaagatgcagaagaaggctgttgccatctccttgcccaagggtgtggtggaggtgacccatgacctgcagaaacacctggctgggctgggcctgactgaggccattgacaagaacaaggccgacttgtcacgcatgtcaggcaagaaggacctgtacctggcccagcgtgttccacgccaccgcctttgagttggacacagatggcaacccctttgaccaggacatctacgggcgcgaggagctgcgcagccccaagctgttctacgccgaccaccccttcatcttcctagtgcgggacacccaaagcggctccctgctattcattgggcgcctggtccggcctaagggtgacaagatgcgagacgagttatagggcctcagggtgcacacaggatggcaggaggcatccaaaggctcctgagacacatgggtgctattggggttgggggggaggtgaggtaccagccttggatactccatggggtgggggtggaaaagcagaccggggttcccgtgtgcctgagcggaccttcccagctagaattcactccacttggacatgggccccagataccatgatgctgagcccggaaactccacatcctgtgggacctgggccatagtcattctgcctgccctgaaagtcccagatcaagcctgcctcaatcagtattcatatttatagccaggtaccttctcacctgtgagaccaaattgagctaggggggtcagccagccctcttctgacactaaaacacctcagctgcctccccagctctatcccaacctctcccaactataaaactaggtgctgcagcccctgggaccaggcacccccagaatgacctggccgcagtgaggcggattgagaaggagctcccaggaggggcttctgggcagactctggtcaagaagcatcgtgtctggcgttgtggggatgaactttttgttttgtttcttccttttttagttcttcaaagatagggagggaagggggaacatgagcctttgttgctatcaatccaagaacttatttgtacattttttttttcaataaaacttttccaatgaca

SEQ ID NO: 444907 - DNA, 2245 bp, Homo sapiens
tctttggcttttttggcggagctggggcgccctccggaagcgtttccaactttccagaagtttctcgggacgggcaggagggggtggggactgccatatatagatcccgggagcaggggagcgggctaagagtagaatcgtgtcgcggctcgagagcgagagtcacgtcccggcgctagcccagcccgacccaggtgaggggcgggagacgcctgcgtgcgtgcggcccgggggagcgccgagcaatctgggggcccaccgtggtgcacgcaaaccacttcctggccatgcgctccctcctgcttctcagcgccttctgcctcctggaggcggccctggccgccgaggtgaagaaacctgcagccgcagcagctcctggcactgcggagaagttgagccccaaggcggccacgcttgccgagcgcagcgccggcctggccttcagcttgtaccaggccatggccaaggaccaggcagtggagaacatcctggtgtcacccgtggtggtggcctcgtcgctggggctcgtgtcgctgggcggcaaggcgaccacggcgtcgcaggccaaggcagtgctgagcgccgagcagctgcgcgacgaggaggtgcacgccggcctgggcgagctgctgcgctcactcagcaactccacggcgcgcaacgtgacctggaagctgggcagccgactgtacggacccagctcagtgagcttcgctgatgacttcgtgcgcagcagcaagcagcactacaactgcgagcactccaagatcaacttccgcgacaagcgcagcgcgctgcagtccatcaacgagtgggccgcgcagaccaccgacggcaagctgcccgaggtcaccaaggacgtggagcgcacggacggcgccctgttagtcaacgccatgttcttcaagccacactgggatgagaaattccaccacaagatggtggacaaccgtggcttcatggtgactcggtcctataccgtgggtgtcatgatgatgcaccggacaggcctctacaactactacgacgacgagaaggaaaagctgcaaatcgtggagatgcccctggcccacaagctctccagcctcatcatcctcatgccccatcacgtggagcctctcgagcgccttgaaaagctgctaaccaaagagcagctgaagatctggatggggaagatgcagaagaaggctgttgccatctccttgcccaagggtgtggtggaggtgacccatgacctgcagaaacacctggctgggctgggcctgactgaggccattgacaagaacaaggccgacttgtcacgcatgtcaggcaagaaggacctgtacctggcccagcgtgttccacgccaccgcctttgagttggacacagatggcaacccctttgaccaggacatctacgggcgcgaggagctgcgcagccccaagctgttctacgccgaccaccccttcatcttcctagtgcgggacacccaaagcggctccctgctattcattgggcgcctggtccggcctaagggtgacaagatgcgagacgagttatagggcctcagggtgcacacaggatggcaggaggcatccaaaggctcctgagacacatgggtgctattggggttgggggggaggtgaggtaccagccttggatactccatggggtgggggtggaaaagcagaccggggttcccgtgtgcctgagcggaccttcccagctagaattcactccacttggacatgggccccagataccatgatgctgagcccggaaactccacatcctgtgggacctgggccatagtcattctgcctgccctgaaagtcccagatcaagcctgcctcaatcagtattcatatttatagccaggtaccttctcacctgtgagaccaaattgagctaggggggtcagccagccctcttctgacactaaaacacctcagctgcctccccagctctatcccaacctctcccaactataaaactaggtgctgcagcccctgggaccaggcacccccagaatgacctggccgcagtgaggcggattgagaaggagctcccaggaggggcttctgggcagactctggtcaagaagcatcgtgtctggcgttgtggggatgaactttttgttttgtttcttccttttttagttcttcaaagatagggagggaagggggaacatgagcctttgttgctatcaatccaagaacttatttgtacattttttttttcaataaaacttttccaatgaca

SEQ ID NO: 444908 - DNA, 2100 bp, Homo sapiens
tctttggcttttttggcggagctggggcgccctccggaagcgtttccaactttccagaagtttctcgggacgggcaggagggggtggggactgccatatatagatcccgggagcaggggagcgggctaagagtagaatcgtgtcgcggctcgagagcgagagtcacgtcccggcgctagcccagcccgacccaggcccaccgtggtgcacgcaaaccacttcctggccatgcgctccctcctgcttctcagcgccttctgcctcctggaggcggccctggccgccgaggtgaagaaacctgcagccgcagcagctcctggcactgcggagaagttgagccccaaggcggccacgcttgccgagcgcagcgccggcctggccttcagcttgtaccaggccatggccaaggaccaggcagtggagaacatcctggtgtcacccgtggtggtggcctcgtcgctggggctcgtgtcgctgggcggcaaggcgaccacggcgtcgcaggccaaggcagtgctgagcgccgagcagctgcgcgacgaggaggtgcacgccggcctgggcgagctgctgcgctcactcagcaactccacggcgcgcaacgtgacctggaagctgggcagccgactgtacggacccagctcagtgagcttcgctgatgacttcgtgcgcagcagcaagcagcactacaactgcgagcactccaagatcaacttccgcgacaagcgcagcgcgctgcagtccatcaacgagtgggccgcgcagaccaccgacggcaagctgcccgaggtcaccaaggacgtggagcgcacggacggcgccctgttagtcaacgccatgttcttcaagccacactgggatgagaaattccaccacaagatggtggacaaccgtggcttcatggtgactcggtcctataccgtgggtgtcatgatgatgcaccggacaggcctctacaactactacgacgacgagaaggaaaagctgcaaatcgtggagatgcccctggcccacaagctctccagcctcatcatcctcatgccccatcacgtggagcctctcgagcgccttgaaaagctgctaaccaaagagcagctgaagatctggatggggaagatgcagaagaaggctgttgccatctccttgcccaagggtgtggtggaggtgacccatgacctgcagaaacacctggctgggctgggcctgactgaggccattgacaagaacaaggccgacttgtcacgcatgtcaggcaagaaggacctgtacctggcccagcgtgttccacgccaccgcctttgagttggacacagatggcaacccctttgaccaggacatctacgggcgcgaggagctgcgcagccccaagctgttctacgccgaccaccccttcatcttcctagtgcgggacacccaaagcggctccctgctattcattgggcgcctggtccggcctaagggtgacaagatgcgagacgagttatagggcctcagggtgcacacaggatggcaggaggcatccaaaggctcctgagacacatgggtgctattggggttgggggggaggtgaggtaccagccttggatactccatggggtgggggtggaaaagcagaccggggttcccgtgtgcctgagcggaccttcccagctagaattcactccacttggacatgggccccagataccatgatgctgagcccggaaactccacatcctgtgggacctgggccatagtcattctgcctgccctgaaagtcccagatcaagcctgcctcaatcagtattcatatttatagccaggtaccttctcacctgtgagaccaaattgagctaggggggtcagccagccctcttctgacactaaaacacctcagctgcctccccagctctatcagaaggagctcccaggaggggcttctgggcagactctggtcaagaagcatcgtgtctggcgttgtggggatgaactttttgttttgtttcttccttttttagttcttcaaagatagggagggaagggggaacatgagcctttgttgctatcaatccaagaacttatttgtacattttttttttcaataaaacttttccaatgaca

SEQ ID NO: 444909 - DNA, 1364 bp, Homo sapiens
ctgaccctgtgttttgccccaactacagcacactgggatgagaaattccaccacaagatggtggacaaccgtggcttcatggtgactcggtcctataccgtgggtgtcatgatgatgcaccggacaggcctctacaactactacgacgacgagaaggaaaagctgcaaatcgtggagatgcccctggcccacaagctctccagcctcatcatcctcatgccccatcacgtggagcctctcgagcgccttgaaaagctgctaaccaaagagcagctgaagatctggatggggaagatgcagaagaaggctgttgccatctccttgcccaagggtgtggtggaggtgacccatgacctgcagaaacacctggctgggctgggcctgactgaggccattgacaagaacaaggccgacttgtcacgcatgtcaggcaagaaggacctgtacctggcccagcgtgttccacgccaccgcctttgagttggacacagatggcaacccctttgaccaggacatctacgggcgcgaggagctgcgcagccccaagctgttctacgccgaccaccccttcatcttcctagtgcgggacacccaaagcggctccctgctattcattgggcgcctggtccggcctaagggtgacaagatgcgagacgagttatagggcctcagggtgcacacaggatggcaggaggcatccaaaggctcctgagacacatgggtgctattggggttgggggggaggtgaggtaccagccttggatactccatggggtgggggtggaaaagcagaccggggttcccgtgtgcctgagcggaccttcccagctagaattcactccacttggacatgggccccagataccatgatgctgagcccggaaactccacatcctgtgggacctgggccatagtcattctgcctgccctgaaagtcccagatcaagcctgcctcaatcagtattcatatttatagccaggtaccttctcacctgtgagaccaaattgagctaggggggtcagccagccctcttctgacactaaaacacctcagctgcctccccagctctatcccaacctctcccaactataaaactaggtgctgcagcccctgggaccaggcacccccagaatgacctggccgcagtgaggcggattgagaaggagctcccaggaggggcttctgggcagactctggtcaagaagcatcgtgtctggcgttgtggggatgaactttttgttttgtttcttccttttttagttcttcaaagatagggagggaagggggaacatgagcctttgttgctatcaatccaagaacttatttgtacattttttttttcaataaaacttttccaatgaca

SEQ ID NO: 444910 - DNA, 966 bp, Homo sapiens
gatgtcagaagacgacagaaggggggtgagggtgttggaggtggggcaggacatggtccttggatcaacagcccgcctttgagttggacacagatggcaacccctttgaccaggacatctacgggcgcgaggagctgcgcagccccaagctgttctacgccgaccaccccttcatcttcctagtgcgggacacccaaagcggctccctgctattcattgggcgcctggtccggcctaagggtgacaagatgcgagacgagttatagggcctcagggtgcacacaggatggcaggaggcatccaaaggctcctgagacacatgggtgctattggggttgggggggaggtgaggtaccagccttggatactccatggggtgggggtggaaaagcagaccggggttcccgtgtgcctgagcggaccttcccagctagaattcactccacttggacatgggccccagataccatgatgctgagcccggaaactccacatcctgtgggacctgggccatagtcattctgcctgccctgaaagtcccagatcaagcctgcctcaatcagtattcatatttatagccaggtaccttctcacctgtgagaccaaattgagctaggggggtcagccagccctcttctgacactaaaacacctcagctgcctccccagctctatcccaacctctcccaactataaaactaggtgctgcagcccctgggaccaggcacccccagaatgacctggccgcagtgaggcggattgagaaggagctcccaggaggggcttctgggcagactctggtcaagaagcatcgtgtctggcgttgtggggatgaactttttgttttgtttcttccttttttagttcttcaaagatagggagggaagggggaacatgagcctttgttgctatcaatccaagaacttatttgtacattttttttttcaataaaacttttccaatgaca

SEQ ID NO: 444911 - DNA, 2377 bp, Homo sapiens
cgcggcggcctgagcggcgggcccctcccttagcgggggcgcgcggcgctgaggaccgcacggaaacggggaagtcaggtggccgctgccgccgccgccgccgcggtttgtcgccagaaggaagatggcggatctggaggagcagttgtctgatgaagagaaggtgcgtatagcagcaaaattcatcattcatgcccctcctggagaatttaatgaggttttcaatgatgttcggttactgcttaataatgacaatcttctcagggaaggagcagcccatgcatttgcacagtataacttggaccagtttactccagtaaaaattgaaggttatgaagatcaggtattgataacagaacatggcgacttgggaaatggaaagtttttggatccaaagaacagaatctgttttaaatttgatcacttaaggaaggaggcaactgatccaagaccctgtgaagtagaaaatgcagttgaatcatggagaacttcagtagaaactgctctgagagcttacgtaaaagaacattacccgaatggagtctgcactgtgtatggcaaaaaaatagatggacagcaaaccattattgcatgcatagaaagccatcagttccaagcaaaaaatttttggaatggtcgttggaggtcagaatggaagtttacaatcactccttcaaccactcaagtggttggcatcttgaaaattcaggttcattattatgaagatggtaatgttcagctagtgagtcataaagatatacaagattccctaacagtgtctaatgaagtgcaaacagcaaaagaatttataaagattgtagaagctgcagaaaatgaataccagactgccatcagtgagaattatcagacaatgtcggacactactttcaaagccttacgtcgacagttgccagttacacgcactaagattgattggaacaagatccttagctacaagattggcaaagagatgcagaatgcataagatgaacattgcatgaccggatcattttagtgtctttgcgttaaaaaatcattgcaaaagtattctgaactgtcaagctgcccagtcagatgggctgttgccatttaaaatcactgtaattaattagtttgattagagcacaaagcttagctaatcaaccattatttttcattttgtttgttctaagaggattgaaaatcagtttagtttaaatgtctttctgttaggcctttctttcttacaatgaagagatgattcttctagtttatggttaaaagtttttgaagtgtctcaaaaatattttactaactgtaaccctaaaattgatgtcttttggtttatgaaatcagtaatttttgatatttccccagttctttttaatggggtcaataatggacattctagtttaaggtggttgatggatttagccatatatgctgctaaagaaattgtctaccttttcttcctcacctgttccatttatgtaaagttgagattagagggaaagcattttctatatcaattgtgtttaaacctttcaagaaggttatttagctagcttagtgttgaactaaattttttttaaacaaggcaaggtctaatgctgttttgagattctgaaattaatgaaaatacttatttcagaaatgcatttaatgctttttttcttgtgacagttacgcaaatcagcttgaattccatatgtccctgagttatttttatcataaagccacaaatgtattataacaaggcaaattgtaatatatataatcctgaactcatgaccatgtctcggtttatttttttttcttggattgaaaagtactgaaattcaatgtgacattaaaatgcaaattttcctatttatttgagtagaaaatcacttaccagtgagcatatatattttaaaatactttctttggatattgtaattcttaactggttgtaaattagaaaagctgggattacatatggtgtgcggttacagtctaaattttttcatcctcctatgcatcataagcatgtttgtaatattttcaaaaatagttctactgatgctacaggaatttcaagcctgtggtgaatgttagtatttaccatagggagtgaagtggagttatggtttcattcaatagagtattgctgattatacttgagtggaatcctttcctcacgtactcccacagacgtctgggcctggaaattttttttttattttattttattgtttttttttttagaaaaacaccacttttattatgtacaataaaatatttcattagcttgaattgtatagatttttaaaaattcaatgaaagcatgttgtttaatttctttttaaaatcactgttgggctttgaaagcattgagaatataatatgaaattatgac

SEQ ID NO: 444912 - DNA, 918 bp, Homo sapiens
cgcggcggcctgagcggcgggcccctcccttagcgggggcgcgcggcgctgaggaccgcacggaaacggggaagtcaggtggccgctgccgccgccgccgccgcggtttgtcgccagaaggaagatggcggatctggaggagcagttgtctgatgaagagaaggtgcgtatagcagcaaaattcatcattcatgcccctcctggagaatttaatgaggttttcaatgatgttcggttactgcttaataatgacaatcttctcagggaaggagcagcccatgcatttgcacagtataacttggaccagtttactccagtaaaaattgaaggttatgaagatcaggtattgataacagaacatggcgacttgggaaatggaaagtttttggatccaaagaacagaatctgttttaaatttgatcacttaaggaaggaggcaactgatccaagaccctgtgaagtagaaaatgcagttgaatcatggagaacttcagtagaaactgctctgagagcttacgtaaaagaacattacccgaatggagtctgcactgtgtatggcaaaaaaatagatggacagcaaaccattattgcatgcatagaaagccatcagttccaagcaaaaaatttttggaatggtcgttggaggtcagaatggaagtttacaatcactccttcaaccactcaagtggttggcatcttgaaaattcaggttcattattatgaagatggtaatgttcagctagtgagtcataaagatatacaagattccctaacagtgtctattgaagggcaaacagcaaaagaattatgattgtgaagctgcagtggataccagactggcctcagtgagaatattagaccatggcgggcactacttttggcttcttcgaccattgccggttccccccctagattggt

SEQ ID NO: 444913 - DNA, 1115 bp, Homo sapiens
cgcggcggcctgagcggcgggcccctcccttagcgggggcgcgcggcgctgaggaccgcacggaaacggggaagtcaggtggccgctgccgccgccgccgccgcggtttgtcgccagaaggaagatggcggatctggaggagcagttgtctgatgaagagaaggtgcgtatagcagcaaaattcatcattcatgcccctcctggagaatttaatgaggttttcaatgatgttcggttactgcttaataatgacaatcttctcagggaaggagcagcccatgcatttgcacagtataacttggaccagtttactccagtaaaaattgaaggttatgaagatcaggtattgataacagaacatggcgacttgggaaatggaaagtttttggatccaaagaacagaatctgttttaaatttgatcacttaaggaaggaggcaactgatccaagaccctgtgaagtagaaaatgcagttgaatcatggagaacttcagtagaaactgctctgagagcttacgtaaaagaacattacccgaatggagtctgcacttgtaagtcatcagtagcagctttgtgtgtgtgttttgtgtaaatgtgagtctttagcgtctcttaaaatttacagtaacttacagaattgacattgtataatttgtcatttttttccttaaatatttctaagaatgtttactattttttcaagaaattctggataataaatagatatactaggatggcttaaaatagagaaatggttgtaccttgatttaaatccatgtagaaattctaatacattgattaaaggagcaggatatggtgagattctgtaatcttatgttcatgactcgtctcagtttagatcaaagttatttttattaagtcacagaaatcttagaacaaataaaattacttggaagtaaaattatgtgtttctgtattttacagttacatttcttgtgttttttgtgtggttctttcgtaggttcaacctatttttatattttcaagaaatatatggctgggcacagtggctcacgcctgtaatcccagcactttgggaggccgaggcaggtggatcacctgagatcaggagttcgagacctgcctggccagca

SEQ ID NO: 444914 - DNA, 715 bp, Homo sapiens
cgcggcggcctgagcggcgggcccctcccttagcgggggcgcgcggcgctgaggaccgcacggaaacggggaagtcaggtggccgctgccgccgccgccgccgcggtttgtcgccagaaggaagatggcggatctggaggagcagttgtctgatgaagagaaggtgcgtatagcagcaaaattcatcattcatgcccctcctggagaatttaatgaggttttcaatggtgagtgtttgatttataacactaggcttgatatatcaagccctctttttaaaagaaaaccaaaataatcaaaataagctaaggacagtatgcagaaaaatctgtgttttctgaattacaatgacaatatgttagtctggattttgtaatggctagaatataatgtatttatttatatatgatgattctgttagcaaattaacccttttaaagcctgaaataaattttattcatatcactgactagaatatatcctcattctgggaaaggagagtctttttggtaaatggttttatttaagtaaaactataaacgcatatagtagatatttcttcaatagaactcttaaatagtttaaaaagacaacaggccaggtgcagtggctcactcctgtaataccagcactttgggaagatgaggcaggcaggtcacttgagaccaggagttcgagaccagcctgggcagtatggtgaaaccttgtctctacc

SEQ ID NO: 444915 - DNA, 595 bp, Homo sapiens
  misc_feature (239)..(240): n is a, c, g, or t
  misc_feature (257)..(258): n is a, c, g, or t
  misc_feature (330)..(330): n is a, c, g, or t
  misc_feature (334)..(334): n is a, c, g, or t
  misc_feature (485)..(485): n is a, c, g, or t
cgcggcggcctgagcggcgggcccctcccttagcgggggcgcgcggcgctgaggaccgcacggaaacggggaagtcaggtggccgctgccgccgccgccgccgcggtttgtcgccagaaggaagatggcggatctggaggagcagttgtctgatgaagagaaggtgcgtatagcagcaaaattcatcattcatgcccctcctggagaatttaatgaggttttcaatgactgttcgggtnntactgcttaataatganncaatcttctcagggacaggggagcagccccatggcatttgcaacagctattaaccttgggggaacccaaggntttntaaaccgttccccaaggctaacaaacacaacttcgacacgggttactgaacgcatcagcgctacttggattaagccagaaccatggcgacttgggaaatggcaaagttttcggatccaaagaacagaatctgttttaaatttggtccactnaacggacacggagggcccaaaaaaccttttggggaaattttccccaaaaagggaaacgccccccttttggggttttggggcaaaaaggggttaaagggaacagggaagaa

SEQ ID NO: 444916 - DNA, 2401 bp, Homo sapiens
  misc_feature (2396)..(2396): n is a, c, g, or t
  misc_feature (2401)..(2401): n is a, c, g, or t
cgcggcggcctgagcggcgggcccctcccttagcgggggcgcgcggcgctgaggaccgcacggaaacggggaagtcaggtggccgctgccgccgccgccgccgcggtttgtcgccagaaggaagatggcggatctggaggagcagttgtctgatgaagagaaggtgcgtatagcagcaaaattcatcattcatgcccctcctggagaatttaatgaggttttcaatgatgttcggttactgcttaataatgacaatcttctcagggaaggagcagcccatgcatttgcacagtataacttggaccagtttactccagtaaaaattgaaggttatgaagatcaggtattgataacagaacatggcgacttgggaaatggaaagtttttggatccaaagaacagaatctgttttaaatttgatcacttaaggaaggaggcaactgatccaagaccctgtgaagtagaaaatgcagttgaatcatggagaacttcagtagaaactgctctgagagcttacgtaaaagaacattacccgaatggagtctgcactgtgtatggcaaaaaaatagatggacagcaaaccattattgcatgcatagaaagccatcagttccaagcaaaaaatttttggaatggtcgttggaggtcagaatggaagtttacaatcactccttcaaccactcaagtggttggcatcttgaaaattcaggttcattattatgaagatggtaatgttcagctagtgagtcataaagatatacaagattccctaacagtgtctaatgaagtgcaaacagcaaaagaatttataaagattgtagaagctgcagaaaatgaataccagactgccatcagtgagaattatcagacaatgtcggacactactttcaaagccttacgtcgacagttgccagttacacgcactaagattgattggaacaagatccttagctacaagattggcaaagagatgcagaatgcataagatgaacattgcatgaccggatcattttagtgtctttgcgttaaaaaatcattgcaaaagtattctgaactgtcaagctgcccagtcagatgggctgttgccatttaaaatcactgtaattaattagtttgattagagcacaaagcttagctaatcaaccattatttttcattttgtttgttctaagaggattgaaaatcagtttagtttaaatgtctttctgttaggcctttctttcttacaatgaagagatgattcttctagtttatggttaaaagtttttgaagtgtctcaaaaatattttactaactgtaaccctaaaattgatgtcttttggtttatgaaatcagtaatttttgatatttccccagttctttttaatggggtcaataatggacattctagtttaaggtggttgatggatttagccatatatgctgctaaagaaattgtctaccttttcttcctcacctgttccatttatgtaaagttgagattagagggaaagcattttctatatcaattgtgtttaaacctttcaagaaggttatttagctagcttagtgttgaactaaattttttttaaacaaggcaaggtctaatgctgttttgagattctgaaattaatgaaaatacttatttcagaaatgcatttaatgctttttttcttgtgacagttacgcaaatcagcttgaattccatatgtccctgagttatttttatcataaagccacaaatgtattataacaaggcaaattgtaatatatataatcctgaactcatgaccatgtctcggtttatttttttttcttggattgaaaagtactgaaattcaatgtgacattaaaatgcaaattttcctatttatttgagtagaaaatcacttaccagtgagcatatatattttaaaatactttctttggatattgtaattcttaactggttgtaaattagaaaagctgggattacatatggtgtgcggttacagtctaaattttttcatcctcctatgcatcataagcatgtttgtaatattttcaaaaatagttctactgatgctacaggaatttcaagcctgtggtgaatgttagtatttaccatagggagtgaagtggagttatggtttcattcaatagagtattgctgattatacttgagtggaatcctttcctcacgtactcccacagacgtctgggcctggaaattttttttttattttattttattgtttttttttttagaaaaacaccacttttattatgtacaataaaatatttcattagcttgaattgtatagatttttaaaaattcaatgaaagcatgttgtttaatttctttttaaaatcactgttgggctttgaaagcattgagaatataatatgaaattatgacggggggggggggggggggngaaan

SEQ ID NO: 444917 - DNA, 1848 bp, Homo sapiens
cgcggcggcctgagcggcgggcccctcccttagcgggggcgcgcggcgctgaggaccgcacggaaacggggaagtcaggtggccgctgccgccgccgccgccgcggtttgtcgccagaaggaagatggcggatctggaggagcagttgtctgatgaagagaaggtgcgtatagcagcaaaattcatcattcatgcccctcctggagaatttaatgaggttttcaatgatgttcggttactgcttaataatgacaatcttctcagggaaggagcagcccatgcatttgcacagtataacttggaccagtttactccagtaaaaattgaaggttatgaagatcaggtattgataacagaacatggcgacttgggaaatggaaagtttttggatccaaagaacagaatctgttttaaatttgatcacttaaggaaggaggcaactgatccaagaccctgtgaagtagaaaatgcagttgaatcatggagaacttcagtagaaactgctctgagagcttacgtaaaagaacattacccgaatggagtctgcactgtgtatggcaaaaaaatagatggacagcaaaccattattgcatgcatagaaagccatcagttccaagcaaaaaatttttggaatggtcgttggaggtcagaatggaagtttacaatcactccttcaaccactcaagtggttggcatcttgaaaattcaggttcattattatgaagatggtaatgttcagctagtgagtcataaagatatacaagattccctaacagtgtctaatgaagtgcaaacagcaaaagaatttataaagattgtagaagctgcagaaaatgaataccagactgccatcagtgagaattatcagacaatgtcggacactactttcaaagccttacgtcgacagttgccagttacacgcactaagattgattggaacaagatccttagctacaagattggcaaagagatgcagaatgcataagatgaacattgcatgaccggatcattttagtgtctttgcgttaaaaaatcattgcaaaagtattctgaactgtcaagctgcccagtcagatgggctgttgccatttaaaatcactgtaattaattagtttgattagagcacaaagcttagctaatcaaccattatttttcattttgtttgttctaagaggattgaaaatcagtttagtttaaatgtctttctgttaggcctttctttcttacaatgaagagatgattcttctagtttatggttaaaagtttttgaagtgtctcaaaaatattttactaactgtaaccctaaaattgatgtcttttggtttatgaaatcagtaatttttgatatttccccagttctttttaatggggtcaataatggacattctagtttaaggtggttgatggatttagccatatatgctgctaaagaaattgtctaccttttcttcctcacctgttccatttatgtaaagttgagattagagggaaagcattttctatatcaattgtgtttaaacctttcaagaaggttatttagctagcttagtgttgaactaaattttttttaaacaaggcaaggtctaatgctgttttgagattctgaaattaatgaaaatacttatttcagaaatgcatttaatgctttttttcttgtgacagttacgcaaatcagcttgaattccatatgtccctgagttatttttatcataaagccacaaatgtattataacaaggcaaattgtaatatatataatcctgaactcatgaccatgtctcggtttatttttttttcttggattgaaaagtactgaaattcaatgtgacattaaaatgcaaattttccta

SEQ ID NO: 444918 - DNA, 2359 bp, Homo sapiens
cgcggcggcctgagcggcgggcccctcccttagcgggggcgcgcggcgctgaggaccgcacggaaacggggaagtcaggtggccgctgccgccgccgccgccgcggtttgtcgccagaaggaagatggcggatctggaggagcagttgtctgatgaagagaaggtgcgtatagcagcaaaattcatcattcatgcccctcctggagaatttaatgaggttttcaatgatgttcggttactgcttaataatgacaatcttctcagggaaggagcagcccatgcatttgcacagtataacttggaccagtttactccagtaaaaattgaaggttatgaagatcaggtattgataacagaacatggcgacttgggaaatggaaagtttttggatccaaagaacagaatctgttttaaatttgatcacttaaggaaggaggcaactgatccaagaccctgtgaagtagaaaatgcagttgaatcatggagaacttcagtagaaactgctctgagagcttacgtaaaagaacattacccgaatggagtctgcactgtgtatggcaaaaaaatagatggacagcaaaccattattgcatgcatagaaagccatcagttccaagcaaaaaatttttggaatggtcgttggaggtcagaatggaagtttacaatcactccttcaaccactcaagtggttggcatcttgaaaattcaggttcattattatgaagatggtaatgttcagctagtgagtcataaagatatacaagattccctaacagtgtctaatgaagtgcaaacagcaaaagaatttataaagattgtagaagctgcagaaaatgaataccagactgccatcagtgagaattatcagacaatgtcggacactactttcaaagccttacgtcgacagttgccagttacacgcactaagattgattggaacaagatccttagctacaagattggcaaagagatgcagaatgcataagatgaacattgcatgaccggatcattttagtgtctttgcgttaaaaaatcattgcaaaagtattctgaactgtcaagctgcccagtcagatgggctgttgccatttaaaatcactgtaattaattagtttgattagagcacaaagcttagctaatcaaccattatttttcattttgtttgttctaagaggattgaaaatcagtttagtttaaatgtctttctgttaggcctttctttcttacaatgaagagatgattcttctagtttatggttaaaagtttttgaagtgtctcaaaaatattttactaactgtaaccctaaaattgatgtcttttggtttatgaaatcagtaatttttgatatttccccagttctttttaatggggtcaataatggacattctagtttaaggtggttgatggatttagccatatatgctgctaaagaaattgtctaccttttcttcctcacctgttccatttatgtaaagttgagattagagggaaagcattttctatatcaattgtgtttaaacctttcaagaaggttatttagctagcttagttaaacaaggcaaggtctaatgctgttttgagattctgaaattaatgaaaatacttatttcagaaatgcatttaatgctttttttcttgtgacagttacgcaaatcagcttgaattccatatgtccctgagttatttttatcataaagccacaaatgtattataacaaggcaaattgtaatatatataatcctgaactcatgaccatgtctcggtttatttttttttcttggattgaaaagtactgaaattcaatgtgacattaaaatgcaaattttcctatttatttgagtagaaaatcacttaccagtgagcatatatattttaaaatactttctttggatattgtaattcttaactggttgtaaattagaaaagctgggattacatatggtgtgcggttacagtctaaattttttcatcctcctatgcatcataagcatgtttgtaatattttcaaaaatagttctactgatgctacaggaatttcaagcctgtggtgaatgttagtatttaccatagggagtgaagtggagttatggtttcattcaatagagtattgctgattatacttgagtggaatcctttcctcacgtactcccacagacgtctgggcctggaaattttttttttattttattttattgtttttttttttagaaaaacaccacttttattatgtacaataaaatatttcattagcttgaattgtatagatttttaaaaattcaatgaaagcatgttgtttaatttctttttaaaatcactgttgggctttgaaagcattgagaatataatatgaaattatgac

SEQ ID NO: 444919 - DNA, 1719 bp, Homo sapiens
cgcggcggcctgagcggcgggcccctcccttagcgggggcgcgcggcgctgaggaccgcacggaaacggggaagtcaggtggccgctgccgccgccgccgccgcggtttgtcgccagaaggaagatggcggatctggaggagcagttgtctgatgaagagaaggtgcgtatagcagcaaaattcatcattcatgcccctcctggagaatttaatgaggttttcaatgatgttcggttactgcttaataatgacaatcttctcagggaaggagcagcccatgcatttgcacagtataacttggaccagtttactccagtaaaaattgaaggttatgaagatcaggtattgataacagaacatggcgacttgggaaatggaaagtttttggatccaaagaacagaatctgttttaaatttgatcacttaaggaaggaggcaactgatccaagaccctgtgaagtagaaaatgcagttgaatcatggagaacttcagtagaaactgctctgagagcttacgtaaaagaacattacccgaatggagtctgcactgtgtatggcaaaaaaatagatggacagcaaaccattattgcatgcatagaaagccatcagttccaagcaaaaaatttttggaatggtcgttggaggtcagaatggaagtttacaatcactccttcaaccactcaagtggttggcatcttgaaaattcaggttcattattatgaagatggtaatgttcagctagtgagtcataaagatatacaagattccctaacagtgtctaatgaagtgcaaacagcaaaagaatttataaagattgtagaagctgcagaaaatgaataccagactgccatcagtgagaattatcagacaatgtcggacactactttcaaagccttacgtcgacagttgccagttacacgcactaagattgattggaacaagatccttagctacaagattggcaaagagatgcagaatgcataagatgaacattgcatgaccggatcattttagtgtctttgcgttaaaaaatcattgcaaaagtattctgaactgtcaagctgcccagtcagatgggctgttgccatttaaaatcactgtaattaattagtttgattagagcacaaagcttagctaatcaaccattatttttcattttgtttgttctaagaggattgaaaatcagtttagtttaaatgtctttctgttaggcctttctttcttacaatgaagagatgattcttctagtttatggttaaaagtttttgaagtgtctcaaaaatattttactaactgtaaccctaaaattgatgtcttttggtttatgaaatcagtaatttttgatatttccccagttctttttaatggggtcaataatggacattctagtttaaggtggttgatggatttagccatatatgctgctaaagaaattgtctaccttttcttcctcacctgttccatttatgtaaagttgagattagagggaaagcattttctatatcaattgtgtttaaactaaacaaggcaaggtctaatgctgttttgagattctgaaattaatgaaaatacttatttcagaaatgcatttaatgctttttttcttgtgacagttacgcaaatcagcttgaattccatatgtccctgagttatttttatcataaagccacaaatgtattataacaaggcaaattgtaatatatataatcctgaactca

SEQ ID NO: 444920 - DNA, 2385 bp, Homo sapiens
  misc_feature (1179)..(1179): n is a, c, g, or t
  misc_feature (1181)..(1181): n is a, c, g, or t
  misc_feature (1200)..(1200): n is a, c, g, or t
  misc_feature (1212)..(1213): n is a, c, g, or t
  misc_feature (1241)..(1241): n is a, c, g, or t
  misc_feature (1248)..(1248): n is a, c, g, or t
  misc_feature (1259)..(1261): n is a, c, g, or t
  misc_feature (1269)..(1269): n is a, c, g, or t
  misc_feature (1274)..(1274): n is a, c, g, or t
  misc_feature (1306)..(1307): n is a, c, g, or t
  misc_feature (1311)..(1311): n is a, c, g, or t
  misc_feature (1321)..(1322): n is a, c, g, or t
  misc_feature (1328)..(1330): n is a, c, g, or t
  misc_feature (1335)..(1335): n is a, c, g, or t
  misc_feature (1338)..(1338): n is a, c, g, or t
  misc_feature (1344)..(1344): n is a, c, g, or t
  misc_feature (1356)..(1356): n is a, c, g, or t
  misc_feature (1365)..(1366): n is a, c, g, or t
  misc_feature (1368)..(1368): n is a, c, g, or t
  misc_feature (1370)..(1370): n is a, c, g, or t
  misc_feature (1380)..(1381): n is a, c, g, or t
  misc_feature (1396)..(1396): n is a, c, g, or t
  misc_feature (1399)..(1399): n is a, c, g, or t
  misc_feature (1412)..(1412): n is a, c, g, or t
  misc_feature (1425)..(1425): n is a, c, g, or t
  misc_feature (1430)..(1430): n is a, c, g, or t
  misc_feature (1432)..(1433): n is a, c, g, or t
  misc_feature (1446)..(1446): n is a, c, g, or t
  misc_feature (1459)..(1459): n is a, c, g, or t
  misc_feature (1464)..(1464): n is a, c, g, or t
  misc_feature (1470)..(1470): n is a, c, g, or t
  misc_feature (1474)..(1474): n is a, c, g, or t
  misc_feature (1478)..(1479): n is a, c, g, or t
  misc_feature (1481)..(1481): n is a, c, g, or t
  misc_feature (1488)..(1488): n is a, c, g, or t
  misc_feature (1492)..(1493): n is a, c, g, or t
  misc_feature (1495)..(1496): n is a, c, g, or t
  misc_feature (1504)..(1504): n is a, c, g, or t
  misc_feature (1519)..(1519): n is a, c, g, or t
cgcggcggcctgagcggcgggcccctcccttagcgggggcgcgcggcgctgaggaccgcacggaaacggggaagtcaggtggccgctgccgccgccgccgccgcggtttgtcgccagaaggaagatggcggatctggaggagcagttgtctgatgaagagaaggtgcgtatagcagcaaaattcatcattcatgcccctcctggagaatttaatgaggttttcaatgatgttcggttactgcttaataatgacaatcttctcagggaaggagcagcccatgcatttgcacagtataacttggaccagtttactccagtaaaaattgaaggttatgaagatcaggtattgataacagaacatggcgacttgggaaatggaaagtttttggatccaaagaacagaatctgttttaaatttgatcacttaaggaaggaggcaactgatccaagaccctgtgaagtagaaaatgcagttgaatcatggagaacttcagtagaaactgctctgagagcttacgtaaaagaacattacccgaatggagtctgcactgtgtatggcaaaaaaatagatggacagcaaaccattattgcatgcatagaaagccatcagttccaagcaaaaaatttttggaatggtcgttggaggtcagaatggaagtttacaatcactccttcaaccactcaagtggttggcatcttgaaaattcaggttcattattatgaagatggtaatgttcagctagtgagtcataaagatatacaagattccctaacagtgtctaatgaagtgcaaacagcaaaagaatttataaagattgtagaagctgcagaaaatgaataccagactgccatcagtgagaattatcagacaatgtcggacactactttcaaagccttacgtcgacagttgccagttacacgcactaagattgattggaacaagatccttagctacaagattggcaaagagatgcagaatgcataagatgaacattgcatgaccggatcattttagtgtctttgcgttaaaaaatcattgcaaaagtattctgaactgtcaagctgcccagtcagatgggctgttgccatttaaaatcactgtaattaattagtttgattagagcacaaagcttagctaatcaaccattatttttcattttgtttgttctaagcggcctncncccccgccccgcccccacncccccccgcccnncccccccccccccccccgccgcgacganccccccnggcgatggccnnncgcccccnccccncccccccccccccccccccccccccccccccnncccncccccccccnncccccnnnccccnccncccccncccccccccccnccccccccnncngncccccccatnnccccccccccccacnccnccccccccccccncccccccacgccnccaangnnatcgccccccctnccccccccccccnccccnctcatncaangccnngnccagagngaanncnncccccatnccaatcgcgcccaanccccccaagctttcaagaaggttatttagctagcttagtgttgaactaaattttttttaaacaaggcaaggtctaatgctgttttgagattctgaaattaatgaaaatacttatttcagaaatgcatttaatgctttttttcttgtgacagttacgcaaatcagcttgaattccatatgtccctgagttatttttatcataaagccacaaatgtattataacaaggcaaattgtaatatatataatcctgaactcatgaccatgtctcggtttatttttttttcttggattgaaaagtactgaaattcaatgtgacattaaaatgcaaattttcctatttatttgagtagaaaatcacttaccagtgagcatatatattttaaaatactttctttggatattgtaattcttaactggttgtaaattagaaaagctgggattacatatggtgtgcggttacagtctaaattttttcatcctcctatgcatcataagcatgtttgtaatattttcaaaaatagttctactgatgctacaggaatttcaagcctgtggtgaatgttagtatttaccatagggagtgaagtggagttatggtttcattcaatagagtattgctgattatacttgagtggaatcctttcctcacgtactcccacagacgtctgggcctggaaattttttttttattttattttattgtttttttttttagaaaaacaccacttttattatgtacaataaaatatttcattagcttgaattgtatagatttttaaaaattcaatgaaagcatgttgtttaatttctttttaaaatcactgttgggctttgaaagcattgagaatataatatgaaattatgac

SEQ ID NO: 444921 - DNA, 2064 bp, Homo sapiens
tttttttctaaattcattccatcatcaaaggtattgataacagaacatggcgacttgggaaatggaaagtttttggatccaaagaacagaatctgttttaaatttgatcacttaaggaaggaggcaactgatccaagaccctgtgaagtagaaaatgcagttgaatcatggagaacttcagtagaaactgctctgagagcttacgtaaaagaacattacccgaatggagtctgcactgtgtatggcaaaaaaatagatggacagcaaaccattattgcatgcatagaaagccatcagttccaagcaaaaaatttttggaatggtcgttggaggtcagaatggaagtttacaatcactccttcaaccactcaagtggttggcatcttgaaaattcaggttcattattatgaagatggtaatgttcagctagtgagtcataaagatatacaagattccctaacagtgtctaatgaagtgcaaacagcaaaagaatttataaagattgtagaagctgcagaaaatgaataccagactgccatcagtgagaattatcagacaatgtcggacactactttcaaagccttacgtcgacagttgccagttacacgcactaagattgattggaacaagatccttagctacaagattggcaaagagatgcagaatgcataagatgaacattgcatgaccggatcattttagtgtctttgcgttaaaaaatcattgcaaaagtattctgaactgtcaagctgcccagtcagatgggctgttgccatttaaaatcactgtaattaattagtttgattagagcacaaagcttagctaatcaaccattatttttcattttgtttgttctaagaggattgaaaatcagtttagtttaaatgtctttctgttaggcctttctttcttacaatgaagagatgattcttctagtttatggttaaaagtttttgaagtgtctcaaaaatattttactaactgtaaccctaaaattgatgtcttttggtttatgaaatcagtaatttttgatatttccccagttctttttaatggggtcaataatggacattctagtttaaggtggttgatggatttagccatatatgctgctaaagaaattgtctaccttttcttcctcacctgttccatttatgtaaagttgagattagagggaaagcattttctatatcaattgtgtttaaacctttcaagaaggttatttagctagcttagtgttgaactaaattttttttaaacaaggcaaggtctaatgctgttttgagattctgaaattaatgaaaatacttatttcagaaatgcatttaatgctttttttcttgtgacagttacgcaaatcagcttgaattccatatgtccctgagttatttttatcataaagccacaaatgtattataacaaggcaaattgtaatatatataatcctgaactcatgaccatgtctcggtttatttttttttcttggattgaaaagtactgaaattcaatgtgacattaaaatgcaaattttcctatttatttgagtagaaaatcacttaccagtgagcatatatattttaaaatactttctttggatattgtaattcttaactggttgtaaattagaaaagctgggattacatatggtgtgcggttacagtctaaattttttcatcctcctatgcatcataagcatgtttgtaatattttcaaaaatagttctactgatgctacaggaatttcaagcctgtggtgaatgttagtatttaccatagggagtgaagtggagttatggtttcattcaatagagtattgctgattatacttgagtggaatcctttcctcacgtactcccacagacgtctgggcctggaaattttttttttattttattttattgtttttttttttagaaaaacaccacttttattatgtacaataaaatatttcattagcttgaattgtatagatttttaaaaattcaatgaaagcatgttgtttaatttctttttaaaatcactgttgggctttgaaagcattgagaatataatatgaaattatgac

SEQ ID NO: 444922 - DNA, 1879 bp, Homo sapiens
catgcccttcccacaaagttacgatccactatctatacacacaaccctcttagtgtatggcaaaaaaatagatggacagcaaaccattattgcatgcatagaaagccatcagttccaagcaaaaaatttttggaatggtcgttggaggtcagaatggaagtttacaatcactccttcaaccactcaagtggttggcatcttgaaaattcaggttcattattatgaagatggtaatgttcagctagtgagtcataaagatatacaagattccctaacagtgtctaatgaagtgcaaacagcaaaagaatttataaagattgtagaagctgcagaaaatgaataccagactgccatcagtgagaattatcagacaatgtcggacactactttcaaagccttacgtcgacagttgccagttacacgcactaagattgattggaacaagatccttagctacaagattggcaaagagatgcagaatgcataagatgaacattgcatgaccggatcattttagtgtctttgcgttaaaaaatcattgcaaaagtattctgaactgtcaagctgcccagtcagatgggctgttgccatttaaaatcactgtaattaattagtttgattagagcacaaagcttagctaatcaaccattatttttcattttgtttgttctaagaggattgaaaatcagtttagtttaaatgtctttctgttaggcctttctttcttacaatgaagagatgattcttctagtttatggttaaaagtttttgaagtgtctcaaaaatattttactaactgtaaccctaaaattgatgtcttttggtttatgaaatcagtaatttttgatatttccccagttctttttaatggggtcaataatggacattctagtttaaggtggttgatggatttagccatatatgctgctaaagaaattgtctaccttttcttcctcacctgttccatttatgtaaagttgagattagagggaaagcattttctatatcaattgtgtttaaacctttcaagaaggttatttagctagcttagtgttgaactaaattttttttaaacaaggcaaggtctaatgctgttttgagattctgaaattaatgaaaatacttatttcagaaatgcatttaatgctttttttcttgtgacagttacgcaaatcagcttgaattccatatgtccctgagttatttttatcataaagccacaaatgtattataacaaggcaaattgtaatatatataatcctgaactcatgaccatgtctcggtttatttttttttcttggattgaaaagtactgaaattcaatgtgacattaaaatgcaaattttcctatttatttgagtagaaaatcacttaccagtgagcatatatattttaaaatactttctttggatattgtaattcttaactggttgtaaattagaaaagctgggattacatatggtgtgcggttacagtctaaattttttcatcctcctatgcatcataagcatgtttgtaatattttcaaaaatagttctactgatgctacaggaatttcaagcctgtggtgaatgttagtatttaccatagggagtgaagtggagttatggtttcattcaatagagtattgctgattatacttgagtggaatcctttcctcacgtactcccacagacgtctgggcctggaaattttttttttattttattttattgtttttttttttagaaaaacaccacttttattatgtacaataaaatatttcattagcttgaattgtatagatttttaaaaattcaatgaaagcatgttgtttaatttctttttaaaatcactgttgggctttgaaagcattgagaatataatatgaaattatgac

SEQ ID NO: 444923 - DNA, 2322 bp, Homo sapiens
cgcggcggcctgagcggcgggcccctcccttagcgggggcgcgcggcgctgaggaccgcacggaaacggggaagtcaggtggccgctgccgccgccgccgccgcggtttgtcgccagaaggaagatggcggatctggaggagcagttgtctgatgaagagaaggtgcgtatagcagcaaaattcatcattcatgcccctcctggagaatttaatgaggttttcaatgatgttcggttactgcttaataatgacaatcttctcagggaaggagcagcccatgcatttgcacagtataacttggaccagtttactccagtaaaaattgaaggttatgaagatcaggtattgataacagaacatggcgacttgggaaatggaaagtttttggatccaaagaacagaatctgttttaaatttgatcacttaaggaaggaggcaactgatccaagaccctgtgaagtagaaaatgcagttgaatcatggagaacttcagtagaaactgctctgagagcttacgtaaaagaacattacccgaatggagtctgcactgtgtatggcaaaaaaatagatggacagcaaaccattattgcatgcatagaaagccatcagttccaagcaaaaaatttttggaatggtcgttggaggtcagaatggaagtttacaatcactccttcaaccactcaagtggttggcatcttgaaaattcagattccctaacagtgtctaatgaagtgcaaacagcaaaagaatttataaagattgtagaagctgcagaaaatgaataccagactgccatcagtgagaattatcagacaatgtcggacactactttcaaagccttacgtcgacagttgccagttacacgcactaagattgattggaacaagatccttagctacaagattggcaaagagatgcagaatgcataagatgaacattgcatgaccggatcattttagtgtctttgcgttaaaaaatcattgcaaaagtattctgaactgtcaagctgcccagtcagatgggctgttgccatttaaaatcactgtaattaattagtttgattagagcacaaagcttagctaatcaaccattatttttcattttgtttgttctaagaggattgaaaatcagtttagtttaaatgtctttctgttaggcctttctttcttacaatgaagagatgattcttctagtttatggttaaaagtttttgaagtgtctcaaaaatattttactaactgtaaccctaaaattgatgtcttttggtttatgaaatcagtaatttttgatatttccccagttctttttaatggggtcaataatggacattctagtttaaggtggttgatggatttagccatatatgctgctaaagaaattgtctaccttttcttcctcacctgttccatttatgtaaagttgagattagagggaaagcattttctatatcaattgtgtttaaacctttcaagaaggttatttagctagcttagtgttgaactaaattttttttaaacaaggcaaggtctaatgctgttttgagattctgaaattaatgaaaatacttatttcagaaatgcatttaatgctttttttcttgtgacagttacgcaaatcagcttgaattccatatgtccctgagttatttttatcataaagccacaaatgtattataacaaggcaaattgtaatatatataatcctgaactcatgaccatgtctcggtttatttttttttcttggattgaaaagtactgaaattcaatgtgacattaaaatgcaaattttcctatttatttgagtagaaaatcacttaccagtgagcatatatattttaaaatactttctttggatattgtaattcttaactggttgtaaattagaaaagctgggattacatatggtgtgcggttacagtctaaattttttcatcctcctatgcatcataagcatgtttgtaatattttcaaaaatagttctactgatgctacaggaatttcaagcctgtggtgaatgttagtatttaccatagggagtgaagtggagttatggtttcattcaatagagtattgctgattatacttgagtggaatcctttcctcacgtactcccacagacgtctgggcctggaaattttttttttattttattttattgtttttttttttagaaaaacaccacttttattatgtacaataaaatatttcattagcttgaattgtatagatttttaaaaattcaatgaaagcatgttgtttaatttctttttaaaatcactgttgggctttgaaagcattgagaatataatatgaaattatgac

SEQ ID NO: 444924 - DNA, 571 bp, Homo sapiens
cagctacttgggaggccaaggcaggagaatcacgtaaacccaggtggcagaagttgcagtgagctgagattgtgccactgcactctagcctgcgtaacagagtgagactccatctcaaaaaataaaaaattaaagttaaataaaataagaaattgtttatctgtaagcagctttgaatctttattcattcagtattgtatattttatctacattcagtctgtatgttgtgattatattaaattattgaaacagtagtgatcttaaggtgattgagtgaaaaagtatcactgtatttaaaatcttaagccattttcagtagagctttgaaataatataattttgcatgttttgtgcttattttagcagaagcctgtgatatggaacatttatatctttctttctgtttcaggtgcgtatagcagcaaaattcatcattcatgcccctcctggagaatttaatgaggttttcaatggtgagtgtttgatttataacactaggcttgatatatcaagccctctttttaaaagaaaaccaaaataatcaaaataagctaaggacagtatgcagaa

SEQ ID NO: 444925 - DNA, 416 bp, Homo sapiens
caggaatttcaagcctgtggtgaatgttagtatttaccatagggagtgaagtggagttatggtttcattcaatagagtattgctgattatacttgagtggaatcctttcctcacgtactcccacagacgtctgggcctggaaattttttttttattttattttattgtttttttttttagaaaaacaccacttttattatgtacaataaaatatttcattagcttgaattgtatagatttttaaaaattcaatgaaagcatgttgtttaatttctttttaaaatcactgttgggctttgaaagcattgagaatataatatgaaattatgacattttgtctaaatcatcttttctttagttttaaaatacaagttttggcacattgggattcctaaagaaaatgaattggtaacatt

SEQ ID NO: 444926 - DNA, 1767 bp, Homo sapiens
cgcggcggcctgagcggcgggcccctcccttagcgggggcgcgcggcgctgaggaccgcacggaaacggggaagtcaggtggccgctgccgccgccgccgccgcggtttgtcgccagaaggaagatggcggatctggaggagcagttgtctgatgaagagaaggtgcgtatagcagcaaaattcatcattcatgcccctcctggagaatttaatgaggttttcaatgatgttcggttactgcttaataatgacaatcttctcagggaaggagcagcccatgcatttgcacagtataacttggaccagtttactccagtaaaaattgaaggttatgaagatcaggtattgataacagaacatggcgacttgggaaatggaaagtttttggatccaaagaacagaatctgttttaaatttgatcacttaaggaaggaggcaactgatccaagaccctgtgaagtagaaaatgcagttgaatcatggagaacttcagtagaaactgctctgagagcttacgtaaaagaacattacccgaatggagtctgcactgtgtatggcaaaaaaatagatggacagcaaaccattattgcatgcatagaaagccatcagttccaagcaaaaaatttttggaatggtcgttggaggtcagaatggaagtttacaatcactccttcaaccactcaagtggttggcatcttgaaaattcaggttcattattatgaagatggtaatgttcagctagtgagtcataaagatatacaagattccctaacagtgtctaatgaagtgcaaacagcaaaagaatttataaagattgtagaagctgcagaaaatgaataccagactgccatcagtgagaattatcagacaatgtcggacactactttcaaagccttacgtcgacagttgccagttacacgcactaagattgattggaacaagatccttagctacaagattggcaaagagatgcagaatgcataagatgaacattgcatgaccggatcattttagtgtctttgcgttaaaaaatcattgcaaaagtattctgaactgtcaagctgcccagtcagatgggctgttgccatttaaaatcactgtaattaattagtttgattagagcacaaagcttagctaatcaaccattatttttcattttgtttgttctaagaggattgaaaatcagtttagtttaaatgtctttctgttaggcctttctttcttacaatgaagagatgattcttctagtttatggttaaaagtttttgaagtgtctcaaaaatattttactaactgtaaccctaaaattgatgtcttttggtttatgaaatcagtaatttttgatatttccccagttctttttaatggggtcaataatggacattctagtttaaggtggttgatggatttagccatatatgctgctaaagaaattgtctaccttttcttcctcacctgttccatttatgtaaagttgagattagagggaaagcattttctatatcaattgtgtttaaacctttcaagaaggttatttagctagcttagtgttgaactaaattttttttaaacaaggcaaggtctaatgctgttttgagattctgaaattaatgaaaatacttatttcagaaatgcatttaatgctttttttcttgtgacagttacgcaaatcagcttgaattccatatgtccctgagttatttttatcataaagccacaaatgtattataacaaggcaaattgtaatatatataatcctgaactca

SEQ ID NO: 444927 - DNA, 825 bp, Homo sapiens
  misc_feature (743)..(743): n is a, c, g, or t
  misc_feature (825)..(825): n is a, c, g, or t
cgcggcggcctgagcggcgggcccctcccttagcgggggcgcgcggcgctgaggaccgcacggaaacggggaagtcaggtggccgctgccgccgccgccgccgcggtttgtcgccagaaggaagatggcggatctggaggagcagttgtctgatgaagagaaggtgcgtatagcagcaaaattcatcattcatgcccctcctggagaatttaatgaggttttcaatgatgttcggttactgcttaataatgacaatcttctcagggaaggagcagcccatgcatttgcacagtataacttggaccagtttactccagtaaaaattgaaggttatgaagatcaggtattgataacagaacatggcgacttgggaaatggaaagtttttggatccaaagaacagaatctgttttaaatttgatcacttaaggaaggaggcaactgatccaagaccctgtgaagtagaaaatgcagttgaatcatggagaacttcagtagaaactgctctgagagcttacgtaaaagaacattacccgaatggagtctgcactgtgtatggcaaaaaaatagatggacagcaaaccattattgcatgcatagaaagccatcagttccaagcaaaaaatttttggaatggtcgttggaggtcagaatggaagtttacaatcactccttcaaccactcaagtggttggcatcttgaaaattcagattccctaacagtgtctattgaaagtgcaacagncaaagaatttattaagattgtagaagctgcagaaatgaataccagactgccatcagtgagaattattagacccatgtcgacn

SEQ ID NO: 444928 - DNA, 613 bp, Homo sapiens
  misc_feature (609)..(609): n is a, c, g, or t
cgcggcggcctgagcggcgggcccctcccttagcgggggcgcgcggcgctgaggaccgcacggaaacggggaagtcaggtggccgctgccgccgccgccgccgcggtttgtcgccagaaggaagatggcggatctggaggagcagttgtctgatgaagagaaggtgcgtatagcagcaaaattcatcattcatgcccctcctggagaatttaatgaggttttcaatgatgttcggttactgcttaataatgacaatcttctcagggaaggagcagcccatgcatttgcacagtataacttggaccagtttactccagtaaaaattgaaggttatgaagatcaggtattgataacagaacatggcgacttgggaaatggaaagtttttggatccaaagaacagaatctgttttaaatttgatcacttaaggaaggaggcaactgatccaagaccctgtgaagtagaaaatgcagttgaatcatggagaacttcagtagaaactgctctgagagcttacgtaaaagaacattacccgaatggagtctgcactcgcagctatgcaaatgctgctagtgcgccaaaaaaactagcagtgcgcacagccaaacncagt

SEQ ID NO: 444929 - DNA, 2323 bp, Homo sapiens
cgcggcggcctgagcggcgggcccctcccttagcgggggcgcgcggcgctgaggaccgcacggaaacggggaagtcaggtggccgctgccgccgccgccgccgcggtttgtcgccagaaggaagatggcggatctggaggagcagttgtctgatgaagagaaggtgcgtatagcagcaaaattcatcattcatgcccctcctggagaatttaatgaggttttcaatgatgttcggttactgcttaataatgacaatcttctcagggaaggagcagcccatgcatttgcacagtataacttggaccagtttactccagtaaaaattgaaggttatgaagatcaggtattgataacagaacatggcgacttgggaaatggaaagtttttggatccaaagaacagaatctgttttaaatttgatcacttaaggaaggaggcaactgatccaagaccctgtgaagtagaaaatgcagttgaatcatggagaacttcagtagaaactgctctgagagcttacgtaaaagaacattacccgaatggagtctgcactgtgtatggcaaaaaaatagatggacagcaaaccattattgcatgcatagaaagccatcagttccaagcaaaaaatttttggaatggtcgttggaggtcagaatggaagtttacaatcactccttcaaccactcaagtggttggcatcttgaaaattcaggttcattattatgaagatggtaatgttcagctagtgagtcataaagatatacaagattccctaacagtgtctaatgaagtgcaaacagcaaaagaatttataaagattgtagaagctgcagaaaatgaataccagactgccatcagtgagaattatcagacaatgtcggacactactttcaaagccttacgtcgacagttgccagttacacgcactaagattgattggaacaagatccttagctacaagattggcaaagagatgcagaatgcataagatgaacattgcatgaccggatcattttagtgtctttgcgttaaaaaatcattgcaaaagtattctgaactgtcaagctgcccagtcagatgggctgttgccatttaaaatcactgtaattaattagtttgattagagcacaaagcttagctaatcaaccattatttttcattttgtttgttctaagaggattgaaaatcagtttagtttaaatgtctttctgttaggcctttctttcttacaatgaagagatgattcttctagtttatggttaaaagtttttgaagtgtctcaaaaatattttactaactgtaaccctaaaattgatgtcttttggtttatgaaatcagtaatttttgatatttccccagttctttttaatggggtcaataatggacattctagtttaaggtggttgatggatttagccatatatgctgctaaagaaattgtctaccttttcttcctcacctgttccatttatgtaaagttgagattagagggaaagcattttctatatcaattgtgtttaaacctttcaagaaggttatttagctagcttagtgttgaactaaattttttttaaacaaggcaaggtctaatgctgttttgagattctgaaattaatgaaaatacttatttcagaaatgcatttaatgctttttttcttgtgacagttacgcaaatcagcttgaattccatatgtccctgagttatttttatcataaagccacaaatgtattataacaaggcaaattgtaatatatataatcctgaactcatgaccatgtctcggtttatttttttttcttggattgaaaagtactgaaattcaatgtgacattaaaatgcaaattttcctatttatttgagtagaaaatcacttaccagtgagcatatatattttaaaatactttctttggatattgtaattcttaactggttgtaaattagaaaagctgggattacatatggtgtgcggttacagtctaaattttttcatcctcctatgcatcataagcatgtttgtaatattttcattaccatagggagtgaagtggagttatggtttcattcaatagagtattgctgattatacttgagtggaatcctttcctcacgtactcccacagacgtctgggcctggaaattttttttttattttattttattgtttttttttttagaaaaacaccacttttattatgtacaataaaatatttcattagcttgaattgtatagatttttaaaaattcaatgaaagcatgttgtttaatttctttttaaaatcactgttgggctttgaaagcattgagaatataatatgaaattatgac

SEQ ID NO: 444930 - DNA, 1888 bp, Homo sapiens
cgcggcggcctgagcggcgggcccctcccttagcgggggcgcgcggcgctgaggaccgcacggaaacggggaagtcaggtggccgctgccgccgccgccgccgcggtttgtcgccagaaggaagatggcggatctggaggagcagttgtctgatgaagagaaggtgcgtatagcagcaaaattcatcattcatgcccctcctggagaatttaatgaggttttcaatgatgttcggttactgcttaataatgacaatcttctcagggaaggagcagcccatgcatttgcacagtataacttggaccagtttactccagtaaaaattgaaggttatgaagatcaggtattgataacagaacatggcgacttgggaaatggaaagtttttggatccaaagaacagaatctgttttaaatttgatcacttaaggaaggaggcaactgatccaagaccctgtgaagtagaaaatgcagttgaatcatggagaacttcagtagaaactgctctgagagcttacgtaaaagaacattacccgaatggagtctgcactgtgtatggcaaaaaaatagatggacagcaaaccattattgcatgcatagaaagccatcagttccaagcaaaaaatttttggaatggtcgttggaggtcagaatggaagtttacaatcactccttcaaccactcaagtggttggcatcttgaaaattcaggttcattattatgaagatggtaatgttcagctagtgagtcataaagatatacaagattccctaacagtgtctaatgaagtgcaaacagcaaaagaatttataaagattgtagaagctgcagaaaatgaataccagactgccatcagtgagaattatcagacaatgtcggacactactttcaaagccttacgtcgacagttgccagttacacgcactaagattgattggaacaagatccttagctacaagattggcaaagagatgcagaatgcataagatgaacattgcatgaccggatcattttagtgtctttgcgttaaaaaatcattgcaaaagtattctgaactgtcaagctgcccagtcagatgggctgttgccatttaaaatcactgtaattaattagtttgattagagcacaaagcttagctaatcaaccattatttttcattttgtttgttctaagaggattgaaaatcagtttagtttaaatgtctttctgttaggcctttctttcttacaatgaagagatgattcttctagtttatggttaaaagtttttgaagtgtctcaaaaatattttactaactgtaaccctaaaattgatgtcttttggtttatgaaatcagtaatttttgatatttccccagttctttttaatggggtcaataatggacattctagtttaaggtggttgatggatttagccatatatgctgctaaagaaattgtctaccttttcttcctcacctgttccatttatgtaaagttgagattagagggaaagcattttctatatcaattgtgtttaaacctttcaagaaggttatttagctagcttagtgttgaactaaattttttttaaacaaggcaaggtctaatgctgttttgagattctgaaattaatgaaaatacttatttcagaaatgcatttaatgctttttttcttgtgacagttacgcaaatcagcttgaattccatatgtccctgagttatttttatcataaagccacaaatgtattataacaaggcaaattgtaatatatataatcctgaactcatgaccatgtctcggtttatttttttttcttggattgaaaagtactgaaattcaatgtgacattaaaatgcaaattttcctaaaaaaaaaaagtcgacgcggccgcgaatttagtagtagta

SEQ ID NO: 444931 - DNA, 2038 bp, Homo sapiens
  misc_feature (1797)..(1797): n is a, c, g, or t
  misc_feature (1803)..(1803): n is a, c, g, or t
cgcggcggcctgagcggcgggcccctcccttagcgggggcgcgcggcgctgaggaccgcacggaaacggggaagtcaggtggccgctgccgccgccgccgccgcggtttgtcgccagaaggaagatggcggatctggaggagcagttgtctgatgaagagaaggtgcgtatagcagcaaaattcatcattcatgcccctcctggagaatttaatgaggttttcaatgatgttcggttactgcttaataatgacaatcttctcagggaaggagcagcccatgcatttgcacagtataacttggaccagtttactccagtaaaaattgaaggttatgaagatcaggtattgataacagaacatggcgacttgggaaatggaaagtttttggatccaaagaacagaatctgttttaaatttgatcacttaaggaaggaggcaactgatccaagaccctgtgaagtagaaaatgcagttgaatcatggagaacttcagtagaaactgctctgagagcttacgtaaaagaacattacccgaatggagtctgcactgtgtatggcaaaaaaatagatggacagcaaaccattattgcatgcatagaaagccatcagttccaagcaaaaaatttttggaatggtcgttggaggtcagaatggaagtttacaatcactccttcaaccactcaagtggttggcatcttgaaaattcaggttcattattatgaagatggtaatgttcagctagtgagtcataaagatatacaagattccctaacagtgtctaatgaagtgcaaacagcaaaagaatttataaagattgtagaagctgcagaaaatgaataccagactgccatcagtgagaattatcagacaatgtcggacactactttcaaagccttacgtcgacagttgccagttacacgcactaagattgattggaacaagatccttagctacaagattggcaaagagatgcagaatgcataagatgaacattgcatgaccggatcattttagtgtctttgcgttaaaaaatcattgcaaaagtattctgaactgtcaagctgcccagtcagatgggctgttgccatttaaaatcactgtaattaattagtttgattagagcacaaagcttagctaatcaaccattatttttcattttgtttgttctaagaggattgaaaatcagtttagtttaaatgtctttctgttaggcctttctttcttacaatgaagagatgattcttctagtttatggttaaaagtttttgaagtgtctcaaaaatattttactaactgtaaccctaaaattgatgtcttttggtttatgaaatcagtaatttttgatatttccccagttctttttaatggggtcaataatggacattctagtttaaggtggttgatggatttagccatatatgctgctaaagaaattgtctaccttttcttcctcacctgttccatttatgtaaagttgagattagagggaaagcattttctatatcaattgtgtttaaacctttcaagaaggttatttagctagcttagtgttgaactaaattttttttaaacaaggcaaggtctaatgctgttttgagattctgaaattaatgaaaatacttatttcagaaatgcatttaatgctttttttcttgtgacagttacgcaaatcagcttgaattccatatgtccctgagttatttttatcataaagccacaaatgtattataacaaggcaaattgtaatatatataatcctgaactcaaaaaaaaaaaaaaaaaaaaaaaaaaaaaanaaaaanaaaaaaaaaaaaaaaaaaacctcccacggggggagaaccgcgcgacaaagggggcgcgaacaccctccgggggggggaccccacggacaacagtttgtgtggcccctaatgagaggaaggggagataatcgagagaggtagggaggaaaaaaagggggcaaaaaagagtgacaccggggtgaaaatatggtaacccgcgccaaaaaattcccaaaaaattgcagaaaaaaggcga

SEQ ID NO: 444932 - DNA, 2454 bp, Homo sapiens
cgcggcggcctgagcggcgggcccctcccttagcgggggcgcgcggcgctgaggaccgcacggaaacggggaagtcaggtggccgctgccgccgccgccgccgcggtttgtcgccagaaggaagatggcggatctggaggagcagttgtctgatgaagagaagaaatgtatgagagttcctgttctgcatcctcaccagcactgggtgttatgtcctttttattttagccatactattaggtgcgtatagcagcaaaattcatcattcatgcccctcctggagaatttaatgaggttttcaatgatgttcggttactgcttaataatgacaatcttctcagggaaggagcagcccatgcatttgcacagtataacttggaccagtttactccagtaaaaattgaaggttatgaagatcaggtattgataacagaacatggcgacttgggaaatggaaagtttttggatccaaagaacagaatctgttttaaatttgatcacttaaggaaggaggcaactgatccaagaccctgtgaagtagaaaatgcagttgaatcatggagaacttcagtagaaactgctctgagagcttacgtaaaagaacattacccgaatggagtctgcactgtgtatggcaaaaaaatagatggacagcaaaccattattgcatgcatagaaagccatcagttccaagcaaaaaatttttggaatggtcgttggaggtcagaatggaagtttacaatcactccttcaaccactcaagtggttggcatcttgaaaattcaggttcattattatgaagatggtaatgttcagctagtgagtcataaagatatacaagattccctaacagtgtctaatgaagtgcaaacagcaaaagaatttataaagattgtagaagctgcagaaaatgaataccagactgccatcagtgagaattatcagacaatgtcggacactactttcaaagccttacgtcgacagttgccagttacacgcactaagattgattggaacaagatccttagctacaagattggcaaagagatgcagaatgcataagatgaacattgcatgaccggatcattttagtgtctttgcgttaaaaaatcattgcaaaagtattctgaactgtcaagctgcccagtcagatgggctgttgccatttaaaatcactgtaattaattagtttgattagagcacaaagcttagctaatcaaccattatttttcattttgtttgttctaagaggattgaaaatcagtttagtttaaatgtctttctgttaggcctttctttcttacaatgaagagatgattcttctagtttatggttaaaagtttttgaagtgtctcaaaaatattttactaactgtaaccctaaaattgatgtcttttggtttatgaaatcagtaatttttgatatttccccagttctttttaatggggtcaataatggacattctagtttaaggtggttgatggatttagccatatatgctgctaaagaaattgtctaccttttcttcctcacctgttccatttatgtaaagttgagattagagggaaagcattttctatatcaattgtgtttaaacctttcaagaaggttatttagctagcttagtgttgaactaaattttttttaaacaaggcaaggtctaatgctgttttgagattctgaaattaatgaaaatacttatttcagaaatgcatttaatgctttttttcttgtgacagttacgcaaatcagcttgaattccatatgtccctgagttatttttatcataaagccacaaatgtattataacaaggcaaattgtaatatatataatcctgaactcatgaccatgtctcggtttatttttttttcttggattgaaaagtactgaaattcaatgtgacattaaaatgcaaattttcctatttatttgagtagaaaatcacttaccagtgagcatatatattttaaaatactttctttggatattgtaattcttaactggttgtaaattagaaaagctgggattacatatggtgtgcggttacagtctaaattttttcatcctcctatgcatcataagcatgtttgtaatattttcaaaaatagttctactgatgctacaggaatttcaagcctgtggtgaatgttagtatttaccatagggagtgaagtggagttatggtttcattcaatagagtattgctgattatacttgagtggaatcctttcctcacgtactcccacagacgtctgggcctggaaattttttttttattttattttattgtttttttttttagaaaaacaccacttttattatgtacaataaaatatttcattagcttgaattgtatagatttttaaaaattcaatgaaagcatgttgtttaatttctttttaaaatcactgttgggctttgaaagcattgagaatataatatgaaattatgac

SEQ ID NO: 444933 - DNA, 2397 bp, Homo sapiens
cgcggcggcctgagcggcgggcccctcccttagcgggggcgcgcggcgctgaggaccgcacggaaacggggaagtcaggtggccgctgccgccgccgccgccgcggtttgtcgccagaaggaagatggcggatctggaggagcagttgtctgatgaagagaaggtgcgtatagcagcaaaattcatcattcatgcccctcctggagaatttaatgaggttttcaatgatgttcggttactgcttaataatgacaatcttctcagggaaggagcagcccatgcatttgcacagtataacttggaccagtttactccagtaaaaattgaaggttatgaagatcaggtattgataacagaacatggcgacttgggaaatggaaagtttttggatccaaagaacagaatctgttttaaatttgatcacttaaggaaggaggcaactgatccaagaccctgtgaagtagaaaatgcagttgaatcatggagaacttcagtagaaactgctctgagagcttacgtaaaagaacattacccgaatggagtctgcactgtgtatggcaaaaaaatagatggacagcaaaccattattgcatgcatagaaagccatcagttccaagcaaaaaatttttgctgctgtttttatttttaaggaatggtcgttggaggtcagaatggaagtttacaatcactccttcaaccactcaagtggttggcatcttgaaaattcaggttcattattatgaagatggtaatgttcagctagtgagtcataaagatatacaagattccctaacagtgtctaatgaagtgcaaacagcaaaagaatttataaagattgtagaagctgcagaaaatgaataccagactgccatcagtgagaattatcagacaatgtcggacactactttcaaagccttacgtcgacagttgccagttacacgcactaagattgattggaacaagatccttagctacaagattggcaaagagatgcagaatgcataagatgaacattgcatgaccggatcattttagtgtctttgcgttaaaaaatcattgcaaaagtattctgaactgtcaagctgcccagtcagatgggctgttgccatttaaaatcactgtaattaattagtttgattagagcacaaagcttagctaatcaaccattatttttcattttgtttgttctaagaggattgaaaatcagtttagtttaaatgtctttctgttaggcctttctttcttacaatgaagagatgattcttctagtttatggttaaaagtttttgaagtgtctcaaaaatattttactaactgtaaccctaaaattgatgtcttttggtttatgaaatcagtaatttttgatatttccccagttctttttaatggggtcaataatggacattctagtttaaggtggttgatggatttagccatatatgctgctaaagaaattgtctaccttttcttcctcacctgttccatttatgtaaagttgagattagagggaaagcattttctatatcaattgtgtttaaacctttcaagaaggttatttagctagcttagtgttgaactaaattttttttaaacaaggcaaggtctaatgctgttttgagattctgaaattaatgaaaatacttatttcagaaatgcatttaatgctttttttcttgtgacagttacgcaaatcagcttgaattccatatgtccctgagttatttttatcataaagccacaaatgtattataacaaggcaaattgtaatatatataatcctgaactcatgaccatgtctcggtttatttttttttcttggattgaaaagtactgaaattcaatgtgacattaaaatgcaaattttcctatttatttgagtagaaaatcacttaccagtgagcatatatattttaaaatactttctttggatattgtaattcttaactggttgtaaattagaaaagctgggattacatatggtgtgcggttacagtctaaattttttcatcctcctatgcatcataagcatgtttgtaatattttcaaaaatagttctactgatgctacaggaatttcaagcctgtggtgaatgttagtatttaccatagggagtgaagtggagttatggtttcattcaatagagtattgctgattatacttgagtggaatcctttcctcacgtactcccacagacgtctgggcctggaaattttttttttattttattttattgtttttttttttagaaaaacaccacttttattatgtacaataaaatatttcattagcttgaattgtatagatttttaaaaattcaatgaaagcatgttgtttaatttctttttaaaatcactgttgggctttgaaagcattgagaatataatatgaaattatgac

SEQ ID NO: 444934 - DNA, 2317 bp, Homo sapiens
cgcggcggcctgagcggcgggcccctcccttagcgggggcgcgcggcgctgaggaccgcacggaaacggggaagtcaggtggccgctgccgccgccgccgccgcggtttgtcgccagaaggaagatggcggatctggaggagcagttgtctgatgaagagaaggtgcgtatagcagcaaaattcatcattcatgcccctcctggagaatttaatgaggttttcaatgatgttcggttactgcttaataatgacaatcttctcagggaaggagcagcccatgcatttgcacagtataacttggaccagtttactccagtaaaaattgaaggttatgaagatcaggtattgataacagaacatggcgacttgggaaatggaaagtttttggatccaaagaacagaatctgttttaaatttgatcacttaaggaaggaggcaactgatccaagaccctgtgaagtagaaaatgcagttgaatcatggagaacttcagtagaaactgctctgagagcttacgtaaaagaacattacccgaatggagtctgcactctgctgtttttatttttaaggaatggtcgttggaggtcagaatggaagtttacaatcactccttcaaccactcaagtggttggcatcttgaaaattcaggttcattattatgaagatggtaatgttcagctagtgagtcataaagatatacaagattccctaacagtgtctaatgaagtgcaaacagcaaaagaatttataaagattgtagaagctgcagaaaatgaataccagactgccatcagtgagaattatcagacaatgtcggacactactttcaaagccttacgtcgacagttgccagttacacgcactaagattgattggaacaagatccttagctacaagattggcaaagagatgcagaatgcataagatgaacattgcatgaccggatcattttagtgtctttgcgttaaaaaatcattgcaaaagtattctgaactgtcaagctgcccagtcagatgggctgttgccatttaaaatcactgtaattaattagtttgattagagcacaaagcttagctaatcaaccattatttttcattttgtttgttctaagaggattgaaaatcagtttagtttaaatgtctttctgttaggcctttctttcttacaatgaagagatgattcttctagtttatggttaaaagtttttgaagtgtctcaaaaatattttactaactgtaaccctaaaattgatgtcttttggtttatgaaatcagtaatttttgatatttccccagttctttttaatggggtcaataatggacattctagtttaaggtggttgatggatttagccatatatgctgctaaagaaattgtctaccttttcttcctcacctgttccatttatgtaaagttgagattagagggaaagcattttctatatcaattgtgtttaaacctttcaagaaggttatttagctagcttagtgttgaactaaattttttttaaacaaggcaaggtctaatgctgttttgagattctgaaattaatgaaaatacttatttcagaaatgcatttaatgctttttttcttgtgacagttacgcaaatcagcttgaattccatatgtccctgagttatttttatcataaagccacaaatgtattataacaaggcaaattgtaatatatataatcctgaactcatgaccatgtctcggtttatttttttttcttggattgaaaagtactgaaattcaatgtgacattaaaatgcaaattttcctatttatttgagtagaaaatcacttaccagtgagcatatatattttaaaatactttctttggatattgtaattcttaactggttgtaaattagaaaagctgggattacatatggtgtgcggttacagtctaaattttttcatcctcctatgcatcataagcatgtttgtaatattttcaaaaatagttctactgatgctacaggaatttcaagcctgtggtgaatgttagtatttaccatagggagtgaagtggagttatggtttcattcaatagagtattgctgattatacttgagtggaatcctttcctcacgtactcccacagacgtctgggcctggaaattttttttttattttattttattgtttttttttttagaaaaacaccacttttattatgtacaataaaatatttcattagcttgaattgtatagatttttaaaaattcaatgaaagcatgttgtttaatttctttttaaaatcactgttgggctttgaaagcattgagaatataatatgaaattatgac

SEQ ID NO: 444935 - DNA, 292 bp, Homo sapiens
  misc_feature (20)..(21): n is a, c, g, or t
  misc_feature (27)..(27): n is a, c, g, or t
cctggcttgctcaggtctcnnggcttnctcaggtccctggcttctgaggtctctgtggcaggcctggtcaggctctccatgaggttagaaggccaggtagtgttccagcagggtggtggccaagccaaccccatgattgatgtgtacgattcactcctttgagtctttgaatggcaactcagccccctggcaagccaggcctggcttgctcaggtctacaattcccatatctctaagttccagcctcttctccttaaactcctgactcatttatccaaccactgcagatgtt

SEQ ID NO: 444936 - DNA, 158 bp, Homo sapiens
atcatctttattcagctcaggagtggggtggctggaagcataagcttcaggtccagagagcaagtggcagaggctggatccaaacccatcttcctggacctgaagcttatgcttccagccaccccactcctgagctgaataaagatgatttaagctta

SEQ ID NO: 444937 - DNA, 2168 bp, Homo sapiens
tctaccttaccctctgactgggaggcagagacccaagcagctggaggctctgtgtgtgggtcgctgatttcttggagcctgaaaagaaagagcagcgactggacccagagccatgtggctgtgccctctggccctcaacctcatcttgatggcagcctctggtgctgtgtgcgaagtgaaggacgtttgtgttggaagccctggtatccccggcactcctggatcccacggcctgccaggcagggacgggagagatggtctcaaaggagaccctggccctccaggccccatgggtccacctggagaaatgccatgtcctcctggaaatgatgggctgcctggagcccctggtatccctggagagtgtggagagaagggggagcctggcgagaggggccctccagggcttccagctcatctagatgaggagctccaagccacactccacgactttagacatcaaatcctgcagacaaggggagccctcagtctgcagggctccataatgacagtaggagagaaggtcttctccagcaatgggcagtccatcacttttgatgccattcaggaggcatgtgccagagcaggcggccgcattgctgtcccaaggaatccagaggaaaatgaggccattgcaagcttcgtgaagaagtacaacacatatgcctatgtaggcctgactgagggtcccagccctggagacttccgctactcagacgggacccctgtaaactacaccaactggtaccgaggggagcccgcaggtcggggaaaagagcagtgtgtggagatgtacacagatgggcagtggaatgacaggaactgcctgtactcccgactgaccatctgtgagttctgagaggcatttaggccatgggacagggaggacgctctctggccttcggcctccatcctgaggctccacttggtctgtgagatgctagaactccctttcaacagaattcacttgtggctattgggactggaggcacccttagccacttcattcctctgatgggccctgactcttccccataatcactgaccagccttgacactccccttgcaaactcatcccagcactgcaccccaggcagccactcttagccttggccttcgacatgagatggagccctccttattccccatctggtccagttccttcacttacagatggcagcagtgaggtcttggggtagaaggaccctccaaagtcacacaaagtgcctgcctcctggtcccctcagctctctctctgcaacccagtgccatcaggatgagcaatcctggccaagcataatgacagagagaggcagacttcggggaagccctgactgtgcagagctaaggacacagtggagattctctggcactctgaggtctctgtggcaggcctggtcaggctctccatgaggttagaaggccaggtagtgttccagcagggtggtggccaagccaaccccatgattgatgtgtacgattcactcctttgagtctttgaatggcaactcagccccctgacctgaagacagccagcctaggcctctagggtgacctagagccgccttcagatgtgacccgagtaactttcaactgatgaacaaatctgcaccctacttcagatttcagtgggcattcacatcaccccccacaccactggctctgctttctcctttcattaatccattcacccagatatttcattaaaattatcacgtgccaggtcttaggatatgtcgtggggtgggcaaggtaatcagtgacagttgaagatttttttttcccagagcttatgtcttcatctgtgaaatgggaataagatacttgttgctgtcacagttattaccatccccccagctaccaaaattactaccagaactgttactatacacagaggctattgactgagcacctatcatttgccaagaaccttgacaagcacttctaatacagcatattatgtactattcaatctttacacaatgtcacgggaccagtattgtttcctcattttttataaggacactgaagcttggaggagttaaatgttttgagtattattccagagagcaagtggcagaggctggatccaaacccatcttcctggacctgaagcttatgcttccagccaccccactcctgagctgaataaagatgatttaagctta

SEQ ID NO: 444938 - DNA, 2234 bp, Homo sapiens
tctaccttaccctctgactgggaggcagagacccaagcagctggaggctctgtgtgtggcctggagaccccacaacctccagccggaggcctgaagcatgaggccatgccaggtgccaggagcagcgactggacccagagccatgtggctgtgccctctggccctcaacctcatcttgatggcagcctctggtgctgtgtgcgaagtgaaggacgtttgtgttggaagccctggtatccccggcactcctggatcccacggcctgccaggcagggacgggagagatggtctcaaaggagaccctggccctccaggccccatgggtccacctggagaaatgccatgtcctcctggaaatgatgggctgcctggagcccctggtatccctggagagtgtggagagaagggggagcctggcgagaggggccctccagggcttccagctcatctagatgaggagctccaagccacactccacgactttagacatcaaatcctgcagacaaggggagccctcagtctgcagggctccataatgacagtaggagagaaggtcttctccagcaatgggcagtccatcacttttgatgccattcaggaggcatgtgccagagcaggcggccgcattgctgtcccaaggaatccagaggaaaatgaggccattgcaagcttcgtgaagaagtacaacacatatgcctatgtaggcctgactgagggtcccagccctggagacttccgctactcagacgggacccctgtaaactacaccaactggtaccgaggggagcccgcaggtcggggaaaagagcagtgtgtggagatgtacacagatgggcagtggaatgacaggaactgcctgtactcccgactgaccatctgtgagttctgagaggcatttaggccatgggacagggaggacgctctctggccttcggcctccatcctgaggctccacttggtctgtgagatgctagaactccctttcaacagaattcacttgtggctattgggactggaggcacccttagccacttcattcctctgatgggccctgactcttccccataatcactgaccagccttgacactccccttgcaaactcatcccagcactgcaccccaggcagccactcttagccttggccttcgacatgagatggagccctccttattccccatctggtccagttccttcacttacagatggcagcagtgaggtcttggggtagaaggaccctccaaagtcacacaaagtgcctgcctcctggtcccctcagctctctctctgcaacccagtgccatcaggatgagcaatcctggccaagcataatgacagagagaggcagacttcggggaagccctgactgtgcagagctaaggacacagtggagattctctggcactctgaggtctctgtggcaggcctggtcaggctctccatgaggttagaaggccaggtagtgttccagcagggtggtggccaagccaaccccatgattgatgtgtacgattcactcctttgagtctttgaatggcaactcagccccctgacctgaagacagccagcctaggcctctagggtgacctagagccgccttcagatgtgacccgagtaactttcaactgatgaacaaatctgcaccctacttcagatttcagtgggcattcacatcaccccccacaccactggctctgctttctcctttcattaatccattcacccagatatttcattaaaattatcacgtgccaggtcttaggatatgtcgtggggtgggcaaggtaatcagtgacagttgaagatttttttttcccagagcttatgtcttcatctgtgaaatgggaataagatacttgttgctgtcacagttattaccatccccccagctaccaaaattactaccagaactgttactatacacagaggctattgactgagcacctatcatttgccaagaaccttgacaagcacttctaatacagcatattatgtactattcaatctttacacaatgtcacgggaccagtattgtttcctcattttttataaggacactgaagcttggaggagttaaatgttttgagtattattccagagagcaagtggcagaggctggatccaaacccatcttcctggacctgaagcttatgcttccagccaccccactcctgagctgaataaagatgatttaagcttaataaatcgtgaatgtgttcacatgagtttccatagc

SEQ ID NO: 444939 - DNA, 2174 bp, Homo sapiens
tctaccttaccctctgactgggaggcagagacccaagcagctggaggctctgtgtgtgggagcagcgactggacccagagccatgtggctgtgccctctggccctcaacctcatcttgatggcagcctctggtgctgtgtgcgaagtgaaggacgtttgtgttggaagccctggtatccccggcactcctggatcccacggcctgccaggcagggacgggagagatggtctcaaaggagaccctggccctccaggccccatgggtccacctggagaaatgccatgtcctcctggaaatgatgggctgcctggagcccctggtatccctggagagtgtggagagaagggggagcctggcgagaggggccctccagggcttccagctcatctagatgaggagctccaagccacactccacgactttagacatcaaatcctgcagacaaggggagccctcagtctgcagggctccataatgacagtaggagagaaggtcttctccagcaatgggcagtccatcacttttgatgccattcaggaggcatgtgccagagcaggcggccgcattgctgtcccaaggaatccagaggaaaatgaggccattgcaagcttcgtgaagaagtacaacacatatgcctatgtaggcctgactgagggtcccagccctggagacttccgctactcagacgggacccctgtaaactacaccaactggtaccgaggggagcccgcaggtcggggaaaagagcagtgtgtggagatgtacacagatgggcagtggaatgacaggaactgcctgtactcccgactgaccatctgtgagttctgagaggcatttaggccatgggacagggaggacgctctctggccttcggcctccatcctgaggctccacttggtctgtgagatgctagaactccctttcaacagaattcacttgtggctattgggactggaggcacccttagccacttcattcctctgatgggccctgactcttccccataatcactgaccagccttgacactccccttgcaaactcatcccagcactgcaccccaggcagccactcttagccttggccttcgacatgagatggagccctccttattccccatctggtccagttccttcacttacagatggcagcagtgaggtcttggggtagaaggaccctccaaagtcacacaaagtgcctgcctcctggtcccctcagctctctctctgcaacccagtgccatcaggatgagcaatcctggccaagcataatgacagagagaggcagacttcggggaagccctgactgtgcagagctaaggacacagtggagattctctggcactctgaggtctctgtggcaggcctggtcaggctctccatgaggttagaaggccaggtagtgttccagcagggtggtggccaagccaaccccatgattgatgtgtacgattcactcctttgagtctttgaatggcaactcagccccctgacctgaagacagccagcctaggcctctagggtgacctagagccgccttcagatgtgacccgagtaactttcaactgatgaacaaatctgcaccctacttcagatttcagtgggcattcacatcaccccccacaccactggctctgctttctcctttcattaatccattcacccagatatttcattaaaattatcacgtgccaggtcttaggatatgtcgtggggtgggcaaggtaatcagtgacagttgaagatttttttttcccagagcttatgtcttcatctgtgaaatgggaataagatacttgttgctgtcacagttattaccatccccccagctaccaaaattactaccagaactgttactatacacagaggctattgactgagcacctatcatttgccaagaaccttgacaagcacttctaatacagcatattatgtactattcaatctttacacaatgtcacgggaccagtattgtttcctcattttttataaggacactgaagcttggaggagttaaatgttttgagtattattccagagagcaagtggcagaggctggatccaaacccatcttcctggacctgaagcttatgcttccagccaccccactcctgagctgaataaagatgatttaagcttaataaatcgtgaatgtgttcacatgagtttccatagc

SEQ ID NO: 444940 - DNA, 2041 bp, Homo sapiens
tctaccttaccctctgactgggaggcagagacccaagcagctggaggctctgtgtgtggcctggagaccccacaacctccagccggaggcctgaagcatgaggccatgccaggtgccaggagcagcgactggacccagagccatgtggctgtgccctctggccctcaacctcatcttgatggcagcctctggtgctgtgtgcgaagtgaaggacgtttgtgttggaagccctgactcttccccataatcactgaccagccttgacactccccttgcaaactctcccagcactgcaccccaggcagccactcttagccttccctcagtctgcagggctccataatgacagtaggagagaaggtcttctccagcaatgggcagtccatcacttttgatgccattcaggaggcatgtgccagagcaggcggccgcattgctgtcccaaggaatccagaggaaaatgaggccattgcaagcttcgtgaagaagtacaacacatatgcctatgtaggcctgactgagggtcccagccctggagacttccgctactcagacgggacccctgtaaactacaccaactggtaccgaggggagcccgcaggtcggggaaaagagcagtgtgtggagatgtacacagatgggcagtggaatgacaggaactgcctgtactcccgactgaccatctgtgagttctgagaggcatttaggccatgggacagggaggacgctctctggccttcggcctccatcctgaggctccacttggtctgtgagatgctagaactccctttcaacagaattcacttgtggctattgggactggaggcacccttagccacttcattcctctgatgggccctgactcttccccataatcactgaccagccttgacactccccttgcaaactcatcccagcactgcaccccaggcagccactcttagccttggccttcgacatgagatggagccctccttattccccatctggtccagttccttcacttacagatggcagcagtgaggtcttggggtagaaggaccctccaaagtcacacaaagtgcctgcctcctggtcccctcagctctctctctgcaacccagtgccatcaggatgagcaatcctggccaagcataatgacagagagaggcagacttcggggaagccctgactgtgcagagctaaggacacagtggagattctctggcactctgaggtctctgtggcaggcctggtcaggctctccatgaggttagaaggccaggtagtgttccagcagggtggtggccaagccaaccccatgattgatgtgtacgattcactcctttgagtctttgaatggcaactcagccccctgacctgaagacagccagcctaggcctctagggtgacctagagccgccttcagatgtgacccgagtaactttcaactgatgaacaaatctgcaccctacttcagatttcagtgggcattcacatcaccccccacaccactggctctgctttctcctttcattaatccattcacccagatatttcattaaaattatcacgtgccaggtcttaggatatgtcgtggggtgggcaaggtaatcagtgacagttgaagatttttttttcccagagcttatgtcttcatctgtgaaatgggaataagatacttgttgctgtcacagttattaccatccccccagctaccaaaattactaccagaactgttactatacacagaggctattgactgagcacctatcatttgccaagaaccttgacaagcacttctaatacagcatattatgtactattcaatctttacacaatgtcacgggaccagtattgtttcctcattttttataaggacactgaagcttggaggagttaaatgttttgagtattattccagagagcaagtggcagaggctggatccaaacccatcttcctggacctgaagcttatgcttccagccaccccactcctgagctgaataaagatgatttaagcttaataaatcgtgaatgtgttcacatgagtttccatagc

SEQ ID NO: 444941 - DNA, 2026 bp, Homo sapiens
tcgccagcacgggattcctggagcaagagacccaagcagctggaggctctgtgtgtgggagcagcgactggacccagagccatgtggctgtgccctctggccctcaacctcatcttgatggcagcctctggtgctgtgtgcgaagtgaaggacgtttgtgttggaagccctggtatccctggagagtgtggagagaagggggagcctggcgagaggggccctccagggcttccagctcatctagatgaggagctccaagccacactccacgactttagacatcaaatcctgcagacaaggggagccctcagtctgcagggctccataatgacagtaggagagaaggtcttctccagcaatgggcagtccatcacttttgatgccattcaggaggcatgtgccagagcaggcggccgcattgctgtcccaaggaatccagaggaaaatgaggccattgcaagcttcgtgaagaagtacaacacatatgcctatgtaggcctgactgagggtcccagccctggagacttccgctactcagacgggacccctgtaaactacaccaactggtaccgaggggagcccgcaggtcggggaaaagagcagtgtgtggagatgtacacagatgggcagtggaatgacaggaactgcctgtactcccgactgaccatctgtgagttctgagaggcatttaggccatgggacagggaggacgctctctggccttcggcctccatcctgaggctccacttggtctgtgagatgctagaactccctttcaacagaattcacttgtggctattgggactggaggcacccttagccacttcattcctctgatgggccctgactcttccccataatcactgaccagccttgacactccccttgcaaactcatcccagcactgcaccccaggcagccactcttagccttggccttcgacatgagatggagccctccttattccccatctggtccagttccttcacttacagatggcagcagtgaggtcttggggtagaaggaccctccaaagtcacacaaagtgcctgcctcctggtcccctcagctctctctctgcaacccagtgccatcaggatgagcaatcctggccaagcataatgacagagagaggcagacttcggggaagccctgactgtgcagagctaaggacacagtggagattctctggcactctgaggtctctgtggcaggcctggtcaggctctccatgaggttagaaggccaggtagtgttccagcagggtggtggccaagccaaccccatgattgatgtgtacgattcactcctttgagtctttgaatggcaactcagccccctgacctgaagacagccagcctaggcctctagggtgacctagagccgccttcagatgtgacccgagtaactttcaactgatgaacaaatctgcaccctacttcagatttcagtgggcattcacatcaccccccacaccactggctctgctttctcctttcattaatccattcacccagatatttcattaaaattatcacgtgccaggtcttaggatatgtcgtggggtgggcaaggtaatcagtgacagttgaagatttttttttcccagagcttatgtcttcatctgtgaaatgggaataagatacttgttgctgtcacagttattaccatccccccagctaccaaaattactaccagaactgttactatacacagaggctattgactgagcacctatcatttgccaagaaccttgacaagcacttctaatacagcatattatgtactattcaatctttacacaatgtcacgggaccagtattgtttcctcattttttataaggacactgaagcttggaggagttaaatgttttgagtattattccagagagcaagtggcagaggctggatccaaacccatcttcctggacctgaagcttatgcttccagccaccccactcctgagctgaataaagatgatttaagcttaataaatcgtgaatgtgttcacatgagtttccatagc

SEQ ID NO: 444942 - DNA, 2081 bp, Homo sapiens
tctaccttaccctctgactgggaggcagagacccaagcagctggaggctctgtgtgtgggtcgctgatttcttggagcctgaaaagaaagagcagcgactggacccagagccatgtggctgtgccctctggccctcaacctcatcttgatggcagcctctggtgctgtgtgcgaagtgaaggacgtttgtgttggaagccctggtatccccggcactcctggatcccacggcctgccaggcagggacgggagagatggtctcaaaggagaccctggccctccaggccccatgggtccacctggagaaatgccatgtcctcctggaaatgatgggctgcctggagcccctggtatccctggagagtgtggagagaagggggagcctggcgagaggggccctccagggcttccagctcatctagatgaggagctccaagccacactccacgactttagacatcaaatcctgcagacaaggggagccctcagtctgcagggctccataatgacagtaggagagaaggtcttctccagcaatgggcagtccatcacttttgatgccattcaggaggcatgtgccagagcaggcggccgcattgctgtcccaaggaatccagaggaaaatgaggccattgcaagcttcgtgaagaagtacaacacatatgcctatgtaggcctgactgagggtcccagccctggagacttccgctactcagacgggacccctgtaaactacaccaactggtaccgaggggagcccgcaggtcggggaaaagagcagtgtgtggagatgtacacagatgggcagtggaatgacaggaactgcctgtactcccgactgaccatctgtgagttctgagaggcatttaggccatgggacagggaggacgctctctggccttcggcctccatcctgaggctccacttggtctgtgagatgctagaactccctttcaacagaattcacttgtggctattgggactggaggcacccttagccacttcattcctctgatgggccctgactcttccccataatcactgaccagccttgacactccccttgcaaactcatcccagcactgcaccccaggcagccactcttagccttggccttcgacatgagatggagccctccttattccccatctggatgagcaatcctggccaagcataatgacagagagaggcagacttcggggaagccctgactgtgcagagctaaggacacagtggagattctctggcactctgaggtctctgtggcaggcctggtcaggctctccatgaggttagaaggccaggtagtgttccagcagggtggtggccaagccaaccccatgattgatgtgtacgattcactcctttgagtctttgaatggcaactcagccccctgacctgaagacagccagcctaggcctctagggtgacctagagccgccttcagatgtgacccgagtaactttcaactgatgaacaaatctgcaccctacttcagatttcagtgggcattcacatcaccccccacaccactggctctgctttctcctttcattaatccattcacccagatatttcattaaaattatcacgtgccaggtcttaggatatgtcgtggggtgggcaaggtaatcagtgacagttgaagatttttttttcccagagcttatgtcttcatctgtgaaatgggaataagatacttgttgctgtcacagttattaccatccccccagctaccaaaattactaccagaactgttactatacacagaggctattgactgagcacctatcatttgccaagaaccttgacaagcacttctaatacagcatattatgtactattcaatctttacacaatgtcacgggaccagtattgtttcctcattttttataaggacactgaagcttggaggagttaaatgttttgagtattattccagagagcaagtggcagaggctggatccaaacccatcttcctggacctgaagcttatgcttccagccaccccactcctgagctgaataaagatgatttaagcttaataaatcgtgaatgtgttcacatgagtttccatagc

SEQ ID NO: 444943 - DNA, 2135 bp, Homo sapiens
tctaccttaccctctgactgggaggcagagacccaagcagctggaggctctgtgtgtgggtcgctgatttcttggagcctgaaaagaaagagcagcgactggacccagagccatgtggctgtgccctctggccctcaacctcatcttgatggcagcctctggtgctgtgtgcgaagtgaaggacgtttgtgttggaagccctggtatccccggcactcctggatcccacggcctgccaggcagggacgggagagatggtctcaaaggagaccctggccctccaggccccatgggtccacctggagaaatgccatgtcctcctggaaatgatgggctgcctggagcccctggtatccctggagagtgtggagagaagggggagcctggcgagaggggccctccagggcttccagctcatctagatgaggagctccaagccacactccacgactttagacatcaaatcctgcagacaaggggagccctcagtctgcagggctccataatgacagtaggagagaaggtcttctccagcaatgggcagtccatcacttttgatgccattcaggaggcatgtgccagagcaggcggccgcattgctgtcccaaggaatccagaggaaaatgaggccattgcaagcttcgtgaagaagtacaacacatatgcctatgtaggcctgactgagggtcccagccctggagacttccgctactcagacgggacccctgtaaactacaccaactggtaccgaggggagcccgcaggtcggggaaaagagcagtgtgtggagatgtacacagatgggcagtggaatgacaggaactgcctgtactcccgactgaccatctgtgagttctgagaggcatttaggccatgggacagggaggacgctctctggccttcggcctccatcctgaggctccacttggtctgtgagatgctagaactccctttcaacagaattcacttgtggctattgggactggaggcacccttagccacttcattcctctgatgggccctgactcttccccataatcactgaccagccttgacactccccttgcaaactcatcccagcactgcaccccaggcagccactcttagccttggccttcgacatgagatggagccctccttattccccatctggtccagttccttcacttacagatggcagcagtgaggtcttggggtagaaggaccctccaaagtcacacaaagtgcctgcctcctggtcccctcagctctctctctgcaacccagtgccatcaggatgagcaatcctggccaagcataatgacagagagaggcagacttcggggaagccctgactgtgcagagctaaggacacagtggagattctctggcactctgaggtctctgtggcaggcctggtcaggctctccgattcactcctttgagtctttgaatggcaactcagccccctgacctgaagacagccagcctaggcctctagggtgacctagagccgccttcagatgtgacccgagtaactttcaactgatgaacaaatctgcaccctacttcagatttcagtgggcattcacatcaccccccacaccactggctctgctttctcctttcattaatccattcacccagatatttcattaaaattatcacgtgccaggtcttaggatatgtcgtggggtgggcaaggtaatcagtgacagttgaagatttttttttcccagagcttatgtcttcatctgtgaaatgggaataagatacttgttgctgtcacagttattaccatccccccagctaccaaaattactaccagaactgttactatacacagaggctattgactgagcacctatcatttgccaagaaccttgacaagcacttctaatacagcatattatgtactattcaatctttacacaatgtcacgggaccagtattgtttcctcattttttataaggacactgaagcttggaggagttaaatgttttgagtattattccagagagcaagtggcagaggctggatccaaacccatcttcctggacctgaagcttatgcttccagccaccccactcctgagctgaataaagatgatttaagcttaataaatcgtgaatgtgttcacatgagtttccatagc

SEQ ID NO: 444944 - DNA, 1973 bp, Homo sapiens
tctaccttaccctctgactgggaggcagagacccaagcagctggaggctctgtgtgtgggtcgctgatttcttggagcctgaaaagaaagagcagcgactggacccagagccatgtggctgtgccctctggccctcaacctcatcttgatggcagcctctggtgctgtgtgcgaagtgaaggacgtttgtgttggaagccctggtatccccggcactcctggatcccacggcctgccaggcagggacgggagagatggtctcaaaggagaccctggccctccaggccccatgggtccacctggagaaatgccatgtcctcctggaaatgatgggctgcctggagcccctggtatccctggagagtgtggagagaagggggagcctggcgagaggggccctccagggcttccagctcatctagatgaggagctccaagccacactccacgactttagacatcaaatcctgcagacaaggggagccctcagtctgcagggctccataatgacagtaggagagaaggtcttctccagcaatgggcagtccatcacttttgatgccattcaggaggcatgtgccagagcaggcggccgcattgctgtcccaaggaatccagaggaaaatgaggccattgcaagcttcgtgaagaagtacaacacatatgcctatgtaggcctgactgagggtcccagccctggagacttccgctactcagacgggacccctgtaaactacaccaactggtaccgaggggagcccgcaggtcggggaaaagagcagtgtgtggagatgtacacagatgggcagtggaatgacaggaactgcctgtactcccgactgaccatctgtgagttctgagaggcatttaggccatgggacagggaggacgctctctggccttcggcctccatcctgaggctccacttggtctgtgagatgctagaactccctttcaacagaattcacttgtggctattgggactggaggcacccttagccacttcattcctctgatgggccctgactcttccccataatcactgaccagccttgacactccccttgcaaactcatcccagcactgcaccccaggcagccactcttagccttggccttcgacatgagatggagccctccttattccccatctggtccagttccttcacttacagatggcagcagtgaggtcttggggtagaaggaccctccaaagtcacacaaagtgcctgcctcctggtcccctcagctctctctctgcaacccagtgccatcaggatgagcaatcctggccaagcataatgacagagagaggcagacttcggggaagccctgactgtgcagagctaaggacacagtggagattctctggcactctgaggtctctgtggcaggcctggtcaggctctccatgaggttagaaggccaggtagtgttccagcagggtggtggccaagccaaccccatgattgatgtgtacgattcactcctttgagtctttgaatggcaactcagccccctgacctgaagacagccagcctaggcctctagggtgacctagagccgccttcagatgtgacccgagtaactttcaactgatgaacaaatctgcaccctacttcagatttcagtgggcattcacatcaccccccacaccactggctctgctttctcctttcattaatccattcacccagatatttcatcaagcacttctaatacagcatattatgtactattcaatctttacacaatgtcacgggaccagtattgtttcctcattttttataaggacactgaagcttggaggagttaaatgttttgagtattattccagagagcaagtggcagaggctggatccaaacccatcttcctggacctgaagcttatgcttccagccaccccactcctgagctgaataaagatgatttaagcttaataaatcgtgaatgtgttcacatgagtttccatagc

SEQ ID NO: 444945 - DNA, 1727 bp, Homo sapiens
tctaccttaccctctgactgggaggcagagacccaagcagctggaggctctgtgtgtgggtcgctgatttcttggagcctgaaaagaaagagcagcgactggacccagagccatgtggctgtgccctctggccctcaacctcatcttgatggcagcctctggtgctgtgtgcgaagtgaaggacgtttgtgttggaagccctggtatccccggcactcctggatcccacggcctgccaggcagggacgggagagatggtctcaaaggagaccctggccctccaggccccatgggtccacctggagaaatgccatgtcctcctggaaatgatgggctgcctggagcccctggtatccctggagagtgtggagagaagggggagcctggcgagaggggccctccagggcttccagctcatctagatgaggagctccaagccacactccacgactttagacatcaaatcctgcagacaaggggagccctcagtctgcagggctccataatgacagtaggagagaaggtcttctccagcaatgggcagtccatcacttttgatgccattcaggaggcatgtgccagagcaggcggccgcattgctgtcccaaggaatccagaggaaaatgaggccattgcaagcttcgtgaagaagtacaacacatatgcctatgtaggcctgactgagggtcccagccctggagacttccgctactcagacgggacccctgtaaactacaccaactggtaccgaggggagcccgcaggtcggggaaaagagcagtgtgtggagatgtacacagatgggcagtggaatgacaggaactgcctgtactcccgactgaccatctgtgagttctgagaggcatttaggccatgggacagggaggacgctctctggccttcggcctccatcctgaggctccacttggtctgtgagatgctagaactccctttcaacagaattcacttgtggctattgggactggaggcacccttagccacttcattcctctgatgggccctgactcttccccataatcactgaccagccttgacactccccttgcaaactcatcccagcactgcaccccaggcagccactcttagccttggccttcgacatgagatggagccctccttattccccatctggtccagttccttcacttacagatggcagcagtgaggtcttggggtagaaggaccctccaaagtcacacaaagtgctaaaattatcacgtgccaggtcttaggatatgtcgtggggtgggcaaggtaatcagtgacagttgaagatttttttttcccagagcttatgtcttcatctgtgaaatgggaataagatacttgttgctgtcacagttattaccatccccccagctaccaaaattactaccagaactgttactatacacagaggctattgactgagcacctatcatttgccaagaaccttgacaagcacttctaatacagcatattatgtactattcaatctttacacaatgtcacgggaccagtattgtttcctcattttttataaggacactgaagcttggaggagttaaatgttttgagtattattccagagagcaagtggcagaggctggatccaaacccatcttcctggacctgaagcttatgcttccagccaccccactcctgagctgaataaagatgatttaagcttaataaatcgtgaatgtgttcacatgagtttccatagc

SEQ ID NO: 444946 - DNA, 1623 bp, Homo sapiens
tctaccttaccctctgactgggaggcagagacccaagcagctggaggctctgtgtgtgggtcgctgatttcttggagcctgaaaagaaagagcagcgactggacccagagccatgtggctgtgccctctggccctcaacctcatcttgatggcagcctctggtgctgtgtgcgaagtgaaggacgtttgtgttggaagccctggtatccccggcactcctggatcccacggcctgccaggcagggacgggagagatggtctcaaaggagaccctggccctccaggccccatgggtccacctggagaaatgccatgtcctcctggaaatgatgggctgcctggagcccctggtatccctggagagtgtggagagaagggggagcctggcgagaggggccctccagggcttccagctcatctagatgaggagctccaagccacactccacgactttagacatcaaatcctgcagacaaggggagccctcagtctgcagggctccataatgacagtaggagagaaggtcttctccagcaatgggcagtccatcacttttgatgccattcaggaggcatgtgccagagcaggcggccgcattgctgtcccaaggaatccagaggaaaatgaggccattgcaagcttcgtgaagaagtacaacacatatgcctatgtaggcctgactgagggtcccagccctggagacttccgctactcagacgggacccctgtaaactacaccaactggtaccgaggggagcccgcaggtcggggaaaagagcagtgtgtggagatgtacacagatgggcagtggaatgacaggaactgcctgtactcccgactgaccatctgtgagttctgagaggcatttaggccatgggacagggaggacgctctctggccttcggcctccatcctgaggctccacttggtctgtgagatgctagaactccctttcaacagaattcacttgtggctattgggactggaggcacccttagccacttcattcctctgatgggccctgactcttccccataatcactgaccagccttgacactccccttgcaaactcatcccagcactgcaccccaggcagccactcttagccttggccttcgacatgagatggagccctccttattccccatctggtccagttccttcacttacagatggcagcagtgaggtcttggggtagaaggaccctccaaagtcacacaaagtgcctgcctcctggtcccctcagctctctctctgcaacccagtgccatcaggatgagcaatcctggccaagcataatgacagagagaggcagacttcggggaagccctgactgtgcagagctaaggacacagtggagattctctggcactctgaggtctctgtggcaggcctggtcaggctctccatgaggttagaaggccaggtagtgttccagcagggtggtggccaagccaaccccatgattgatgtgtacgattcactcctttgagtctttgaatggcaactcagccccctggcaagccaggcctggcttgctcaggtctacaattcccatatctctaagttccagcctcttctccttaaactcctgactcatttatccaaccactgcagatgtt

SEQ ID NO: 444947 - DNA, 1174 bp, Homo sapiens
catactatgctccaattggtcaagaatctccgatgtatccgccggatcgtctcaccagtcgagcctgtctgtatgactagctctgtcgatgtgacatggagccacaccttattccccatctggtccagttccttcacttacagatggcagcagtgaggtcttggggtagaaggaccctccaaagtcacacaaagtgcctgcctcctggtcccctcagctctctctctgcaacccagtgccatcaggatgagcaatcctggccaagcataatgacagagagaggcagacttcggggaagccctgactgtgcagagctaaggacacagtggagattctctggcactctgaggtctctgtggcaggcctggtcaggctctccatgaggttagaaggccaggtagtgttccagcagggtggtggccaagccaaccccatgattgatgtgtacgattcactcctttgagtctttgaatggcaactcagccccctgacctgaagacagccagcctaggcctctagggtgacctagagccgccttcagatgtgacccgagtaactttcaactgatgaacaaatctgcaccctacttcagatttcagtgggcattcacatcaccccccacaccactggctctgctttctcctttcattaatccattcacccagatatttcattaaaattatcacgtgccaggtcttaggatatgtcgtggggtgggcaaggtaatcagtgacagttgaagatttttttttcccagagcttatgtcttcatctgtgaaatgggaataagatacttgttgctgtcacagttattaccatccccccagctaccaaaattactaccagaactgttactatacacagaggctattgactgagcacctatcatttgccaagaaccttgacaagcacttctaatacagcatattatgtactattcaatctttacacaatgtcacgggaccagtattgtttcctcattttttataaggacactgaagcttggaggagttaaatgttttgagtattattccagagagcaagtggcagaggctggatccaaacccatcttcctggacctgaagcttatgcttccagccaccccactcctgagctgaataaagatgatttaagcttaataaatcgtgaatgtgttcacatgagtttccatagc

SEQ ID NO: 444948 - DNA, 1325 bp, Homo sapiens
tctaccttaccctctgactgggaggcagagacccaagcagctggaggctctgtgtgtgggtcgctgatttcttggagcctgaaaagaaagagcagcgactggacccagagccatgtggctgtgccctctggccctcaacctcatcttgatggcagcctctggtgctgtgtgcgaagtgaaggacgtttgtgttggaagccctggtatccccggcactcctggatcccacggcctgccaggcagggacgggagagatggtctcaaaggagaccctggccctccaggccccatgggtccacctggagaaatgccatgtcctcctggaaatgatgggctgcctggagcccctggtatccctggagagtgtggagagaagggggagcctggcgagaggggccctccagggcttccagctcatctagatgaggagctccaagccacactccacgactttagacatcaaatcctgcagacaaggggagccctcagtctgcagggctccataatgacagtaggagagaaggtcttctccagcaatgggcagtccatcacttttgatgccattcaggaggcatgtgccagagcaggcggccgcattgctgtcccaaggaatccagaggaaaatgaggccattgcaagcttcgtgaagaagtacaacacatatgcctatgtaggcctgactgagggtcccagccctggagacttccgctactcagacgggacccctgtaaactacaccaactggtaccgaggggagcccgcaggtcggggaaaagagcagtgtgtggagatgtacacagatgggcagtggaatgacaggaactgcctgtactcccgactgaccatctgtgagttctgagaggcatttaggccatgggacagggaggacgctctctggccttcggcctccatcctgaggctccacttggtctgtgagatgctagaactccctttcaacagaattcacttgtggctattgggactggaggcacccttagccacttcattcctctgatgggccctgactcttccccataatcactgaccagccttgacactccccttgcaaactcatcccagcactgcaccccaggcagccactcttagccttggccttcgacatgagatggagccctccttattccccatctggtccagttccttcacttacagatggcagcagtgagagagcaagtggcagaggctggatccaaacccatcttcctggacctgaagcttatgcttccagccaccccactcctgagctgaataaagatgatttaagcttaataaatcgtgaatgtgttcacatgagtttccatagc

SEQ ID NO: 444949 - DNA, 873 bp, Homo sapiens
  misc_feature (20)..(21): n is a, c, g, or t
  misc_feature (27)..(27): n is a, c, g, or t
cctggcttgctcaggtctcnnggcttnctcaggtccctggcttctgaggtctctgtggcaggcctggtcaggctctccatgaggttagaaggccaggtagtgttccagcagggtggtggccaagccaaccccatgattgatgtgtacgattcactcctttgagtctttgaatggcaactcagccccctgacctgaagacagccagcctaggcctctagggtgacctagagccgccttcagatgtgacccgagtaactttcaactgatgaacaaatctgcaccctacttcagatttcagtgggcattcacatcaccccccacaccactggctctgctttctcctttcattaatccattcacccagatatttcattaaaattatcacgtgccaggtcttaggatatgtcgtggggtgggcaaggtaatcagtgacagttgaagatttttttttcccagagcttatgtcttcatctgtgaaatgggaataagatacttgttgctgtcacagttattaccatccccccagctaccaaaattactaccagaactgttactatacacagaggctattgactgagcacctatcatttgccaagaaccttgacaagcacttctaatacagcatattatgtactattcaatctttacacaatgtcacgggaccagtattgtttcctcattttttataaggacactgaagcttggaggagttaaatgttttgagtattattccagagagcaagtggcagaggctggatccaaacccatcttcctggacctgaagcttatgcttccagccaccccactcctgagctgaataaagatgatttaagcttaataaatcgtgaatgtgttcacatgagtttccatagc

SEQ ID NO: 444950 - DNA, 570 bp, Homo sapiens
  misc_feature (569)..(569): n is a, c, g, or t
tctaccttaccctctgactgggaggcagagacccaagcagctggaggctctgtgtgtggcctggagaccccacaacctccagccggaggcctgaagcatgaggccatgccaggtgccaggagcagcgactggacccagagccatgtggctgtgccctctggccctcaacctcatcttgatggcagcctctggtgctgtgtgcgaagtgaaggacgtttgtgttggaagccctggtatccccggcactcctggatcccacggcctgccaggcagggacgggagagatggtctcaaaggagaccctggccctccaggccccatgggtccacctggagaaatgccatgtcctcctggaaatgatgggctgcctggagcccctggtatccctggagagtgtggagagaagggggagcctggcgagaggggccctccagcaatgtggacgactgggaagaggagaccattgagttcttcgtcactgaagaaatcattcccctcgggaatcaggagtgacctgagcactgtgggtcggactccgcctgctacccgcgcgagctacagaatccgcnt

SEQ ID NO: 444951 - DNA, 2204 bp, Homo sapiens
tctaccttaccctctgactgggaggcagagacccaagcagctggaggctctgtgtgtgggtcgctgatttcttggagcctgaaaagaaagagcagcgactggacccagagccatgtggctgtgccctctggccctcaacctcatcttgatggcagcctctggtgctgtgtgcgaagtgaaggacgtttgtgttggaagccctggtatccccggcactcctggatcccacggcctgccaggcagggacgggagagatggtctcaaaggagaccctggccctccaggccccatgggtccacctggagaaatgccatgtcctcctggaaatgatgggctgcctggagcccctggtatccctggagagtgtggagagaagggggagcctggcgagaggggccctccagggcttccagctcatctagatgaggagctccaagccacactccacgactttagacatcaaatcctgcagacaaggggagccctcagtctgcagggctccataatgacagtaggagagaaggtcttctccagcaatgggcagtccatcacttttgatgccattcaggaggcatgtgccagagcaggcggccgcattgctgtcccaaggaatccagaggaaaatgaggccattgcaagcttcgtgaagaagtacaacacatatgcctatgtaggcctgactgagggtcccagccctggagacttccgctactcagacgggacccctgtaaactacaccaactggtaccgaggggagcccgcaggtcggggaaaagagcagtgtgtggagatgtacacagatgggcagtggaatgacaggaactgcctgtactcccgactgaccatctgtgagttctgagaggcatttaggccatgggacagggaggacgctctctggccttcggcctccatcctgaggctccacttggtctgtgagatgctagaactccctttcaacagaattcacttgtggctattgggactggaggcacccttagccacttcattcctctgatgggccctgactcttccccataatcactgaccagccttgacactccccttgcaaactcatcccagcactgcaccccaggcagccactcttagccttggccttcgacatgagatggagccctccttattccccatctggtccagttccttcacttacagatggcagcagtgaggtcttggggtagaaggaccctccaaagtcacacaaagtgcctgcctcctggtcccctcagctctctctctgcaacccagtgccatcaggatgagcaatcctggccaagcataatgacagagagaggcagacttcggggaagccctgactgtgcagagctaaggacacagtggagattctctggcactctgaggtctctgtggcaggcctggtcaggctctccatgaggttagaaggccaggtagtgttccagcagggtggtggccaagccaaccccatgattgatgtgtacgattcactcctttgagtctttgaatggcaactcagccccctgacctgaagacagccagcctaggcctctagggtgacctagagccgccttcagatgtgacccgagtaactttcaactgatgaacaaatctgcaccctacttcagatttcagtgggcattcacatcaccccccacaccactggctctgctttctcctttcattaatccattcacccagatatttcattaaaattatcacgtgccaggtcttaggatatgtcgtggggtgggcaaggtaatcagtgacagttgaagatttttttttcccagagcttatgtcttcatctgtgaaatgggaataagatacttgttgctgtcacagttattaccatccccccagctaccaaaattactaccagaactgttactatacacagaggctattgactgagcacctatcatttgccaagaaccttgacaagcacttctaatacagcatattatgtactattcaatctttacacaatgtcacgggaccagtattgtttcctcattttttataaggacactgaagcttggaggagttaaatgttttgagtattattccagagagcaagtggcagaggctggatccaaacccatcttcctggacctgaagcttatgcttccagccaccccactcctgagctgaataaagatgatttaagcttaataaatcgtgaatgtgttcacatgagtttccatagc

SEQ ID NO: 444952 - DNA, 2245 bp, Homo sapiens
tctaccttaccctctgactgggaggcagagacccaagcagctggaggctctgtgtgtgggtcgctgatttcttggagcctgaaaagaaagtaacacagcagggatgaggacagatggtgtgagtcagtgagagcagcgactggacccagagccatgtggctgtgccctctggccctcaacctcatcttgatggcagcctctggtgctgtgtgcgaagtgaaggacgtttgtgttggaagccctggtatccccggcactcctggatcccacggcctgccaggcagggacgggagagatggtctcaaaggagaccctggccctccaggccccatgggtccacctggagaaatgccatgtcctcctggaaatgatgggctgcctggagcccctggtatccctggagagtgtggagagaagggggagcctggcgagaggggccctccagggcttccagctcatctagatgaggagctccaagccacactccacgactttagacatcaaatcctgcagacaaggggagccctcagtctgcagggctccataatgacagtaggagagaaggtcttctccagcaatgggcagtccatcacttttgatgccattcaggaggcatgtgccagagcaggcggccgcattgctgtcccaaggaatccagaggaaaatgaggccattgcaagcttcgtgaagaagtacaacacatatgcctatgtaggcctgactgagggtcccagccctggagacttccgctactcagacgggacccctgtaaactacaccaactggtaccgaggggagcccgcaggtcggggaaaagagcagtgtgtggagatgtacacagatgggcagtggaatgacaggaactgcctgtactcccgactgaccatctgtgagttctgagaggcatttaggccatgggacagggaggacgctctctggccttcggcctccatcctgaggctccacttggtctgtgagatgctagaactccctttcaacagaattcacttgtggctattgggactggaggcacccttagccacttcattcctctgatgggccctgactcttccccataatcactgaccagccttgacactccccttgcaaactcatcccagcactgcaccccaggcagccactcttagccttggccttcgacatgagatggagccctccttattccccatctggtccagttccttcacttacagatggcagcagtgaggtcttggggtagaaggaccctccaaagtcacacaaagtgcctgcctcctggtcccctcagctctctctctgcaacccagtgccatcaggatgagcaatcctggccaagcataatgacagagagaggcagacttcggggaagccctgactgtgcagagctaaggacacagtggagattctctggcactctgaggtctctgtggcaggcctggtcaggctctccatgaggttagaaggccaggtagtgttccagcagggtggtggccaagccaaccccatgattgatgtgtacgattcactcctttgagtctttgaatggcaactcagccccctgacctgaagacagccagcctaggcctctagggtgacctagagccgccttcagatgtgacccgagtaactttcaactgatgaacaaatctgcaccctacttcagatttcagtgggcattcacatcaccccccacaccactggctctgctttctcctttcattaatccattcacccagatatttcattaaaattatcacgtgccaggtcttaggatatgtcgtggggtgggcaaggtaatcagtgacagttgaagatttttttttcccagagcttatgtcttcatctgtgaaatgggaataagatacttgttgctgtcacagttattaccatccccccagctaccaaaattactaccagaactgttactatacacagaggctattgactgagcacctatcatttgccaagaaccttgacaagcacttctaatacagcatattatgtactattcaatctttacacaatgtcacgggaccagtattgtttcctcattttttataaggacactgaagcttggaggagttaaatgttttgagtattattccagagagcaagtggcagaggctggatccaaacccatcttcctggacctgaagcttatgcttccagccaccccactcctgagctgaataaagatgatttaagcttaataaatcgtgaatgtgttcacatgagtttccatagc

SEQ ID NO: 444953 - DNA, 2173 bp, Homo sapiens
tcgccagcacgggattcctggagcaagagacccaagcagctggaggctctgtgtgtgggagcagcgactggacccagagccatgtggctgtgccctctggccctcaacctcatcttgatggcagcctctggtgctgtgtgcgaagtgaaggacgtttgtgttggaagccctggtatccccggcactcctggatcccacggcctgccaggcagggacgggagagatggtctcaaaggagaccctggccctccaggccccatgggtccacctggagaaatgccatgtcctcctggaaatgatgggctgcctggagcccctggtatccctggagagtgtggagagaagggggagcctggcgagaggggccctccagggcttccagctcatctagatgaggagctccaagccacactccacgactttagacatcaaatcctgcagacaaggggagccctcagtctgcagggctccataatgacagtaggagagaaggtcttctccagcaatgggcagtccatcacttttgatgccattcaggaggcatgtgccagagcaggcggccgcattgctgtcccaaggaatccagaggaaaatgaggccattgcaagcttcgtgaagaagtacaacacatatgcctatgtaggcctgactgagggtcccagccctggagacttccgctactcagacgggacccctgtaaactacaccaactggtaccgaggggagcccgcaggtcggggaaaagagcagtgtgtggagatgtacacagatgggcagtggaatgacaggaactgcctgtactcccgactgaccatctgtgagttctgagaggcatttaggccatgggacagggaggacgctctctggccttcggcctccatcctgaggctccacttggtctgtgagatgctagaactccctttcaacagaattcacttgtggctattgggactggaggcacccttagccacttcattcctctgatgggccctgactcttccccataatcactgaccagccttgacactccccttgcaaactcatcccagcactgcaccccaggcagccactcttagccttggccttcgacatgagatggagccctccttattccccatctggtccagttccttcacttacagatggcagcagtgaggtcttggggtagaaggaccctccaaagtcacacaaagtgcctgcctcctggtcccctcagctctctctctgcaacccagtgccatcaggatgagcaatcctggccaagcataatgacagagagaggcagacttcggggaagccctgactgtgcagagctaaggacacagtggagattctctggcactctgaggtctctgtggcaggcctggtcaggctctccatgaggttagaaggccaggtagtgttccagcagggtggtggccaagccaaccccatgattgatgtgtacgattcactcctttgagtctttgaatggcaactcagccccctgacctgaagacagccagcctaggcctctagggtgacctagagccgccttcagatgtgacccgagtaactttcaactgatgaacaaatctgcaccctacttcagatttcagtgggcattcacatcaccccccacaccactggctctgctttctcctttcattaatccattcacccagatatttcattaaaattatcacgtgccaggtcttaggatatgtcgtggggtgggcaaggtaatcagtgacagttgaagatttttttttcccagagcttatgtcttcatctgtgaaatgggaataagatacttgttgctgtcacagttattaccatccccccagctaccaaaattactaccagaactgttactatacacagaggctattgactgagcacctatcatttgccaagaaccttgacaagcacttctaatacagcatattatgtactattcaatctttacacaatgtcacgggaccagtattgtttcctcattttttataaggacactgaagcttggaggagttaaatgttttgagtattattccagagagcaagtggcagaggctggatccaaacccatcttcctggacctgaagcttatgcttccagccaccccactcctgagctgaataaagatgatttaagcttaataaatcgtgaatgtgttcacatgagtttccatagc

SEQ ID NO: 444954 - DNA, 2062 bp, Homo sapiens
tctaccttaccctctgactgggaggcagagacccaagcagctggaggctctgtgtgtgggtcgctgatttcttggagcctgaaaagaaagagcagcgactggacccagagccatgtggctgtgccctctggccctcaacctcatcttgatggcagcctctggtgctgtgtgcgaagtgaaggacgtttgtgttggaagccctggtatccccggcactcctggatcccacggcctgccaggcagggacgggagagatggtctcaaaggagaccctggccctccaggccccatgggtccacctggagaaatgccatgtcctcctggaaatgatgggctgcctggagcccctggtatccctggagagtgtggagagaagggggagcctggcgagaggggccctccagggcttccagctcatctagatgaggagctccaagccacactccacgactttagacatcaaatcctgcagacaaggggagccctcagtctgcagggctccataatgacagtaggagagaaggtcttctccagcaatgggcagtccatcacttttgatgccattcaggaggcatgtgccagagcaggcggccgcattgctgtcccaaggaatccagaggaaaatgaggccattgcaagcttcgtgaagaagtacaacacatatgcctatgtaggcctgactgagggtcccagccctggagacttccgctactcagacgggacccctgtaaactacaccaactggtaccgaggggagcccgcaggtcggggaaaagagcagtgtgtggagatgtacacagatgggcagtggaatgacaggaactgcctgtactcccgactgaccatctgtgagttctgagaggcatttaggccatgggacagggaggacgctctctggccttcggcctccatcctgaggctccacttggtctgtgagatgctagaactccctttcaacagaattcacttgtggctattgggactggaggcacccttagccacttcattcctctgatgggccctgactcttccccataatcactgaccagccttgacactccccttgcaaactcatcccagcactgcaccccaggcagccactcttagccttggccttcgacatgagatggagccctccttattccccatctggtccagttccttcacttacagatggcagcagtgaggtcttggggtagaaggaccctccaaagtcacacaaagtgcctgcctcctggtcccctcagctctctctctgcaacccagtgccatcaggatgagcaatcctggccaagcataatgacagagagaggcagacttcggggaagccctgactgtgcagagctaaggacacagtggagattctctggcactctgaggtctctgtggcaggcctggtcaggctctccatgaggttagaaggccaggtagtgttccagcagggtggtggccaagccaaccccatgattgatgtgtacgattcactcctttgagtctttgaatggcaactcagccccctgacctgaagacagccagcctaggcctctagggtgacctagagccgccttcagatgtgacccgagtaactttcaactgatgaacaaatctgcaccctacttcagatttcagtgggcattcacatcaccccccacaccactggctctgctttctcctttcattaatccattcacccagatatttcattaaaattatcacgtgccaggtcttaggatatgtcgtggggtgggcaaggtaatcagtgacagttgaagatttttttttcccagagcttatgtcttcatctgtgaaatgggaataagatacttgttgctgtcacagttattaccatccccccagctaccaaaattactaccagaactgttactatacacagaggctattgactgagcacctatcatttgccaagaaccttgacaagcacttctaatacagcatattatgtactattcaatctttacacaatgtcacggggagtgatgctttgtcaaagcatcactccccgtattcctcagtatatttcttcagtgccatgggatattga

SEQ ID NO: 444955 - DNA, 2079 bp, Homo sapiens
tctaccttaccctctgactgggaggcagagacccaagcagctggaggctctgtgtgtgggtcgctgatttcttggagcctgaaaagaaagagcagcgactggacccagagccatgtggctgtgccctctggccctcaacctcatcttgatggcagcctctggtgctgtgtgcgaagtgaaggacgtttgtgttggaagccctggtatccccggcactcctggatcccacggcctgccaggcagggacgggagagatggtctcaaaggagaccctggccctccaggccccatgggtccacctggagaaatgccatgtcctcctggaaatgatgggctgcctggagcccctggtatccctggagagtgtggagagaagggggagcctggcgagaggggccctccagggcttccagctcatctagatgaggagctccaagccacactccacgactttagacatcaaatcctgcagacaaggggagccctcagtctgcagggctccataatgacagtaggagagaaggtcttctccagcaatgggcagtccatcacttttgatgccattcaggaggcatgtgccagagcaggcggccgcattgctgtcccaaggaatccagaggaaaatgaggccattgcaagcttcgtgaagaagtacaacacatatgcctatgtaggcctgactgagggtcccagccctggagacttccgctactcagacgggacccctgtaaactacaccaactggtaccgaggggagcccgcaggtcggggaaaagagcagtgtgtggagatgtacacagatgggcagtggaatgacaggaactgcctgtactcccgactgaccatctgtgagttctgagaggcatttaggccatgggacagggaggacgctctctggccttcggcctccatcctgaggctccacttggtctgtgagatgctagaactccctttcaacagaattcacttgtggctattgggactggaggcacccttagccacttcattcctccttattccccatctggtccagttccttcacttacagatggcagcagtgaggtcttggggtagaaggaccctccaaagtcacacaaagtgcctgcctcctggtcccctcagctctctctctgcaacccagtgccatcaggatgagcaatcctggccaagcataatgacagagagaggcagacttcggggaagccctgactgtgcagagctaaggacacagtggagattctctggcactctgaggtctctgtggcaggcctggtcaggctctccatgaggttagaaggccaggtagtgttccagcagggtggtggccaagccaaccccatgattgatgtgtacgattcactcctttgagtctttgaatggcaactcagccccctgacctgaagacagccagcctaggcctctagggtgacctagagccgccttcagatgtgacccgagtaactttcaactgatgaacaaatctgcaccctacttcagatttcagtgggcattcacatcaccccccacaccactggctctgctttctcctttcattaatccattcacccagatatttcattaaaattatcacgtgccaggtcttaggatatgtcgtggggtgggcaaggtaatcagtgacagttgaagatttttttttcccagagcttatgtcttcatctgtgaaatgggaataagatacttgttgctgtcacagttattaccatccccccagctaccaaaattactaccagaactgttactatacacagaggctattgactgagcacctatcatttgccaagaaccttgacaagcacttctaatacagcatattatgtactattcaatctttacacaatgtcacgggaccagtattgtttcctcattttttataaggacactgaagcttggaggagttaaatgttttgagtattattccagagagcaagtggcagaggctggatccaaacccatcttcctggacctgaagcttatgcttccagccaccccactcctgagctgaataaagatgatttaagcttaataaatcgtgaatgtgttcacatgagtttccatagc

SEQ ID NO: 444956 - DNA, 2190 bp, Homo sapiens
tctaccttaccctctgactgggaggcagagacccaagcagctggaggctctgtgtgtgggtcgctgatttcttggagcctgaaaagaaagagcagcgactggacccagagccatgtggctgtgccctctggccctcaacctcatcttgatggcagcctctggtgctgtgtgcgaagtgaaggacgtttgtgttggaagccctggtatccccggcactcctggatcccacggcctgccaggcagggacgggagagatggtctcaaaggagaccctggccctccaggccccatgggtccacctggagaaatgccatgtcctcctggaaatgatgggctgcctggagcccctggtatccctggagagtgtggagagaagggggagcctggcgagaggggccctccagggcttccagctcatctagatgaggagctccaagccacactccacgactttagacatcaaatcctgcagacaaggggagccctcagtctgcagggctccataatgacagtaggagagaaggtcttctccagcaatgggcagtccatcacttttgatgccattcaggaggcatgtgccagagcaggcggccgcattgctgtcccaaggaatccagaggaaaatgaggccattgcaagcttcgtgaagaagtacaacacatatgcctatgtaggcctgactgagggtcccagccctggagacttccgctactcagacgggacccctgtaaactacaccaactggtaccgaggggagcccgcaggtcggggaaaagagcagtgtgtggagatgtacacagatgggcagtggaatgacaggaactgcctgtactcccgactgaccatctgtgagttctgagaggcatttaggccatgggacagggaggacgctctctggccttcggcctccatcctgaggctccacttggtctgtgagatgctagaactccctttcaacagaattcacttgtggctattgggactggaggcacccttagccacttcattcctctgatgggccctgactcttccccataatcactgaccagccttgacactccccttgcaaactcatcccagcactgcaccccaggcagccactcttagccttggccttcgacatgagatggagccctccttattccccatctggtccagttccttcacttacagatggcagcagtgaggtcttggggtagaaggaccctccaaagtcacacaaagtgcctgcctcctggtcccctcagctctctctctgcaacccagtgccatcaggatgagcaatcctggccaagcataatgacagagagaggcagacttcggggaagccctgactgtgcagagctaaggacacagtggagattctctggcactctgaggtctctgtggcaggcctggtcaggctctccatgaggttagaaggccaggtagtgttccagaactctaacgcacaaacaaaaccacgaatccccccacaccccaacaaaacaaaaccaccccggaaacacctgaagacagccagcctaggcctctagggtgacctagagccgccttcagatgtgacccgagtaactttcaactgatgaacaaatctgcaccctacttcagatttcagtgggcattcacatcaccccccacaccactggctctgctttctcctttcattaatccattcacccagatatttcattaaaattatcacgtgccaggtcttaggatatgtcgtggggtgggcaaggtaatcagtgacagttgaagatttttttttcccagagcttatgtcttcatctgtgaaatgggaataagatacttgttgctgtcacagttattaccatccccccagctaccaaaattactaccagaactgttactatacacagaggctattgactgagcacctatcatttgccaagaaccttgacaagcacttctaatacagcatattatgtactattcaatctttacacaatgtcacgggaccagtattgtttcctcattttttataaggacactgaagcttggaggagttaaatgttttgagtattattccagagagcaagtggcagaggctggatccaaacccatcttcctggacctgaagcttatgcttccagccaccccactcctgagctgaataaagatgatttaagcttaataaatcgtgaatgtgttcacatgagtttccatagc

SEQ ID NO: 444957 - DNA, 1937 bp, Homo sapiens
tctaccttaccctctgactgggaggcagagacccaagcagctggaggctctgtgtgtgggtcgctgatttcttggagcctgaaaagaaagagcagcgactggacccagagccatgtggctgtgccctctggccctcaacctcatcttgatggcagcctctggtgctgtgtgcgaagtgaaggacgtttgtgttggaagccctggtatccccggcactcctggatcccacggcctgccaggcagggacgggagagatggtctcaaaggagaccctggccctccaggccccatgggtccacctggagaaatgccatgtcctcctggaaatgatgggctgcctggagcccctggtatccctggagagtgtggagagaagggggagcctggcgagaggggccctccagggcttccagctcatctagatgaggagctccaagccacactccacgactttagacatcaaatcctgcagacaaggggagccctcagtctgcagggctccataatgacagtaggagagaaggtcttctccagcaatgggcagtccatcacttttgatgccattcaggaggcatgtgccagagcaggcggccgcattgctgtcccaaggaatccagaggaaaatgaggccattgcaagcttcgtgaagaagtacaacacatatgcctatgtaggcctgactgagggtcccagccctggagacttccgctactcagacgggacccctgtaaactacaccaactggtaccgaggggagcccgcaggtcggggaaaagagcagtgtgtggagatgtacacagatgggcagtggaatgacaggaactgcctgtactcccgactgaccatctgtgagttctgagaggcatttaggccatgggacagggaggacgctctctggccttcggcctccatcctgaggctccacttggtctgtgagatgctagaactccctttcaacagaattcacttgtggctattgggactggaggcacccttagccacttcattcctctgatgggccctgactcttccccataatcactgaccagccttgacactccccttgcaaactcatcccagcactgcaccccaggcagccactcttagccttggccttcgacatgagatggagccctccttattccccatctggtccagttccttcacttacagatggcagcagtgaggtcttggggtagaaggaccctccaaagtcacacaaagtgcctgcctcctggtcccctcagctctctctctgcaacccagtgccatcaggatgagcaatcctggccaagcataatgacagagagaggcagacttcggggaagccctgactgtgcagagctaaggacacagtggagattctctggcactctgaggtctctgtggcaggcctggtcaggctctccatgaggttagaaggccaggtagtgttccagcagggtggtggccaagccaaccccatgattgatgtgtacgattcactcctttgagtctttgaatggcaactcagccccctgacctgaagacagccagcctaggcctctagggtgacctagagccgccttcagatgtgacccgagtaactttcaactgatgaacaaatctgcaccctacttcagatttcagtgggcattcacatcaccccccacaccactggctctgctttctcctttcattaatccattcacccagatatttcatcaagcacttctaatacagcatattatgtactattcaatctttacacaatgtcacgggaccagtattgtttcctcattttttataaggacactgaagcttggaggagttaaatgttttgagtattattccagagagcaagtggcagaggctggatccaaacccatcttcctggacctgaagcttatgcttccagccaccccactcctgagctgaataaagatgatttaagctta

SEQ ID NO: 444958 - DNA, 1657 bp, Homo sapiens
tctaccttaccctctgactgggaggcagagacccaagcagctggaggctctgtgtgtgggtcgctgatttcttggagcctgaaaagaaagagcagcgactggacccagagccatgtggctgtgccctctggccctcaacctcatcttgatggcagcctctggtgctgtgtgcgaagtgaaggacgtttgtgttggaagccctggtatccccggcactcctggatcccacggcctgccaggcagggacgggagagatggtctcaaaggagaccctggccctccaggccccatgggtccacctggagaaatgccatgtcctcctggaaatgatgggctgcctggagcccctggtatccctggagagtgtggagagaagggggagcctggcgagaggggccctccagggcttccagctcatctagatgaggagctccaagccacactccacgactttagacatcaaatcctgcagacaaggggagccctcagtctgcagggctccataatgacagtaggagagaaggtcttctccagcaatgggcagtccatcacttttgatgccattcaggaggcatgtgccagagcaggcggccgcattgctgtcccaaggaatccagaggaaaatgaggccattgcaagcttcgtgaagaagtacaacacatatgcctatgtaggcctgactgagggtcccagccctggagacttccgctactcagacgggacccctgtaaactacaccaactggtaccgaggggagcccgcaggtcggggaaaagagcagtgtgtggagatgtacacagatgggcagtggaatgacaggaactgcctgtactcccgactgaccatctgtgagttctgagaggcatttaggccatgggacagggaggacgctctctggccttcggcctccatcctgaggctccacttggtctgtgagatgctagaactccctttcaacagaattcacttgtggctattgggactggaggcacccttagccacttcattcctctgatgggccctgactcttccccataatcactgaccagccttgacactccccttgcaaactcatcccagcactgcaccccaggcagccactcttagccttggccttcgacatgagatggagccctccttattccccatctggtccagttccttcacttacagatggcagcagtgaggtcttggggtagaaggaccctccaaagtcacacaaagtgcctgcctcctggtcccctcagctctctctctgcaacccagtgccatcaggatgagcaatcctggccaagcattaatccattcacccagatatttcattaaaattatcacgtgccaggtcttaggatatgtcgtggggtgggcaaggtaatcagtgacagttgcaagcacttctaatacagcatattatgtactattcaatctttacacaatgtcacgggaccagtattgtttcctcattttttataaggacactgaagcttggaggagttaaatgttttgagtattattccagagagcaagtggcagaggctggatccaaacccatcttcctggacctgaagcttatgcttccagccaccccactcctgagctgaataaagatgatttaagcttaataaatcgtgaatgtgttcacatgagtttccatagc

SEQ ID NO: 444959 - DNA, 1274 bp, Homo sapiens
gaggctatcgaggaccgtacgccacgctgagcgactctcattcctctgatgggcctcggtactcattccgcccatacatacagctgatcatggcttgtaggactcccgttggaatacttaccccagtaatgaacgccaggcggccactgcttagtattggactatcgacagttgtagatgtacgtcggcggccttatatcggcatctgtctaccagggtgtccttcacgttgacagtactggtcatgccaagttgaagtcttggggtagaaggaccctccaaagtcacacaaagtgcctgcctcctggtcccctcagctctctctctgcaacccagtgccatcaggatgagcaatcctggccaagcataatgacagagagaggcagacttcggggaagccctgactgtgcagagctaaggacacagtggagattctctggcactctgaggtctctgtggcaggcctggtcaggctctccatgaggttagaaggccaggtagtgttccagcagggtggtggccaagccaaccccatgattgatgtgtacgattcactcctttgagtctttgaatggcaactcagccccctgacctgaagacagccagcctaggcctctagggtgacctagagccgccttcagatgtgacccgagtaactttcaactgatgaacaaatctgcaccctacttcagatttcagtgggcattcacatcaccccccacaccactggctctgctttctcctttcattaatccattcacccagatatttcattaaaattatcacgtgccaggtcttaggatatgtcgtggggtgggcaaggtaatcagtgacagttgaagatttttttttcccagagcttatgtcttcatctgtgaaatgggaataagatacttgttgctgtcacagttattaccatccccccagctaccaaaattactaccagaactgttactatacacagaggctattgactgagcacctatcatttgccaagaaccttgacaagcacttctaatacagcatattatgtactattcaatctttacacaatgtcacgggaccagtattgtttcctcattttttataaggacactgaagcttggaggagttaaatgttttgagtattattccagagagcaagtggcagaggctggatccaaacccatcttcctggacctgaagcttatgcttccagccaccccactcctgagctgaataaagatgatttaagcttaataaatcgtgaatgtgttcacatgagtttccatagc

SEQ ID NO: 444960 - DNA, 1259 bp, Homo sapiens
tctaccttaccctctgactgggaggcagagacccaagcagctggaggctctgtgtgtggcctggagaccccacaacctccagccggaggcctgaagcatgaggccatgccaggtgccaggagcagcgactggacccagagccatgtggctgtgccctctggccctcaacctcatcttgatggcagcctctggtgctgtgtgcgaagtgaaggacgtttgtgttggaagccctggtatccccggcactcctggatcccacggcctgccaggcagggacgggagagatggtctcaaaggagaccctggccctccaggccccatgggtccacctggagaaatgccatgtcctcctggaaatgatgggctgcctggagcccctggtatccctggagagtgtggagagaagggggagcctggcgagaggggccctccagggcttccagctcatctagatgaggagctccaagccacactccacgactttagacatcaaatcctgcagacaaggggagccctcagtctgcagggctccataatgacagtaggagagaaggtcttctccagcaatgggcagtccatcacttttgatgccattcaggaggcatgtgccagagcaggcggccgcattgctgtcccaaggaatccagaggaaaatgaggccattgcaagcttcgtgaagaagtacaacacatatgcctatgtaggcctgactgagggtcccagccctggagacttccgctactcagacgggacccctgtaaactacaccaactggtaccgaggggagcccgcaggtcggggaaaagagcagtgtgtggagatgtacacagatgggcagtggaatgacaggaactgcctgtactcccgactgaccatctagcttatgtcttcatctgtgaaatgggaataagatacttgttgctgtcacagttattaccatccccccagctaccaaaattactaccagaactgttactatacacagaggctattgactgagcacctatcatttgccaagaaccttgacaagcacttctaatacagcatattatgtactattcaatctttacacaatgtcacgggaccagtattgtttcctcattttttataaggacactgaagcttggaggagttaaatgttttgagtattattccagagagcaagtggcagaggctggatccaaacccatcttcctggacctgaagcttatgcttccagccaccccactcctgagctgaataaagatgatttaagctta

SEQ ID NO: 444961 - DNA, 982 bp, Homo sapiens
acgcgcttgtgacccgccttccggaaggaagcggctaactatggcgaccgccacggagcagtgggttctggtggagatggtacaggcgctttacgaggctcctgcttaccatcttattttggaagggattctgatcctctggataatcagacttcttttctctaagacttacaaattacaagaacgatctgatcttacagtcaaggaaaaagaagaactgattgaagagtggcaaccagaacctcttgttcctcctgtcccaaaagaccatcctgctctcaactacaacatcgtttcaggccctccaagccacaaaactgtggtgaatggaaaagaatgtataaacttcgcctcatttaattttcttggattgttggataaccctagggttaaggcagcagctttagcatctctaaagaagtatggcgtggggacttgtggacccagaggattttatggcacatttgaatgaagatgaaggatcattgatttccttgtgtatggataatccgggaacaggccaactaaatatttgatgaatgtatgatttcaaatacagtgaattccctgggagtcatcaaagaagaccggcattttatggttgtttttattaagtgtatattctttgctcctgaaaatgttattaaataattgtttaggccgggcatggtggctcatgcctgtaatcccagcactttcaaaggctgaggcaggcagatcacctgaggtcaggagttcaaaaccagcctggccaacatgctgaaacctcgtctctactaaaaatacaaaaattagctgggcgtggtggtggatacctgtaatcccagctacgtgggaggctgaggtgggagaattgcttcaacctgggaggcagaggttgcagtgagccgagatcatgccactgcactccagcctgggcaacagagcaagactgtctcaaaaataaataaataaataaaattgtttaaatgaaaaaaaaaat

SEQ ID NO: 444962 - DNA, 1024 bp, Homo sapiens
aatcacatgaatgcagccatacaattttgaccagtgattatacccatgtaacccaggaatgtcagccccattatgatgtaaaacattcccatttctttagaaagtcccttaggccccttcccagttggaggtttggagggtttagtttgtgttttaatattctcagagggcctaattagtttgtgtgtgtggcgggtcacctagctaatgctgtgagctgaaaaacgtctgagagaagatagtactgttgttcatctcaaaataacccatcacaaacactgagctttcaattcattcagaatatttttttaggaataaatcttgtaaggtgaaagtgctggggaatatgtaacagatcttgtcttcagagttactgaaatgtaagatgtctgctttttctcttttaaagaatcctcgcaaggctcgtgtaactcggcgtttcattgtagtagaaggattgtatatgaatactggaactatttgtcctcttccagaattggtaagcaaccatgttcagctgtaattttaatatttggactatttgacagatgtgccttttgtttatgaccgcttttagtgtataacgtctgcgttgctttgcgcattaggcctcataagcatattttgctcagatcagggaagaagaacaacactgaatgccagtgctggccttcaaagagtaatcaagactgctctgttgcccaggctggagtgcagtggtgtgaacacagctcactgcagccttaccctcctgggctcaagtgatccttccaccttagctttctgagttagctgggactacaggcacatgccaccacacctggctgatttttcccttttttgtggagtaggggtctcactgcgttacccaggctgttctcaaactcttgggctcaagcgatcctcctgcctcagcctgccaaagtgctggtattacaggtatgagccaccacacctggccaaaacttagctttagctttttttttctcccccgcaagacagtcttgccctgtcgtcaggctgg

SEQ ID NO: 444963 - DNA, 714 bp, Homo sapiens
acgcgcttgtgacccgccttccggaaggaagcggctaactatggcgaccgccacggagcagtgggttctggtggagatggtacaggcgctttacgagctccggaaaggaacacgtgtaaggggacgcaggagacaggtctgcaaaaaccagagtttagacggacgataaaacggagtggtgaaaatgagtggaacaccttcgtctgggaaggtcctaaggaagtcagctctttggaactacggctcctgcttaccatcttattttggaagggattctgatcctctggataatcagacttcttttctctaagacttacaaattacaagaacgatctgatcttacagtcaaggaaaaagaagaactgattgaagagtggcaaccagaacctcttgttcctcctgtcccaaaagaccatcctgctctcaactacaacatcgtttcagggtaaatacaatattacaaatgcatcttaagaaattccttcacatccatcacttactcttgcctctcatacggataactactgtcttgaagttggtgattgtgttttctttgcctatatttataattttaccatatatgcctgttgccataaaaatacttggtttattttaaaatgtgatacaagatattttcctgagtagtattgttctgattctgatctgatcaaacaggagcttctattctttacttctgtagatctcttcagtctt

SEQ ID NO: 444964 - DNA, 2726 bp, Homo sapiens
acgcgcttgtgacccgccttccggaaggaagcggctaactatggcgaccgccacggagcagtgggttctggtggagatggtacaggcgctttacgaggctcctgcttaccatcttattttggaagggattctgatcctctggataatcagacttcttttctctaagacttacaaattacaagaacgatctgatcttacagtcaaggaaaaagaagaactgattgaagagtggcaaccagaacctcttgttcctcctgtcccaaaagaccatcctgctctcaactacaacatcgtttcaggccctccaagccacaaaactgtggtgaatggaaaagaatgtataaacttcgcctcatttaattttcttggattgttggataaccctagggttaaggcagcagctttagcatctctaaagaagtatggcgtggggacttgtggacccagaggattttatggcacatttgatgttcatttggatttggaagaccgcctggcaaaatttatgaagacagaagaagccattatatactcatatggatttgccaccatagccagtgctattcctgcttactctaaaagaggggacattgtttttgtagatagagctgcctgctttgctattcagaaaggattacaggcatcccgtagtgacattaagttatttaagcataatgacatggctgacctcgagcgactactaaaagaacaagagatcgaagatcaaaagaatcctcgcaaggctcgtgtaactcggcgtttcattgtagtagaaggattgtatatgaatactggaactatttgtcctcttccagaattggttaagttaaaatacaaatacaaagcaagaatcttcctggaggaaagcctttcatttggagtcctaggagagcatggccgaggagtcactgaacactatggaatcaatattgatgatattgatcttatcagtgccaacatggagaatgcacttgcttctattggaggtttctgctgtggcaggtcttttgtaattgaccatcagcgactttccggccagggatactgcttttcagcttcgttacctcccctgttagctgctgcagcaattgaggccctcaacatcatggaagagaatccaggtatttttgcagtgttgaaggaaaagtgcggacaaattcataaagctttacaaggcatttctggattaaaagtggtgggggagtccctttctccagcctttcacctacaactggaagagagcactgggtctcgcgagcaagatgtcagactgcttcaggaaattgtagatcaatgcatgaacagaagtattgcattaactcaggcgcgctacttggagaaagaagagaagtgtctccctcctcccagcattcgggttgtggtcacggtggaacaaacagaggaagaactggagagagctgcgtccaccatcaaggaggtagcccaggccgtcctgctctaggcagagtcccgggaccatggcctcctgccacacaacacgcagagaggactcaagactcccgctggccatggagtggcctgaaagagagcaagaacatgtggatctttgataggattgttaccaaatggtgtcagtatggaccaattgtgtgaccatgagaaggatgcttattttttttaaaaagaaaacacatctaaaagcccaggaactgatttttttaagaggaaaactaatgacagtgtataactgatgtttaaattgtgcatttagtactatttaaatgttttcttatactagtattttatattcttttgttgtcgtttaaaactggagcttcagtgtctcttccctccctctaatagtaatggttcagtaagcactccttaactccttagtatttcatagaaaaatgactgcaacattaaagctaagaggaacacttcaacatatgtggtacaaatttatattgaagatctaaataaaccacgtattttccagtcttcgttgtgtgaagctaaatggtggctaaaacttttgtacacactaaatattgatgtcacaccatttctaatctgagcatccttagccagagaatattcattatacttcctaagtgagcaataatttaaatcagaagctattttattttaatgtaattaacctttctttacatttcttatgtgttcacctctaatctgttttaggaagagagttggttattatgttgatcccataatataaatcatatcctttatattttagaatatctcaaatgtattccttttttgtatggtgggtttgcctagggacgtgtaactacaggcttttactaagccaaggaaaaagagaatttttcttttcatcttacaaattccagatatctacaaaagatgtgaaagcactaaaaataccatttttaagcagtactttacctgttttttctttagcaaaccaggttatgtggtgtaaaggtttgttatacgtgccacaatatagcatataaatattatgccatcattccttctcttgttaaaggtagaagaataaaattgtgatttttataacctgtgcttattactcaaatggtcttcaacatctttttaaacaacacatactttttgaatgttcagtttctattttgcttgaggtattttgtacatatgtgccttgtgattgctgctgctttaaaggataaagtactctttgggggatgagtctggtttgttttgttttattttttaatgaaataaacctatattcctga

SEQ ID NO: 444965 - DNA, 2913 bp, Homo sapiens
acgcgcttgtgacccgccttccggaaggaagcggctaactatggcgaccgccacggagcagtgggttctggtggagatggtacaggcgctttacgaggctcctgcttaccatcttattttggaagggattctgatcctctggataatcagacttcttttctctaagacttacaaattacaagaacgatctgatcttacagtcaaggaaaaagaagaactgattgaagagtggcaaccagaacctcttgttcctcctgtcccaaaagaccatcctgctctcaactacaacatcgtttcaggccctccaagccacaaaactgtggtgaatggaaaagaatgtataaacttcgcctcatttaattttcttggattgttggataaccctagggttaaggcagcagctttagcatctctaaagaagtatggcgtggggacttgtggacccagaggattttatggcacatttgaatgaagatgaaggatcattgatttccttgtgtatggataatccgggaacaggccaactaaatatttgatgaatgtatgatttcaaatacagtgaattccctgggagtcatcaaagaagaccggcattttatgatgttcatttggatttggaagaccgcctggcaaaatttatgaagacagaagaagccattatatactcatatggatttgccaccatagccagtgctattcctgcttactctaaaagaggggacattgtttttgtagatagagctgcctgctttgctattcagaaaggattacaggcatcccgtagtgacattaagttatttaagcataatgacatggctgacctcgagcgactactaaaagaacaagagatcgaagatcaaaagaatcctcgcaaggctcgtgtaactcggcgtttcattgtagtagaaggattgtatatgaatactggaactatttgtcctcttccagaattggttaagttaaaatacaaatacaaagcaagaatcttcctggaggaaagcctttcatttggagtcctaggagagcatggccgaggagtcactgaacactatggaatcaatattgatgatattgatcttatcagtgccaacatggagaatgcacttgcttctattggaggtttctgctgtggcaggtcttttgtaattgaccatcagcgactttccggccagggatactgcttttcagcttcgttacctcccctgttagctgctgcagcaattgaggccctcaacatcatggaagagaatccaggtatttttgcagtgttgaaggaaaagtgcggacaaattcataaagctttacaaggcatttctggattaaaagtggtgggggagtccctttctccagcctttcacctacaactggaagagagcactgggtctcgcgagcaagatgtcagactgcttcaggaaattgtagatcaatgcatgaacagaagtattgcattaactcaggcgcgctacttggagaaagaagagaagtgtctccctcctcccagcattcgggttgtggtcacggtggaacaaacagaggaagaactggagagagctgcgtccaccatcaaggaggtagcccaggccgtcctgctctaggcagagtcccgggaccatggcctcctgccacacaacacgcagagaggactcaagactcccgctggccatggagtggcctgaaagagagcaagaacatgtggatctttgataggattgttaccaaatggtgtcagtatggaccaattgtgtgaccatgagaaggatgcttattttttttaaaaagaaaacacatctaaaagcccaggaactgatttttttaagaggaaaactaatgacagtgtataactgatgtttaaattgtgcatttagtactatttaaatgttttcttatactagtattttatattcttttgttgtcgtttaaaactggagcttcagtgtctcttccctccctctaatagtaatggttcagtaagcactccttaactccttagtatttcatagaaaaatgactgcaacattaaagctaagaggaacacttcaacatatgtggtacaaatttatattgaagatctaaataaaccacgtattttccagtcttcgttgtgtgaagctaaatggtggctaaaaggaacactttttgtgtgattattataaactttgcattgtatttgaatcttagaacttttgtacacactaaatattgatgtcacaccatttctaatctgagcatccttagccagagaatattcattatacttcctaagtgagcaataatttaaatcagaagctattttattttaatgtaattaacctttctttacatttcttatgtgttcacctctaatctgttttaggaagagagttggttattatgttgatcccataatataaatcatatcctttatattttagaatatctcaaatgtattccttttttgtatggtgggtttgcctagggacgtgtaactacaggcttttactaagccaaggaaaaagagaatttttcttttcatcttacaaattccagatatctacaaaagatgtgaaagcactaaaaataccatttttaagcagtactttacctgttttttctttagcaaaccaggttatgtggtgtaaaggtttgttatacgtgccacaatatagcatataaatattatgccatcattccttctcttgttaaaggtagaagaataaaattgtgatttttataacctgtgcttattactcaaatggtcttcaacatctttttaaacaacacatactttttgaatgttcagtttctattttgcttgaggtattttgtacatatgtgccttgtgattgctgctgctttaaaggataaagtactctttgggggatgagtctggtttgttttgttttattttttaatgaaataaacctatattcctga

SEQ ID NO: 444966 - DNA, 2710 bp, Homo sapiens
acgcgcttgtgacccgccttccggaaggaagcggctaactatggcgaccgccacggagcagtgggttctggtggagatggtacaggcgctttacgaggctcctgcttaccatcttattttggaagggattctgatcctctggataatcagacttcttttctctaagacttacaaattacaagaacgatctgatcttacagtcaaggaaaaagaagaactgattgaagagtggcaaccagaacctcttgttcctcctgtcccaaaagaccatcctgctctcaactacaacatcgtttcaggccctccaagccacaaaactgtggtgaatggaaaagaatgtataaacttcgcctcatttaattttcttggattgttggataaccctagggttaaggcagcagctttagcatctctaaagaagtatggcgtggggacttgtggacccagaggattttatggcacatttgatgttcatttggatttggaagaccgcctggcaaaatttatgaagacagaagaagccattatatactcatatggatttgccaccatagccagtgctattcctgcttactctaaaagaggggacattgtttttgtcataatgacatggctgacctcgagcgactactaaaagaacaagagatcgaagatcaaaagaatcctcgcaaggctcgtgtaactcggcgtttcattgtagtagaaggattgtatatgaatactggaactatttgtcctcttccagaattggttaagttaaaatacaaatacaaagcaagaatcttcctggaggaaagcctttcatttggagtcctaggagagcatggccgaggagtcactgaacactatggaatcaatattgatgatattgatcttatcagtgccaacatggagaatgcacttgcttctattggaggtttctgctgtggcaggtcttttgtaattgaccatcagcgactttccggccagggatactgcttttcagcttcgttacctcccctgttagctgctgcagcaattgaggccctcaacatcatggaagagaatccaggtatttttgcagtgttgaaggaaaagtgcggacaaattcataaagctttacaaggcatttctggattaaaagtggtgggggagtccctttctccagcctttcacctacaactggaagagagcactgggtctcgcgagcaagatgtcagactgcttcaggaaattgtagatcaatgcatgaacagaagtattgcattaactcaggcgcgctacttggagaaagaagagaagtgtctccctcctcccagcattcgggttgtggtcacggtggaacaaacagaggaagaactggagagagctgcgtccaccatcaaggaggtagcccaggccgtcctgctctaggcagagtcccgggaccatggcctcctgccacacaacacgcagagaggactcaagactcccgctggccatggagtggcctgaaagagagcaagaacatgtggatctttgataggattgttaccaaatggtgtcagtatggaccaattgtgtgaccatgagaaggatgcttattttttttaaaaagaaaacacatctaaaagcccaggaactgatttttttaagaggaaaactaatgacagtgtataactgatgtttaaattgtgcatttagtactatttaaatgttttcttatactagtattttatattcttttgttgtcgtttaaaactggagcttcagtgtctcttccctccctctaatagtaatggttcagtaagcactccttaactccttagtatttcatagaaaaatgactgcaacattaaagctaagaggaacacttcaacatatgtggtacaaatttatattgaagatctaaataaaccacgtattttccagtcttcgttgtgtgaagctaaatggtggctaaaaggaacactttttgtgtgattattataaactttgcattgtatttgaatcttagaacttttgtacacactaaatattgatgtcacaccatttctaatctgagcatccttagccagagaatattcattatacttcctaagtgagcaataatttaaatcagaagctattttattttaatgtaattaacctttctttacatttcttatgtgttcacctctaatctgttttaggaagagagttggttattatgttgatcccataatataaatcatatcctttatattttagaatatctcaaatgtattccttttttgtatggtgggtttgcctagggacgtgtaactacaggcttttactaagccaaggaaaaagagaatttttcttttcatcttacaaattccagatatctacaaaagatgtgaaagcactaaaaataccatttttaagcagtactttacctgttttttctttagcaaaccaggttatgtggtgtaaaggtttgttatacgtgccacaatatagcatataaatattatgccatcattccttctcttgttaaaggtagaagaataaaattgtgatttttataacctgtgcttattactcaaatggtcttcaacatctttttaaacaacacatactttttgaatgttcagtttctattttgcttgaggtattttgtacatatgtgccttgtgattgctgctgctttaaaggataaagtactctttgggggatgagtctggtttgttttgttttattttttaatgaaataaacctatattcctga

SEQ ID NO: 444967 - DNA, 2418 bp, Homo sapiens
gtcgtcacctcgggctggttcgctcgggttaggcagcagctttagcatctctaaagaagtatggcgtggggacttgtggacccagaggattttatggcacatttgatgttcatttggatttggaagaccgcctggcaaaatttatgaagacagaagaagccattatatactcatatggatttgccaccatagccagtgctattcctgcttactctaaaagaggggacattgtttttgtagatagagctgcctgctttgctattcagaaaggattacaggcatcccgtagtgacattaagttatttaagcataatgacatggctgacctcgagcgactactaaaagaacaagagatcgaagatcaaaagaatcctcgcaaggctcgtgtaactcggcgtttcattgtagtagaaggattgtatatgaatactggaactatttgtcctcttccagaattggttaagttaaaatacaaatacaaagcaagaatcttcctggaggaaagcctttcatttggagtcctaggagagcatggccgaggagtcactgaacactatggaatcaatattgatgatattgatcttatcagtgccaacatggagaatgcacttgcttctattggaggtttctgctgtggcaggtcttttgtaattgaccatcagcgactttccggccagggatactgcttttcagcttcgttacctcccctgttagctgctgcagcaattgaggccctcaacatcatggaagagaatccaggtatttttgcagtgttgaaggaaaagtgcggacaaattcataaagctttacaaggcatttctggattaaaagtggtgggggagtccctttctccagcctttcacctacaactggaagagagcactgggtctcgcgagcaagatgtcagactgcttcaggaaattgtagatcaatgcatgaacagaagtattgcattaactcaggcgcgctacttggagaaagaagagaagtgtctccctcctcccagcattcgggttgtggtcacggtggaacaaacagaggaagaactggagagagctgcgtccaccatcaaggaggtagcccaggccgtcctgctctaggcagagtcccgggaccatggcctcctgccacacaacacgcagagaggactcaagactcccgctggccatggagtggcctgaaagagagcaagaacatgtggatctttgataggattgttaccaaatggtgtcagtatggaccaattgtgtgaccatgagaaggatgcttattttttttaaaaagaaaacacatctaaaagcccaggaactgatttttttaagaggaaaactaatgacagtgtataactgatgtttaaattgtgcatttagtactatttaaatgttttcttatactagtattttatattcttttgttgtcgtttaaaactggagcttcagtgtctcttccctccctctaatagtaatggttcagtaagcactccttaactccttagtatttcatagaaaaatgactgcaacattaaagctaagaggaacacttcaacatatgtggtacaaatttatattgaagatctaaataaaccacgtattttccagtcttcgttgtgtgaagctaaatggtggctaaaaggaacactttttgtgtgattattataaactttgcattgtatttgaatcttagaacttttgtacacactaaatattgatgtcacaccatttctaatctgagcatccttagccagagaatattcattatacttcctaagtgagcaataatttaaatcagaagctattttattttaatgtaattaacctttctttacatttcttatgtgttcacctctaatctgttttaggaagagagttggttattatgttgatcccataatataaatcatatcctttatattttagaatatctcaaatgtattccttttttgtatggtgggtttgcctagggacgtgtaactacaggcttttactaagccaaggaaaaagagaatttttcttttcatcttacaaattccagatatctacaaaagatgtgaaagcactaaaaataccatttttaagcagtactttacctgttttttctttagcaaaccaggttatgtggtgtaaaggtttgttatacgtgccacaatatagcatataaatattatgccatcattccttctcttgttaaaggtagaagaataaaattgtgatttttataacctgtgcttattactcaaatggtcttcaacatctttttaaacaacacatactttttgaatgttcagtttctattttgcttgaggtattttgtacatatgtgccttgtgattgctgctgctttaaaggataaagtactctttgggggatgagtctggtttgttttgttttattttttaatgaaataaacctatattcctga

SEQ ID NO: 444968 - DNA, 2193 bp, Homo sapiens
tctgaatcttcatcactgatactaattcagagaaccagaaaatgtgtgtctctgtgctcattcatatgcttgcttctcagatggcctggcacgcctaccttctgatcagatactttagttttgggattttccttgaataaaaaaaggaaaatatcaagaaaagattgtaaaaattactttactatagttgattttttaccaaattgtttaggataaagaaataagcaataaatttgtaccctttgattcttagccagattaggatcttgatgagaacaagaggcattgattgttcttgaaagcatcattccaggtttgttgaaagtgggatactgaggtgagaaggggccagttagcacgcaccagagacaaagcttgggccttcaggggagtatgggttcttggctctgttagtatgtagaaggatttgtagcattttaaattgatgaacttgatctgggtcttcaaaaatatttttaggttagtactatcataagtttcaaatagactctcaaacgtatttttttcatctaggtatttttgcagtgttgaaggaaaagtgcggacaaattcataaagctttacaaggcatttctggattaaaagtggtgggggagtccctttctccagcctttcacctacaactggaagagagcactgggtctcgcgagcaagatgtcagactgcttcaggaaattgtagatcaatgcatgaacagaagtattgcattaactcaggcgcgctacttggagaaagaagagaagtgtctccctcctcccagcattcgggttgtggtcacggtggaacaaacagaggaagaactggagagagctgcgtccaccatcaaggaggtagcccaggccgtcctgctctaggcagagtcccgggaccatggcctcctgccacacaacacgcagagaggactcaagactcccgctggccatggagtggcctgaaagagagcaagaacatgtggatctttgataggattgttaccaaatggtgtcagtatggaccaattgtgtgaccatgagaaggatgcttattttttttaaaaagaaaacacatctaaaagcccaggaactgatttttttaagaggaaaactaatgacagtgtataactgatgtttaaattgtgcatttagtactatttaaatgttttcttatactagtattttatattcttttgttgtcgtttaaaactggagcttcagtgtctcttccctccctctaatagtaatggttcagtaagcactccttaactccttagtatttcatagaaaaatgactgcaacattaaagctaagaggaacacttcaacatatgtggtacaaatttatattgaagatctaaataaaccacgtattttccagtcttcgttgtgtgaagctaaatggtggctaaaaggaacactttttgtgtgattattataaactttgcattgtatttgaatcttagaacttttgtacacactaaatattgatgtcacaccatttctaatctgagcatccttagccagagaatattcattatacttcctaagtgagcaataatttaaatcagaagctattttattttaatgtaattaacctttctttacatttcttatgtgttcacctctaatctgttttaggaagagagttggttattatgttgatcccataatataaatcatatcctttatattttagaatatctcaaatgtattccttttttgtatggtgggtttgcctagggacgtgtaactacaggcttttactaagccaaggaaaaagagaatttttcttttcatcttacaaattccagatatctacaaaagatgtgaaagcactaaaaataccatttttaagcagtactttacctgttttttctttagcaaaccaggttatgtggtgtaaaggtttgttatacgtgccacaatatagcatataaatattatgccatcattccttctcttgttaaaggtagaagaataaaattgtgatttttataacctgtgcttattactcaaatggtcttcaacatctttttaaacaacacatactttttgaatgttcagtttctattttgcttgaggtattttgtacatatgtgccttgtgattgctgctgctttaaaggataaagtactctttgggggatgagtctggtttgttttgttttattttttaatgaaataaacctatattcctga

SEQ ID NO: 444969 - DNA, 1992 bp, Homo sapiens
tgtatcgattgcacctcacttctctcatgcatcccaactcaaaacgttcagaacttatcacttttcccccaaaagctgttctctttcctgtacaacttatttggtaagtggctccacctatacttggagctctaagcagccgtgtaagaagtacaaacaccctgctggagaggtcatctggaaagggcctgaaactacatcagagggagaggacccctgagccctaccttccagccctctgcatcaaggcaccaggcatatggatgaagatgtcttggatcctccagatcggactagctgctagctaaacaccgctgagtgatccagtcaacaccatgtggggcagaagaatctcccagctgagcggtgtttatcgatgccaccaaggcatttctggattaaaagtggtgggggagtccctttctccagcctttcacctacaactggaagagagcactgggtctcgcgagcaagatgtcagactgcttcaggaaattgtagatcaatgcatgaacagaagtattgcattaactcaggcgcgctacttggagaaagaagagaagtgtctccctcctcccagcattcgggttgtggtcacggtggaacaaacagaggaagaactggagagagctgcgtccaccatcaaggaggtagcccaggccgtcctgctctaggcagagtcccgggaccatggcctcctgccacacaacacgcagagaggactcaagactcccgctggccatggagtggcctgaaagagagcaagaacatgtggatctttgataggattgttaccaaatggtgtcagtatggaccaattgtgtgaccatgagaaggatgcttattttttttaaaaagaaaacacatctaaaagcccaggaactgatttttttaagaggaaaactaatgacagtgtataactgatgtttaaattgtgcatttagtactatttaaatgttttcttatactagtattttatattcttttgttgtcgtttaaaactggagcttcagtgtctcttccctccctctaatagtaatggttcagtaagcactccttaactccttagtatttcatagaaaaatgactgcaacattaaagctaagaggaacacttcaacatatgtggtacaaatttatattgaagatctaaataaaccacgtattttccagtcttcgttgtgtgaagctaaatggtggctaaaaggaacactttttgtgtgattattataaactttgcattgtatttgaatcttagaacttttgtacacactaaatattgatgtcacaccatttctaatctgagcatccttagccagagaatattcattatacttcctaagtgagcaataatttaaatcagaagctattttattttaatgtaattaacctttctttacatttcttatgtgttcacctctaatctgttttaggaagagagttggttattatgttgatcccataatataaatcatatcctttatattttagaatatctcaaatgtattccttttttgtatggtgggtttgcctagggacgtgtaactacaggcttttactaagccaaggaaaaagagaatttttcttttcatcttacaaattccagatatctacaaaagatgtgaaagcactaaaaataccatttttaagcagtactttacctgttttttctttagcaaaccaggttatgtggtgtaaaggtttgttatacgtgccacaatatagcatataaatattatgccatcattccttctcttgttaaaggtagaagaataaaattgtgatttttataacctgtgcttattactcaaatggtcttcaacatctttttaaacaacacatactttttgaatgttcagtttctattttgcttgaggtattttgtacatatgtgccttgtgattgctgctgctttaaaggataaagtactctttgggggatgagtctggtttgttttgttttattttttaatgaaataaacctatattcctga

SEQ ID NO: 444970 - DNA, 1406 bp, Homo sapiens
tgcccccttttttgtagaccccctctgatacgatcgagctcgtacccgtcgccacatcaaggaggtagcccaggccgtcctgctctaggcagagtcccgggaccatggcctcctgccacacaacacgcagagaggactcaagactcccgctggccatggagtggcctgaaagagagcaagaacatgtggatctttgataggattgttaccaaatggtgtcagtatggaccaattgtgtgaccatgagaaggatgcttattttttttaaaaagaaaacacatctaaaagcccaggaactgatttttttaagaggaaaactaatgacagtgtataactgatgtttaaattgtgcatttagtactatttaaatgttttcttatactagtattttatattcttttgttgtcgtttaaaactggagcttcagtgtctcttccctccctctaatagtaatggttcagtaagcactccttaactccttagtatttcatagaaaaatgactgcaacattaaagctaagaggaacacttcaacatatgtggtacaaatttatattgaagatctaaataaaccacgtattttccagtcttcgttgtgtgaagctaaatggtggctaaaaggaacactttttgtgtgattattataaactttgcattgtatttgaatcttagaacttttgtacacactaaatattgatgtcacaccatttctaatctgagcatccttagccagagaatattcattatacttcctaagtgagcaataatttaaatcagaagctattttattttaatgtaattaacctttctttacatttcttatgtgttcacctctaatctgttttaggaagagagttggttattatgttgatcccataatataaatcatatcctttatattttagaatatctcaaatgtattccttttttgtatggtgggtttgcctagggacgtgtaactacaggcttttactaagccaaggaaaaagagaatttttcttttcatcttacaaattccagatatctacaaaagatgtgaaagcactaaaaataccatttttaagcagtactttacctgttttttctttagcaaaccaggttatgtggtgtaaaggtttgttatacgtgccacaatatagcatataaatattatgccatcattccttctcttgttaaaggtagaagaataaaattgtgatttttataacctgtgcttattactcaaatggtcttcaacatctttttaaacaacacatactttttgaatgttcagtttctattttgcttgaggtattttgtacatatgtgccttgtgattgctgctgctttaaaggataaagtactctttgggggatgagtctggtttgttttgttttattttttaatgaaataaacctatattcctga

SEQ ID NO: 444971 - DNA, 1345 bp, Homo sapiens
acgcgcttgtgacccgccttccggaaggaagcggctaactatggcgaccgccacggagcagtgggttctggtggagatggtacaggcgctttacgaggctcctgcttaccatcttattttggaagggattctgatcctctggataatcagacttcttttctctaagacttacaaattacaagaacgatctgatcttacagtcaaggaaaaagaagaactgattgaagagtggcaaccagaacctcttgttcctcctgtcccaaaagaccatcctgctctcaactacaacatcgtttcaggccctccaagccacaaaactgtggtgaatggaaaagaatgtataaacttcgcctcatttaattttcttggattgttggataaccctagggttaaggcagcagctttagcatctctaaagaagtatggcgtggggacttgtggacccagaggattttatggcacatttgatgttcatttggatttggaagaccgcctggcaaaatttatgaagacagaagaagccattatatactcatatggatttgccaccatagccagtgctattcctgcttactctaaaagaggggacattgtttttgtagatagagctgcctgctttgctattcagaaaggattacaggcatcccgtagtgacattaagttatttaagcataatgacatggctgacctcgagcgactactaaaagaacaagagatcgaagatcaaaagaatcctcgcaaggctcgtgtaactcggcgtttcattgtagtagaaggattgtatatgaatactggaactatttgtcctcttccagaattggtaagcaaccatgttcagctgtaattttaatatttggactatttgacagatgtgccttttgtttatgaccgcttttagtgtataacgtctgcgttgctttgcgcattaggcctcataagcatattttgctcagatcagggaagaagaacaacactgaatgccagtgctggccttcaaagagtaatcaagactgctctgttgcccaggctggagtgcagtggtgtgaacacagctcactgcagccttaccctcctgggctcaagtgatccttccaccttagctttctgagttagctgggactacaggcacatgccaccacacctggctgatttttcccttttttgtggagtaggggtctcactgcgttacccaggctgttctcaaactcttgggctcaagcgatcctcctgcctcagcctgccaaagtgctggtattacaggtatgagccaccacacctggccaaaacttagctttagctttttttttctcccccgcaagacagtcttgccctgtcgtcaggctgg

SEQ ID NO: 444972 - DNA, 709 bp, Homo sapiens
acgcgcttgtgacccgccttccggaaggaagcggctaactatggcgaccgccacggagcagtgggttctggtggagatggtacaggcgctttacgaggctcctgcttaccatcttattttggaagggattctgatcctctggataatcagacttcttttctctaagacttacaaattacaagaacgatctgatcttacagtcaaggaaaaagaagaactgattgaagagtggcaaccagaacctcttgttcctcctgtcccaaaagaccatcctgctctcaactacaacatcgtttcaggccctccaagccacaaaactgtggtgaatggaaaagaatgtataaacttcgcctcatttaattttcttggattgttggataaccctagggttaaggtgagtagcacatattgctgaagtggacagataacattactgatttaagaaactagacataaaagacaaaggcaggctgggcgtggtggatcacttcaggtcaggagtttaagaccagcctggccaacatggtgaaaccccatctctaccaaaaaatacaaaaattagcagggcatggtggcacatgcctgtagtcccagctacttgggaggctgaggtgggagaatttcttgggcccaggaggtggaggttgcagtgagccaagatggtgccactgcactccagcctgggcaacagggcgagactctatctcca

SEQ ID NO: 444973 - DNA, 630 bp, Homo sapiens
acgcgcttgtgacccgccttccggaaggaagcggctaactatggcgaccgccacggagcagtgggttctggtggagatggtacaggcgctttacgaggctcctgcttaccatcttattttggaagggattctgatcctctggataatcagacttcttttctctaagacttacaaattacaagaacgatctgatcttacagtcaaggaaaaagaagaactgattgaagagtggcaaccagaacctcttgttcctcctgtcccaaaagaccatcctgctctcaactacaacatcgtttcaggccctccaagccacaaaactgtggtgaatggaaaagaatgtataaacttcgcctcatttaattttcttggattgttggataaccctagggttaaggcagcagctttagcatctctaaagaagtatggcgtggggacttgtggacccagaggattttatggcacatttggtaagtttttgttgtgttctctttgagactactgctttcaatagttaagattcaattttaggctgggcatggtggctcacacctgtactcccagcactttggggaggctgaggtgggaggattccttgagcccaggaatttgataccagcatgggcaatatag

SEQ ID NO: 444974 - DNA, 2780 bp, Homo sapiens
acgcgcttgtgacccgccttccggaaggaagcggctaactatggcgaccgccacggagcagtgggttctggtggagatggtacaggcgctttacgaggctcctgcttaccatcttattttggaagggattctgatcctctggataatcagacttcttttctctaagacttacaaattacaagaacgatctgatcttacagtcaaggaaaaagaagaactgattgaagagtggcaaccagaacctcttgttcctcctgtcccaaaagaccatcctgctctcaactacaacatcgtttcaggccctccaagccacaaaactgtggtgaatggaaaagaatgtataaacttcgcctcatttaattttcttggattgttggataaccctagggttaaggcagcagctttagcatctctaaagaagtatggcgtggggacttgtggacccagaggattttatggcacatttgatgttcatttggatttggaagaccgcctggcaaaatttatgaagacagaagaagccattatatactcatatggatttgccaccatagccagtgctattcctgcttactctaaaagaggggacattgtttttgtagatagagctgcctgctttgctattcagaaaggattacaggcatcccgtagtgacattaagttatttaagcataatgacatggctgacctcgagcgactactaaaagaacaagagatcgaagatcaaaagaatcctcgcaaggctcgtgtaactcggcgtttcattgtagtagaaggattgtatatgaatactggaactatttgtcctcttccagaattggttaagttaaaatacaaatacaaagcaagaatcttcctggaggaaagcctttcatttggagtcctaggagagcatggccgaggagtcactgaacactatggaatcaatattgatgatattgatcttatcagtgccaacatggagaatgcacttgcttctattggaggtttctgctgtggcaggtcttttgtaattgaccatcagcgactttccggccagggatactgcttttcagcttcgttacctcccctgttagctgctgcagcaattgaggccctcaacatcatggaagagaatccaggtatttttgcagtgttgaaggaaaagtgcggacaaattcataaagctttacaaggcatttctggattaaaagtggtgggggagtccctttctccagcctttcacctacaactggaagagagcactgggtctcgcgagcaagatgtcagactgcttcaggaaattgtagatcaatgcatgaacagaagtattgcattaactcaggcgcgctacttggagaaagaagagaagtgtctccctcctcccagcattcgggttgtggtcacggtggaacaaacagaggaagaactggagagagctgcgtccaccatcaaggaggtagcccaggccgtcctgctctaggcagagtcccgggaccatggcctcctgccacacaacacgcagagaggactcaagactcccgctggccatggagtggcctgaaagagagcaagaacatgtggatctttgataggattgttaccaaatggtgtcagtatggaccaattgtgtgaccatgagaaggatgcttattttttttaaaaagaaaacacatctaaaagcccaggaactgatttttttaagaggaaaactaatgacagtgtataactgatgtttaaattgtgcatttagtactatttaaatgttttcttatactagtattttatattcttttgttgtcgtttaaaactggagcttcagtgtctcttccctccctctaatagtaatggttcagtaagcactccttaactccttagtatttcatagaaaaatgactgcaacattaaagctaagaggaacacttcaacatatgtggtacaaatttatattgaagatctaaataaaccacgtattttccagtcttcgttgtgtgaagctaaatggtggctaaaaggaacactttttgtgtgattattataaactttgcattgtatttgaatcttagaacttttgtacacactaaatattgatgtcacaccatttctaatctgagcatccttagccagagaatattcattatacttcctaagtgagcaataatttaaatcagaagctattttattttaatgtaattaacctttctttacatttcttatgtgttcacctctaatctgttttaggaagagagttggttattatgttgatcccataatataaatcatatcctttatattttagaatatctcaaatgtattccttttttgtatggtgggtttgcctagggacgtgtaactacaggcttttactaagccaaggaaaaagagaatttttcttttcatcttacaaattccagatatctacaaaagatgtgaaagcactaaaaataccatttttaagcagtactttacctgttttttctttagcaaaccaggttatgtggtgtaaaggtttgttatacgtgccacaatatagcatataaatattatgccatcattccttctcttgttaaaggtagaagaataaaattgtgatttttataacctgtgcttattactcaaatggtcttcaacatctttttaaacaacacatactttttgaatgttcagtttctattttgcttgaggtattttgtacatatgtgccttgtgattgctgctgctttaaaggataaagtactctttgggggatgagtctggtttgttttgttttattttttaatgaaataaacctatattcctga

SEQ ID NO: 444975 - DNA, 2727 bp, Homo sapiens
acgcgcttgtgacccgccttccggaaggaagcggctaactatggcgaccgccacggagcagtgggttctggtggagatggtacaggcgctttacgaggctcctgcttaccatcttattttggaagggattctgatcctctggataatcagacttcttttctctaagacttacaaattacaagaacgatctgatcttacagtcaaggaaaaagaagaactgattgaagagtggcaaccagaacctcttgttcctcctgtcccaaaagaccatcctgctctcaactacaacatcgtttcaggccctccaagccacaaaactgtggtgaatggaaaagaatgtataaacttcgcctcatttaattttcttggattgttggataaccctagggttaaggcagcagctttagcatctctaaagaagtatggcgtggggacttgtggacccagaggattttatggcacatttgatgttcatttggatttggaagaccgcctggcaaaatttatgaagacagaagaagccattatatactcatatggatttgccaccatagccagtgctattcctgcttactctaaaagaggggacattgtttttgtagatagagctgcctgctttgctattcagaaaggattacaggcatcccgtagtgacattaagttatttaagcataatgacatggctgacctcgagcgactactaaaagaacaagagatcgaagatcaaaagaatcctcgcaaggctcgtgtaactcggcgtttcattgtagtagaaggattgtatatgaatactggaactatttgtcctcttccagaattggttaagttaaaatacaaatacaaagcaagaatcttcctggaggaaagcctttcatttggagtcctaggagagcatggccgaggagtcactgaacactatggaatcaatattgatgatattgatcttatcagtgccaacatggagaatgcacttgcttctattggaggtttctgctgtggcaggtcttttgtaattgaccatcagcgactttccggccagggatactgcttttcagcttcgttacctcccctgttagctgctgcagcaattgaggccctcaacatcatggaagagaatccaggtatttttgcagtgttgaaggaaaagtgcggacaaattcataaagctttacaaggcatttctggattaaaagtggtgggggagtccctttctccagcctttcacctacaactggaagagagcactgggtctcgcgagcaagatgtcagactgcttcaggaaattgtagatcaatgcatgaacagaagtattgcattaactcaggcgcgctacttggagaaagaagagaagtgtctccctcctcccagcattcgggttgtggtcacggtggaacaaacagaggaagaactggagagagctgcgtccaccatcaaggaggtagcccaggccgtcctgctctaggcagagtcccgggaccatggcctcctgccacacaacacgcagagaggactcaagactcccgctggccatggagtggcctgaaagagagcaagaacatgtggatctttgataggattgttaccaaatggtgtcagtatggaccaattgtgtgaccatgagaaggatgcttattttttttaaaaagaaaacacatctaaaagcccaggaactgatttttttaagaggaaaactaatgacagtgtataactgatgtttaaattgtgcatttagtactatttaaatgttttcttatactagtattttatattcttttgttgtcgtttaaaactggagcttcagtgtctcttccctccctctaatagtaatggttcagtaagcactccttaactccttagtatttcatagaaaaatgactgcaacattaaagctaagaggaacacttcaacatatgtggtacaaatttatattgaagatctaaataaaccacgtattttccagtcttcgttgtgtgaagctaaatggtggctaaaaggaacactttttgtgtgattattataaactttgcattgtatttgaatcttagaacttttgtacacactaaatattgatgtcacaccatttctaatctgagcatccttagccagagaatattcattatacttcctaagtgagcaataatttaaatcagaagctattttattttaatgtaattaacctttctttacatttcttatgtgttcacctctaatctgttttaggaagagagttggttattatgttgatcccataatataaatcatatcctttatattttagaatatctcaaatgtattccttttttgtatggtgggtttgcctagggacgtgtaactacaggcttttactaagccaaggaaaaagagaatttttcttttcatcttacaaattccagatatctacaaaagatgtgaaagcactaaaaataccatttttaagcagtactttacctgttttttctttagcaaaccaggttatgtggtgtaaaggtttgttatacgtgccacaatatagcatataaatattatgccatcattccttctcttgttaaaggtagaagaataaaattgtgatttttataacctgtgcttattactcaaatggtcttcaacatctttttaaacaacacatactttttgaatgttcagtttctattttgcttgaggtattttgtacatatgtgccttgtgattgctgctgctttaaaggataaagtactctttggggga

SEQ ID NO: 444976 - DNA, 2386 bp, Homo sapiens
actccctgccactaggcagggcctccccagcccctactggcctgccccacctccatttggactggcacatttgatgttcatttggatttggaagaccgcctggcaaaatttatgaagacagaagaagccattatatactcatatggatttgccaccatagccagtgctattcctgcttactctaaaagaggggacattgtttttgtagatagagctgcctgctttgctattcagaaaggattacaggcatcccgtagtgacattaagttatttaagcataatgacatggctgacctcgagcgactactaaaagaacaagagatcgaagatcaaaagaatcctcgcaaggctcgtgtaactcggcgtttcattgtagtagaaggattgtatatgaatactggaactatttgtcctcttccagaattggttaagttaaaatacaaatacaaagcaagaatcttcctggaggaaagcctttcatttggagtcctaggagagcatggccgaggagtcactgaacactatggaatcaatattgatgatattgatcttatcagtgccaacatggagaatgcacttgcttctattggaggtttctgctgtggcaggtcttttgtaattgaccatcagcgactttccggccagggatactgcttttcagcttcgttacctcccctgttagctgctgcagcaattgaggccctcaacatcatggaagagaatccaggtatttttgcagtgttgaaggaaaagtgcggacaaattcataaagctttacaaggcatttctggattaaaagtggtgggggagtccctttctccagcctttcacctacaactggaagagagcactgggtctcgcgagcaagatgtcagactgcttcaggaaattgtagatcaatgcatgaacagaagtattgcattaactcaggcgcgctacttggagaaagaagagaagtgtctccctcctcccagcattcgggttgtggtcacggtggaacaaacagaggaagaactggagagagctgcgtccaccatcaaggaggtagcccaggccgtcctgctctaggcagagtcccgggaccatggcctcctgccacacaacacgcagagaggactcaagactcccgctggccatggagtggcctgaaagagagcaagaacatgtggatctttgataggattgttaccaaatggtgtcagtatggaccaattgtgtgaccatgagaaggatgcttattttttttaaaaagaaaacacatctaaaagcccaggaactgatttttttaagaggaaaactaatgacagtgtataactgatgtttaaattgtgcatttagtactatttaaatgttttcttatactagtattttatattcttttgttgtcgtttaaaactggagcttcagtgtctcttccctccctctaatagtaatggttcagtaagcactccttaactccttagtatttcatagaaaaatgactgcaacattaaagctaagaggaacacttcaacatatgtggtacaaatttatattgaagatctaaataaaccacgtattttccagtcttcgttgtgtgaagctaaatggtggctaaaaggaacactttttgtgtgattattataaactttgcattgtatttgaatcttagaacttttgtacacactaaatattgatgtcacaccatttctaatctgagcatccttagccagagaatattcattatacttcctaagtgagcaataatttaaatcagaagctattttattttaatgtaattaacctttctttacatttcttatgtgttcacctctaatctgttttaggaagagagttggttattatgttgatcccataatataaatcatatcctttatattttagaatatctcaaatgtattccttttttgtatggtgggtttgcctagggacgtgtaactacaggcttttactaagccaaggaaaaagagaatttttcttttcatcttacaaattccagatatctacaaaagatgtgaaagcactaaaaataccatttttaagcagtactttacctgttttttctttagcaaaccaggttatgtggtgtaaaggtttgttatacgtgccacaatatagcatataaatattatgccatcattccttctcttgttaaaggtagaagaataaaattgtgatttttataacctgtgcttattactcaaatggtcttcaacatctttttaaacaacacatactttttgaatgttcagtttctattttgcttgaggtattttgtacatatgtgccttgtgattgctgctgctttaaaggataaagtactctttgggggatgagtctggtttgttttgttttattttttaatgaaataaacctatattcctga

SEQ ID NO: 444977 - DNA, 1614 bp, Homo sapiens
acgcgcttgtgacccgccttccggaaggaagcggctaactatggcgaccgccacggagcagtgggttctggtggagatggtacaggcgctttacgaggctcctgcttaccatcttattttggaagggattctgatcctctggataatcagacttcttttctctaagacttacaaattacaagaacgatctgatcttacagtcaaggaaaaagaagaactgattgaagagtggcaaccagaacctcttgttcctcctgtcccaaaagaccatcctgctctcaactacaacatcgtttcaggccctccaagccacaaaactgtggtgaatggaaaagaatgtataaacttcgcctcatttaattttcttggattgttggataaccctagggttaaggcagcagctttagcatctctaaagaagtatggcgtggggacttgtggacccagaggattttatggcacatttgatgttcatttggatttggaagaccgcctggcaaaatttatgaagacagaagaagccattatatactcatatggatttgccaccatagccagtgctattcctgcttactctaaaagaggggacattgtttttgtagatagagctgcctgctttgctattcagaaaggattacaggcatcccgtagtgacattaagttatttaagcataatgacatggctgacctcgagcgactactaaaagaacaagagatcgaagatcaaaagaatcctcgcaaggctcgtgtaactcggcgtttcattgtagtagaaggattgtatatgaatactggaactatttgtcctcttccagaattggttaagttaaaatacaaatacaaagcaagaatcttcctggaggaaagcctttcatttggagtcctaggagagcatggccgaggagtcactgaacactatggaatcaatattgatgatattgatcttatcagtgccaacatggagaatgcacttgcttctattggaggtttctgctgtggcaggtcttttgtaattgaccatcagcgactttccggccagggatactgcttttcagcttcgttacctcccctgttagctgctgcagcaattgaggccctcaacatcatggaagagaatccaggtatttttgcagtgttgaaggaaaagtgcggacaaattcataaagctttacaaggcatttctggattaaaagtggtgggggagtccctttctccagcctttcacctacaactggaagagagcactgggtctcgcgagcaagatgtcagactgcttcaggaaattgtagatcaatgcatgaacagaagtattgcattaactcaggcgcgctacttggagaaagaagagaagtgtctccctcctcccagcattcgggttgtggtcacggtggaacaaacagaacataactggagtagcttcagaactaaggcggccacattcaccccaccgcttaggagttagcttcattatacacaaccaagcacaggagaaacactcaccaggaaaagatgccggaggcttggaagttctcaagggaactgtttagacagaggtacgaacatctcattcagaacttccaaatacactaacaataataaaaatgtgcctctcaa

SEQ ID NO: 444978 - DNA, 720 bp, Homo sapiens
acgcgcttgtgacccgccttccggaaggaagcggctaactatggcgaccgccacggagcagtgggttctggtggagatggtacaggcgctttacgaggctcctgcttaccatcttattttggaagggattctgatcctctggataatcagacttcttttctctaagacttacaaattacaagaacgatctgatcttacagtcaaggaaaaagaagaactgattgaagagtggcaaccagaacctcttgttcctcctgtcccaaaagaccatcctgctctcaactacaacatcgtttcaggccctccaagccacaaaactgtggtgaatggaaaagaatgtataaacttcgcctcatttaattttcttggattgttggataaccctagggttaaggcagcagctttagcatctctaaagaagtatggcgtggggacttgtggacccagaggattttatggcacatttgatgttcatttggatttggaagaccgcctggcaaaatttatgaagacagaagaagccattatatactcatatggatttgccaccatagccagtgctattcctgcttactctaaaagaggggacattgtttttgtctatagtacgactagagctgcctcgctatgcaaaatctagaagaggagttacacgcatgaaagaagcgacagggggttaccccaagcaaaacgaaatggctgtcccggagaaacggcgca

SEQ ID NO: 444979 - DNA, 815 bp, Homo sapiens
acgcgcttgtgacccgccttccggaaggaagcggctaactatggcgaccgccacggagcagtgggttctggtggagatggtacaggcgctttacgaggctcctgcttaccatcttattttggaagggattctgatcctctggataatcagacttcttttctctaagacttacaaattacaagaacgatctgatcttacagtcaaggaaaaagaagaactgattgaagagtggcaaccagaacctcttgttcctcctgtcccaaaagaccatcctgctctcaactacaacatcgtttcagggtaaattgattttgctacctgaagtacttgtatttggcttcttgtagtaacctgcagtctatagtgctttatatgtagtagtcctttttttatctgaaacaaaacattttgaagttcccaggagtaacagctttagctcctgattttaaaaaatttattctagggatgatacaggcattttttaaaatctccaatttaagcattaatgtttgcccttttttccaagaatgcacacatgttaatatttccaatggtcgaacacttaaaatgaaaagcaacagacttctgctttttacccatctggttattttctgattttaaatttgtcgcacgttaccctcataattctagatactgtatagtatgcttaactaccatttgttgattcatcaactacagacaacacctgttgatccccacaatatgaattatggagcttccgctcacttatgcctctttcctccttgcttccagtgtctcatctattttttacttttcattctcttggctatctt

SEQ ID NO: 444980 - DNA, 499 bp, Homo sapiens
  misc_feature (24)..(24): n is a, c, g, or t
  misc_feature (43)..(43): n is a, c, g, or t
aaattaagggtattattaaaatangtgacaattggtttatttnatgttagattacaggcggcctaggttctgatctacaatggccaactggacatcatcgtggcagctgccctgacagagcgctccttgatgggcatggactggaaaggatcccaggaatacaagaaggcagaaaaaaaagtttggaagatctttaaatctgacagtgaagtggctggttacatccggcaagcgggtgacttccatcaggtaattattcgaggtggaggacatattttaccctatgaccagcctctgagagcttttgacatgattaatcgattcatttatggaaaaggatgggatccttatgttggataaactaccttcccaaaagagaacatcagaggttttcattgctgaaaagaaaatcgtaaaaacagaaaatgtcataggaataaaaaaattatcttttcatatctgcaagatttttttcatcaataaaaattatccttgaaac

SEQ ID NO: 444981 - DNA, 2072 bp, Homo sapiens
gggctgcctcacttctgcctgatttgggaagcgctgcaaggacaaccggctggggtccttgcgcgccgcggctcagggaggagcaccgactgcgccgcaccctgagagatggttggtgccatgtggaaggtgattgtttcgctggtcctgttgatgcctggcccctgtgatgggctgtttcgctccctatacagaagtgtttccatgccacctaagggagactcaggacagccattatttctcaccccttacattgaagctgggaagatccaaaaaggaagagaattgagtttggtcggccctttcccaggactgaacatgaagagttatgccggcttcctcaccgtgaataagacttacaacagcaacctcttcttctggttcttcccagctcagatacagccagaagatgccccagtagttctctggctacagggtgggccgggaggttcatccatgtttggactctttgtggaacatgggccttatgttgtcacaagtaacatgaccttgcgtgacagagacttcccctggaccacaacgctctccatgctttacattgacaatccagtgggcacaggcttcagttttactgatgatacccacggatatgcagtcaatgaggacgatgtagcacgggatttatacagtgcactaattcagtttttccagatatttcctgaatataaaaataatgacttttatgtcactggggagtcttatgcagggaaatatgtgccagccattgcacacctcatccattccctcaaccctgtgagagaggtgaagatcaacctgaacggaattgctattggagatggatattctgatcccgaatcaattatagggggctatgcagaattcctgtaccaaattggcttgttggatgagaagcaaaaaaagtacttccagaagcagtgccatgaatgcatagaacacatcaggaagcagaactggtttgaggcctttgaaatactggataaactactagatggcgacttaacaagtgatccttcttacttccagaatgttacaggatgtagtaattactataactttttgcggtgcacggaacctgaggatcagctttactatgtgaaatttttgtcactcccagaggtgagacaagccatccacgtggggaatcagacttttaatgatggaactatagttgaaaagtacttgcgagaagatacagtacagtcagttaagccatggttaactgaaatcatgaataattataaggttctgatctacaatggccaactggacatcatcgtggcagctgccctgacagagcgctccttgatgggcatggactggaaaggatcccaggaatacaagaaggcagaaaaaaaagtttggaagatctttaaatctgacagtgaagtggctggttacatccggcaagcgggtgacttccatcaggtaattattcgaggtggaggacatattttaccctatgaccagcctctgagagcttttgacatgattaatcgattcatttatggaaaaggatgggatccttatgttggataaactaccttcccaaaagagaacatcagaggttttcattgctgaaaagaaaatcgtaaaaacagaaaatgtcataggaataaaaaaattatcttttcatatctgcaagatttttttcatcaataaaaattatccttgaaacaagtgagcttttgtttttggggggagatgtttactacaaaattaacatgagtacatgagtaagaattacattatttaacttaaaggatgaaaggtatggatgatgtgacactgagacaagatgtataaatgaaattttagggtcttgaataggaagttttaatttcttctaagagtaagtgaaaagtgcagttgtaacaaacaaagctgtaacatctttttctgccaataacagaagtttggcatgccgtgaaggtgtttggaaatattattggataagaatagctcaattatcccaaataaatggatgaagctataatagttttggggaaaagattctcaaatgtataaagtcttagaacaaaagaattctttgaaataaaaatattatatat

SEQ ID NO: 444982 - DNA, 1766 bp, Homo sapiens
gggctgcctcacttctgcctgatttgggaagcgctgcaaggacaaccggctggggtccttgcgcgccgcggctcagggaggagcaccgactgcgccgcgtaagtgccgcctgccctgcgtgggtcgtgccagctcagcgggacaggtcctcgcctcggtccctcggacttagggagcgcggggcagaccctgagagatggttggtgccatgtggaaggtgattgtttcgctggtcctgttgatgcctggcccctgtgatgggctgtttcgctccctatacagaagtgtttccatgccacctaagggagactcaggacagccattatttctcaccccttacattgaagctgggaagatccaaaaaggaagagaattgagtttggtcggccctttcccaggactgaacatgaagagttatgccggcttcctcaccgtgaataagacttacaacagcaacctcttcttctggttcttcccagctcagatacagccagaagatgccccagtagttctctggctacagggtgggccgggaggttcatccatgtttggactctttgtggaacatgggccttatgttgtcacaagtaacatgaccttgcgtgacagagacttcccctggaccacaacgctctccatgctttacattgacaatccagtgggcacaggcttcagttttactgatgatacccacggatatgcagtcaatgaggacgatgtagcacgggatttatacagtgcactaattcagtttttccagatatttcctgaatataaaaataatgacttttatgtcactggggagtcttatgcagggaaatatgtgccagccattgcacacctcatccattccctcaaccctgtgagagaggtgaagatcaacctgaacggaattgctattggagatggatattctgatcccgaatcaattatagggggctatgcagaattcctgtaccaaattggcttgttggatgagaagcaaaaaaagtacttccagaagcagtgccatgaatgcatagaacacatcaggaagcagaactggtttgaggcctttgaaatactggataaactactagatggcgacttaacaagtgatccttcttacttccagaatgttacaggatgtagtaattactataactttttgcggtgcacggaacctgaggatcagctttactatgtgaaatttttgtcactcccagaggtgagacaagccatccacgtggggaatcagacttttaatgatggaactatagttgaaaagtacttgcgagaagatacagtacagtcagttaagccatggttaactgaaatcatgaataattataaggttctgatctacaatggccaactggacatcatcgtggcagctgccctgacagagcgctccttgatgggcatggactggaaaggatcccaggaatacaagaaggcagaaaaaaaagtttggaagatctttaaatctgacagtgaagtggctggttacatccggcaagcgggtgacttccatcaggtaattattcgaggtggaggacatattttaccctatgaccagcctctgagagcttttgacatgattaatcgattcatttatggaaaaggatgggatccttatgttggataaactaccttcccaaaagagaacatcagaggttttcattgctgaaaagaaaatcgtaaaaacagaaaatgtcataggaataaaaaaattatcttttcatatctgcaagatttttttcatcaataaaaattatccttgaaac

SEQ ID NO: 444983 - DNA, 1529 bp, Homo sapiens
gggctgcctcacttctgcctgatttgggaagcgctgcaaggacaaccggctggggtccttgcgcgccgcggctcagggaggagcaccgactgcgccgcaccctgagagatggttggtgccatgtggaaggtgattgtttcgctggtcctgttgatgcctggcccctgtgatgggctgtttcgctccctatacagaagtgtttccatgccacctaagggagactcaggacagccattatttctcacccatacagccagaagatgccccagtagttctctggctacagggtgggccgggaggttcatccatgtttggactctttgtggaacatgggccttatgttgtcacaagtaacatgaccttgcgtgacagagacttcccctggaccacaacgctctccatgctttacattgacaatccagtgggcacaggcttcagttttactgatgatacccacggatatgcagtcaatgaggacgatgtagcacgggatttatacagtgcactaattcagtttttccagatatttcctgaatataaaaataatgacttttatgtcactggggagtcttatgcagggaaatatgtgccagccattgcacacctcatccattccctcaaccctgtgagagaggtgaagatcaacctgaacggaattgctattggagatggatattctgatcccgaatcaattatagggggctatgcagaattcctgtaccaaattggcttgttggatgagaagcaaaaaaagtacttccagaagcagtgccatgaatgcatagaacacatcaggaagcagaactggtttgaggcctttgaaatactggataaactactagatggcgacttaacaagtgatccttcttacttccagaatgttacaggatgtagtaattactataactttttgcggtgcacggaacctgaggatcagctttactatgtgaaatttttgtcactcccagaggtgagacaagccatccacgtggggaatcagacttttaatgatggaactatagttgaaaagtacttgcgagaagatacagtacagtcagttaagccatggttaactgaaatcatgaataattataaggttctgatctacaatggccaactggacatcatcgtggcagctgccctgacagagcgctccttgatgggcatggactggaaaggatcccaggaatacaagaaggcagaaaaaaaagtttggaagatctttaaatctgacagtgaagtggctggttacatccggcaagcgggtgacttccatcaggtaattattcgaggtggaggacatattttaccctatgaccagcctctgagagcttttgacatgattaatcgattcatttatggaaaaggatgggatccttatgttggataaactaccttcccaaaagagaacatcagaggttttcattgctgaaaagaaaatcgtaaaaacagaaaatgtcataggaataaaaaaattatcttttcatatctgcaagatttttttcatcaataaaaattatccttgaaac

SEQ ID NO: 444984 - DNA, 1678 bp, Homo sapiens
gggctgcctcacttctgcctgatttgggaagcgctgcaaggacaaccggctggggtccttgcgcgccgcggctcagggaggagcaccgactgcgccgcaccctgagagatggttggtgccatgtggaaggtgattgtttcgctggtcctgttgatgcctggcccctgtgatgggctgtttcgctccctatacagaagtgtttccatgccacctaagggagactcaggacagccattatttctcaccccttacattgaagctgggaagatccaaaaaggaagagaattgagtttggtcggccctttcccaggactgaacatgaagagttatgccggcttcctcaccgtgaataagacttacaacagcaacctcttcttctggttcttcccagctcagatacagccagaagatgccccagtagttctctggctacagggtgggccgggaggttcatccatgtttggactctttgtggaacatgggccttatgttgtcacaagtaacatgaccttgcgtgacagagacttcccctggaccacaacgctctccatgctttacattgacaatccagtgggcacaggcttcagttttactgatgatacccacggatatgcagtcaatgaggacgatgtagcacgggatttatacagtgcactaattcagtttttccagatatttcctgaatataaaaataatgacttttatgtcactggggagtcttatgcagggaaatatgtgccagccattgcacacctcatccattccctcaaccctgtgagagaggtgaagatcaacctgaacggaattgctattggagatggatattctgatcccgaatcaattatagggggctatgcagaattcctgtaccaaattggcttgttggatgagaagcaaaaaaagtacttccagaagcagtgccatgaatgcatagaacacatcaggaagcagaactggtttgaggcctttgaaatactggataaactactagatggcgacttaacaagtgatccttcttacttccagaatgttacaggatgtagtaattactataactttttgcggtgcacggaacctgaggatcagctttactatgtgaaatttttgtcactcccagaggtgagacaagccatccacgtggggaatcagacttttaatgatggaactatagttgaaaagtacttgcgagaagatacagtacagtcagttaagccatggttaactgaaatcatgaataattataaggttctgatctacaatggccaactggacatcatcgtggcagctgccctgacagagcgctccttgatgggcatggactggaaaggatcccaggaatacaagaaggcagaaaaaaaagtttggaagatctttaaatctgacagtgaagtggctggttacatccggcaagcgggtgacttccatcaggtaattattcgaggtggaggacatattttaccctatgaccagcctctgagagcttttgacatgattaatcgattcatttatggaaaaggatgggatccttatgttggataaactaccttcccaaaagagaacatcagaggttttcattgctgaaaagaaaatcgtaaaaacagaaaatgtcataggaataaaaaaattatcttttcatatctgcaagatttttttcatcaataaaaattatccttgaaac

SEQ ID NO: 444985 - DNA, 279 bp, Homo sapiens
ttttatgaacttttcggggcttactttttcacccatcgacaatagagattatctcttcccctccattgcgcgttctgatctacaatggccaactggacatcatcgtggcagctgccctgacagagcgctccttgatgggcatggactggaaaggatcccaggaatacaagaaggcagaaaaaaaagtttggaagatctttaaatctgacagtgaagtggctggttacatccggcaagcgggtgacttccatcaggtaggaagatgcttgggagcaggca

SEQ ID NO: 444986 - DNA, 1500 bp, Homo sapiens
atctaatcactccatttcatccagactgagatagatggctcacatttttgttgttattgttttctgtaatccttgggtaaattttttttcccccactaggaagagaattgagtttggtcggccctttcccaggactgaacatgaagagttatgccggcttcctcaccgtgaataagacttacaacagcaacctcttcttctggttcttcccagctcagatacagccagaagatgccccagtagttctctggctacagggtgggccgggaggttcatccatgtttggactctttgtggaacatgggccttatgttgtcacaagtaacatgaccttgcgtgacagagacttcccctggaccacaacgctctccatgctttacattgacaatccagtgggcacaggcttcagttttactgatgatacccacggatatgcagtcaatgaggacgatgtagcacgggatttatacagtgcactaattcagtttttccagatatttcctgaatataaaaataatgacttttatgtcactggggagtcttatgcagggaaatatgtgccagccattgcacacctcatccattccctcaaccctgtgagagaggtgaagatcaacctgaacggaattgctattggagatggatattctgatcccgaatcaattatagggggctatgcagaattcctgtaccaaattggcttgttggatgagaagcaaaaaaagtacttccagaagcagtgccatgaatgcatagaacacatcaggaagcagaactggtttgaggcctttgaaatactggataaactactagatggcgacttaacaagtgatccttcttacttccagaatgttacaggatgtagtaattactataactttttgcggtgcacggaacctgaggatcagctttactatgtgaaatttttgtcactcccagaggtgagacaagccatccacgtggggaatcagacttttaatgatggaactatagttgaaaagtacttgcgagaagatacagtacagtcagttaagccatggttaactgaaatcatgaataattataaggttctgatctacaatggccaactggacatcatcgtggcagctgccctgacagagcgctccttgatgggcatggactggaaaggatcccaggaatacaagaaggcagaaaaaaaagtttggaagatctttaaatctgacagtgaagtggctggttacatccggcaagcgggtgacttccatcaggtaattattcgaggtggaggacatattttaccctatgaccagcctctgagagcttttgacatgattaatcgattcatttatggaaaaggatgggatccttatgttggataaactaccttcccaaaagagaacatcagaggttttcattgctgaaaagaaaatcgtaaaaacagaaaatgtcataggaataaaaaaattatcttttcatatctgcaagatttttttcatcaataaaaattatccttgaaac

SEQ ID NO: 444987 - DNA, 1617 bp, Homo sapiens
gggctgcctcacttctgcctgatttgggaagcgctgcaaggacaaccggctggggtccttgcgcgccgcggctcagggaggagcaccgactgcgccgcgtaagtgccgcctgccctgcgtgggtcgtgccagctcagcgggacaggtcctcgcctcggtccctcggacttagggagcgcggggcagaccctgagagatggttggtgccatgtggaaggtgattgtttcgctggtcctgttgatgcctggcccctgtgatgggctgtttcgctccctatacagaagtgtttccatgccacctaagggagactcaggacagccattatttctcacccatacagccagaagatgccccagtagttctctggctacagggtgggccgggaggttcatccatgtttggactctttgtggaacatgggccttatgttgtcacaagtaacatgaccttgcgtgacagagacttcccctggaccacaacgctctccatgctttacattgacaatccagtgggcacaggcttcagttttactgatgatacccacggatatgcagtcaatgaggacgatgtagcacgggatttatacagtgcactaattcagtttttccagatatttcctgaatataaaaataatgacttttatgtcactggggagtcttatgcagggaaatatgtgccagccattgcacacctcatccattccctcaaccctgtgagagaggtgaagatcaacctgaacggaattgctattggagatggatattctgatcccgaatcaattatagggggctatgcagaattcctgtaccaaattggcttgttggatgagaagcaaaaaaagtacttccagaagcagtgccatgaatgcatagaacacatcaggaagcagaactggtttgaggcctttgaaatactggataaactactagatggcgacttaacaagtgatccttcttacttccagaatgttacaggatgtagtaattactataactttttgcggtgcacggaacctgaggatcagctttactatgtgaaatttttgtcactcccagaggtgagacaagccatccacgtggggaatcagacttttaatgatggaactatagttgaaaagtacttgcgagaagatacagtacagtcagttaagccatggttaactgaaatcatgaataattataaggttctgatctacaatggccaactggacatcatcgtggcagctgccctgacagagcgctccttgatgggcatggactggaaaggatcccaggaatacaagaaggcagaaaaaaaagtttggaagatctttaaatctgacagtgaagtggctggttacatccggcaagcgggtgacttccatcaggtaattattcgaggtggaggacatattttaccctatgaccagcctctgagagcttttgacatgattaatcgattcatttatggaaaaggatgggatccttatgttggataaactaccttcccaaaagagaacatcagaggttttcattgctgaaaagaaaatcgtaaaaacagaaaatgtcataggaataaaaaaattatcttttcatatctgcaagatttttttcatcaataaaaattatccttgaaac

SEQ ID NO: 444988 - DNA, 478 bp, Homo sapiens
ggcggctgttcaggcgcgggtgcgcgcgcagctgctgtggccctgcttggtgcgcccgctgtcaccgccatggctgccccgtgtttgctgcggcaaggacgagccggggcgctgaagactatgctccaggaagcccaggtgtttcgaggacttgcttctacggtttctttgtctgcggaatcagggaagagtgaaaagggtcagccacagaattccaagaagcaaagtccaccaaaaaagccagccccagtgcctgctgagccgtttgacaacactacctacaagaacctgcagcatcatgactacagcacgtacaccttcttagacctcaacctcgaactctcaaaattcaggatgcctcagccctcctcaggccgggagtcacctcgacactgagggccctcggtgtgaagatgaaccttccaccgtcttcactgcatcctggagtgcaaaaataaaatccactcaagagtcacaa

SEQ ID NO: 444989 - DNA, 1286 bp, Homo sapiens
actgccggctccacctcccacgtacaaacgattctcctgcctcagcctcctgagtaggtgccactacaggtgcctgccaccacgcctggctaattattgtatttttagtagagacagcgttttgccatgttggtcaggttggtctcgaactcctgaccgcgggtgatccacctgcctctgcctcccaaagtgctgggatttcaggcgtgagccactgcgcccagctatgttaccattttcttgagcacgaaacttgataagatgcaatgcgctttaggtgggtcgtggcaaacatgaaaaggcaagcttccgttttagaatccatggctcttcttgaagacttctctaaagtgcatgatccctaacaagcgcggctccgtcctgtgtctgctctccatcctctgtaccgccgccccttgccttatgtgccttacatgacgccttcttgttcttggttcgttgtgcgacaggatctatgtgttttcccccctctccgtctgctctttgatcagtacgccaagtgccggtgcttgccagacttcccagcccttaggaactgcatttcctgatgctgctgctttcactcctcctgctcgaaaatggagacgaataacacaactcgcaggataaaaacagaattgggagttttcagactgcaaacctttctgaagagaaagttctaatatttcacgggtgtgttgtttcttaactatcttctgtgcgcatgcgcagagcccaccttgcagagccgtgtctgtatggggccgcggtctcactaggcagtccgtgccccagtactggccttccaggtagagtggttttagatcagagttttgtaacccacgtcttggtcagttatcaccctccctatagtaactaaaatagtacgttctgctttgaaggtgtccctacaccacaccgaagatactcaccttgtggagattggaaggatgccagctctttaaatgagacatcgtttttgcttaacgtaacttaaaaatgaaaaacagagcttttgatattaattgaaatagtgagaaaataaatgtatttaggttatttttttgtggagcatgaatggaagttaagacagacctaatgacctgatttacagaaattgagtcagtacaaatcttaacccaaatatcagcctgtgttcccgtgctggttttgattttgccattatgttatattgtgtgtcctgctgcaggagaccagtacttcttttgcctcaacccctacttgtagtttcgaattaccaaatgtttaaatgctgtgttgttgtt

SEQ ID NO: 444990 - DNA, 1326 bp, Homo sapiens
actgccggctccacctcccacgtacaaacgattctcctgcctcagcctcctgagtaggtgccactacaggtgcctgccaccacgcctggctaattattgtatttttagtagagacagcgttttgccatgttggtcaggttggtctcgaactcctgaccgcgggtgatccacctgcctctgcctcccaaagtgctgggatttcaggcgtgagccactgcgcccagctatgttaccattttcttgagcacgaaacttgataagatgcaatgcgctttaggtgggtcgtggcaaacatgaaaaggcaagcttccgttttagaatccatggctcttcttgaagacttctctaaagtgcatgatccctaacaagcgcggctccgtcctgtgtctgctctccatcctctgtaccgccgccccttgccttatgtgccttacatgacgccttcttgttcttggttcgttgtgcgacaggatctatgtgttttcccccctctccgtctgctctttgatcagtacgccaagtgccggtgcttgccagacttcccagcccttaggaactgcatttcctgatgctgctgctttcactcctcctgctcgaaaatggagacgaataacacaactcgcaggataaaaacagaattgggagttttcagactgcaaacctttctgaagagaaagttctaatatttcacgggtgtgttgtttcttaactatcttctgtgcgcatgcgcagagcccaccttgcagagccgtgtctgtatggggccgcggtctcactaggcagtccgtgccccagtactggccttccaggtagagtggttttagatcagagttttgtaacccacgtcttggtcagttatcaccctccctatagtaactaaaatagtacgttctgctttgaaggtgtccctacaccacaccgaagatactcaccttgtggagattggaaggatgccagctctttaaatgagacatcgtttttgcttaacgtaacttaaaaatgaaaaacagagcttttgatattaattgaaatagtgagaaaataaatgtatttaggttatttttttgtggagcatgaatggaagttaagacagacctaatgacctgatttacagaaattgagtcagtacaaatcttaacccaaatatcagcctgtgttcccgtgctggttttgattttgccattatgttatattgtgtgtcctgctgcaggagaccagtacttcttttgcgcactacgccttactcgtctattcatatatccaatattaatactatgatgtctattgttacatatacgatgggttactcaaggaacaacaatgacg

SEQ ID NO: 444991 - DNA, 1636 bp, Homo sapiens
ggcggctgttcaggcgcgggtgcgcgcgcagctgctgtggccctgcttggtgcgcccgctgtcaccgccatggctgccccgtgtttgctgcggcaaggacgagccggggcgctgaagactatgctccaggaagcccaggtgtttcgaggacttgcttctacggtttctttgtctgcggaatcagggaagagtgaaaagggtcagccacagaattccaagaagcaaagtccaccaaaaaatgtagtggaaccaaaggagaggggcaagctcctagccacccagacagcagctgaattgtctaaaaacttatcttcacccagttcttacccgccagctgtgaataagggcaggaaggtagctagtcccagtcccagtggcagcgtgctattcacagatgaaggggttccgaaatttttgtcaagaaagactttggtagagtttccacagaaagttctgtctccattcagaaaacagggctctgattcagaagctcgtcaggtgggtcggaaagtgacgtcgccttcgtcttcatcctcttccagctcctctgattctgaatctgatgatgaggctgacgtttcagaggtcactcctcgagtggtgagcaaaggcagaggggggcttcgaaaaccagaggcctctcattcctttgaaaacagagccccccgagttacagtatcagcaaaagagaaaaccttgctgcagaagccgcatgtggacattactgatccagagaagccccaccagccaaagaagaaagggtcccctgctaagccatcagaaggcagggaaaatgcgagaccaaaaaccacaatgcccagatctcaagtagatgaagagtttttgaagcaaagtttaaaggaaaaacaattgcagaaaacatttagattaaatgaaatagataaagaaagccaaaagccatttgaagttaaaggacccttacctgtccacacaaaatcagggttgtctgcgccaccgaagggcagcccagcgcctgctgtgttggcagaagaggccagagcagaggggcagctgcaagccagtcctcctggggcggcagaggggcatctggaaaaacccgtgccagagccccagcgcaaggcggcccctcccctgcccagaaaggaaacctcagggacgcagggaatagaaggccacctgaagggtggacaggcaatcgtggaagatcagataccaccaagcaatttggagacagttcctgttgagaataaccacggtttccatgaaaagacagcagcgctgaagcttgaggccgagggcgaggccatggaagatgcagccgcgccagggaacgaccgaggcggcacacagggtgtccctacaccacaccgaagatactcaccttgtggagattggaaggatgccagctctttaaagccagccccagtgcctgctgagccgtttgacaacactacctacaagaacctgcagcatcatgactacagcacgtacaccttcttagacctcaacctcgaactctcaaaattcaggatgcctcagccctcctcaggccgggagtcacctcgacactgagggccctcggtgtgaagatgaaccttccaccgtcttcactgcatcctggagtgcaaaaataaaatccactcaagagtcacaa

SEQ ID NO: 444992 - DNA, 1414 bp, Homo sapiens
ggcggctgttcaggcgcgggtgcgcgcgcagctgctgtggccctgcttggtgcgcccgctgtcaccgccatggctgccccgtgtttgctgcggcaaggacgagccggggcgctgaagactatgctccaggaagcccaggtgtttcgaggacttgcttctacggtttctttgtctgcggaatcagggaagagtgaaaagggtcagccacagaattccaagaagcaaagtccaccaaaaaatgtagtggaaccaaaggagaggggcaagctcctagccacccagacagcagctgaattgtctaaaaacttatcttcacccagttcttacccgccagctgtgaataagggcaggaaggtagctagtcccagtcccagtggcagcgtgctattcacagatgaaggggttccgaaatttttgtcaagaaagactttggtagagtttccacagaaagttctgtctccattcagaaaacagggctctgattcagaagctcgtcaggtgggtcggaaagtgacgtcgccttcgtcttcatcctcttccagctcctctgattctgaatctgatgatgaggctgacgtttcagaggtcactcctcgagtggtgagcaaaggcagaggggggcttcgaaaaccagaggcctctcattcctttgaaaacagagccccccgagttacagtatcagcaaaagagaaaaccttgctgcagaagccgcatgtggacattactgatccagagaagccccaccagccaaagaagaaagggtcccctgctaagccatcagaaggcagggaaaatgcgagaccaaaaaccacaatgcccagatctcaagtagatgaagagtttttgaagcaaagtttaaaggaaaaacaattgcagaaaacatttagattaaatgaaatagataaagaaagccaaaagccatttgaagttaaaggacccttacctgtccacacaaaatcagggttgtctgcgccaccgaagggcagcccagcgcctgctgtgttggcagaagaggccagagcagaggggcagctgcaagccagtcctcctggggcggcagaggggcatctggaaaaacccgtgccagagccccagcgcaaggcggcccctcccctgcccagaaaggaaacctcagggacgcagggaatagaaggccacctgaagggtggacaggcaatcgtggaagatcagataccaccaagcaatttggagacagttcctgttgagaataaccacggtttccatgaaaagacagcagcgctgaagaacctcgaactctcaaaattcaggatgcctcagccctcctcaggccgggagtcacctcgacactgagggccctcggtgtgaagatgaaccttccaccgtcttcactgcatcctggagtgcaaaaataaaatccactcaagagtcacaa

SEQ ID NO: 444993 - DNA, 1452 bp, Homo sapiens
ggcggctgttcaggcgcgggtgcgcgcgcagctgctgtggccctgcttggtgcgcccgctgtcaccgccatggctgccccgtgtttgctgcggcaaggacgagccggggcgctgaagatgtagtggaaccaaaggagaggggcaagctcctagccacccagacagcagctgaattgtctaaaaacttatcttcacccagttcttacccgccagctgtgaataagggcaggaaggtagctagtcccagtcccagtggcagcgtgctattcacagatgaaggggttccgaaatttttgtcaagaaagactttggtagagtttccacagaaagttctgtctccattcagaaaacagggctctgattcagaagctcgtcaggtgggtcggaaagtgacgtcgccttcgtcttcatcctcttccagctcctctgattctgaatctgatgatgaggctgacgtttcagaggtcactcctcgagtggtgagcaaaggcagaggggggcttcgaaaaccagaggcctctcattcctttgaaaacagagccccccgagttacagtatcagcaaaagagaaaaccttgctgcagaagccgcatgtggacattactgatccagagaagccccaccagccaaagaagaaagggtcccctgctaagccatcagaaggcagggaaaatgcgagaccaaaaaccacaatgcccagatctcaagtagatgaagagtttttgaagcaaagtttaaaggaaaaacaattgcagaaaacatttagattaaatgaaatagataaagaaagccaaaagccatttgaagttaaaggacccttacctgtccacacaaaatcagggttgtctgcgccaccgaagggcagcccagcgcctgctgtgttggcagaagaggccagagcagaggggcagctgcaagccagtcctcctggggcggcagaggggcatctggaaaaacccgtgccagagccccagcgcaaggcggcccctcccctgcccagaaaggaaacctcagggacgcagggaatagaaggccacctgaagggtggacaggcaatcgtggaagatcagataccaccaagcaatttggagacagttcctgttgagaataaccacggtttccatgaaaagacagcagcgctgaagcttgaggccgagggcgaggccatggaagatgcagccgcgccagggaacgaccgaggcggcacacaggagccagccccagtgcctgctgagccgtttgacaacactacctacaagaacctgcagcatcatgactacagcacgtacaccttcttagacctcaacctcgaactctcaaaattcaggatgcctcagccctcctcaggccgggagtcacctcgacactgagggccctcggtgtgaagatgaaccttccaccgtcttcactgcatcctggagtgcaaaaataaaatccactcaagagtcacaa

SEQ ID NO: 444994 - DNA, 641 bp, Homo sapiens
ggcggctgttcaggcgcgggtgcgcgcgcagctgctgtggccctgcttggtgcgcccgctgtcaccgccatggctgccccgtgtttgctgcggcaaggacgagccggggcgctgaagactatgctccaggaagcccaggtgtttcgaggacttgcttctacggtttctttgtctgcggaatcagggaagagtgaaaagggtcagccacagaattccaagaagcaaagtccaccaaaaaatgtagtggaaccaaaggagaggggcaagctcctagccacccagacagcagctgaattgtctaaaaacttatcttcacccagttcttacccgccagcttgaggccgagggcgaggccatggaagatgcagccgcgccagggaacgaccgaggcggcacacaggagccagccccagtgcctgctgagccgtttgacaacactacctacaagaacctgcagcatcatgactacagcacgtacaccttcttagacctcaacctcgaactctcaaaattcaggatgcctcagccctcctcaggccgggagtcacctcgacactgagggccctcggtgtgaagatgaaccttccaccgtcttcactgcatcctggagtgcaaaaataaaatccactcaagagtcacaa

SEQ ID NO: 444995 - DNA, 768 bp, Homo sapiens
tccatttcttaaattggaaggctgtatgttttagaataaacttccaagtaatatctttctttttctttactgtggcttttgtaggcttttcttttttaattagacaatttgttcctcacagatagggttgatgaagaacgcttggtaggtaagcacctgtgtgtgagccgagtcattcataaagaactgttcacagataggttgatgaagaatgcttggtaggtaagcgcctgtgtgtgagccgagtcattcataaagagctgttcacagatagggttgatgaagaatgcttggtaggtaagcacctgtgtgtgagccgagtcattcataaagagctgttcacagatagggttgatgaagaatgcttggtaggtaagcgcctgtatgtgagccaagtcattcataaagagctgttcacagatagggatgatgaagaatgcttggtaggtaagcgcctgtgtgtgagccgagtcattcataaagagctgtccttgtgttggtctcatgggcatcgtgtttcctccgcagagccagccccagtgcctgctgagccgtttgacaacactacctacaagaacctgcagcatcatgactacagcacgtacaccttcttagacctcaacctcgaactctcaaaattcaggatgcctcagccctcctcaggccgggagtcacctcgacactgagggccctcggtgtgaagatgaaccttccaccgtcttcactgcatcctggagtgcaaaaataaaatccactcaagagtcacaa

SEQ ID NO: 444996 - DNA, 580 bp, Homo sapiens
gtcagtaataagtaatgtgtcatgaaatgtctgtaattttgactgagttttaagttgttttgttaaataacattcctctttatgccgtttcccagatgtagtggaaccaaaggagaggggcaagctcctagccacccagacagcagctgaattgtctaaaaacttatcttcacccagttcttacccgccagctgtgaataagggcaggaaggtagctagtcccagtcccagtggcagcgtgctattcacagatgaaggggttccgaaatttttgtcaagaaagactttggtagagtttccacagaaagttctgtctccattcagaaaacagggctctgattcagaagctcgtcaggtgggtcggaaagtgacgtcgccttcgtcttcatcctcttccagctcctctgattctgaatctgatgatgaggctgacgtttcagaggtcactcctcgagtggtgagcaaaggcagaggggggcttcgaaaaccagaggcctctcattcctttgaaaacagagccccccgagttacagtatcagcaaaagagaaaaccttgctgcagaagccgcatgtggacatt

SEQ ID NO: 444997 - DNA, 1573 bp, Homo sapiens
ggcggctgttcaggcgcgggtgcgcgcgcagctgctgtggccctgcttggtgcgcccgctgtcaccgccatggctgccccgtgtttgctgcggcaaggacgagccggggcgctgaagactatgctccaggaagcccaggtgtttcgaggacttgcttctacggtttctttgtctgcggaatcagggaagagtgaaaagggtcagccacagaattccaagaagcaaagtccaccaaaaaatgtagtggaaccaaaggagaggggcaagctcctagccacccagacagcagctgaattgtctaaaaacttatcttcacccagttcttacccgccagctgtgaataagggcaggaaggtagctagtcccagtcccagtggcagcgtgctattcacagatgaaggggttccgaaatttttgtcaagaaagactttggtagagtttccacagaaagttctgtctccattcagaaaacagggctctgattcagaagctcgtcaggtgggtcggaaagtgacgtcgccttcgtcttcatcctcttccagctcctctgattctgaatctgatgatgaggctgacgtttcagaggtcactcctcgagtggtgagcaaaggcagaggggggcttcgaaaaccagaggcctctcattcctttgaaaacagagccccccgagttacagtatcagcaaaagagaaaaccttgctgcagaagccgcatgtggacattactgatccagagaagccccaccagccaaagaagaaagggtcccctgctaagccatcagaaggcagggaaaatgcgagaccaaaaaccacaatgcccagatctcaagtagatgaagagtttttgaagcaaagtttaaaggaaaaacaattgcagaaaacatttagattaaatgaaatagataaagaaagccaaaagccatttgaagttaaaggacccttacctgtccacacaaaatcagggttgtctgcgccaccgaagggcagcccagcgcctgctgtgttggcagaagaggccagagcagaggggcagctgcaagccagtcctcctggggcggcagaggggcatctggaaaaacccgtgccagagccccagcgcaaggcggcccctcccctgcccagaaaggaaacctcagggacgcagggaatagaaggccacctgaagggtggacaggcaatcgtggaagatcagataccaccaagcaatttggagacagttcctgttgagaataaccacggtttccatgaaaagacagcagcgctgaagcttgaggccgagggcgaggccatggaagatgcagccgcgccagggaacgaccgaggcggcacacaggagccagccccagtgcctgctgagccgtttgacaacactacctacaagaacctgcagcatcatgactacagcacgtacaccttcttagacctcaacctcgaactctcaaaattcaggatgcctcagccctcctcaggccgggagtcacctcgacactgagggccctcggtgtgaagatgaaccttccaccgtcttcactgcatcctggagtgcaaaaataaaatccactcaagagtcacaa

SEQ ID NO: 444998 - DNA, 1481 bp, Homo sapiens
ggcggctgttcaggcgcgggtgcgcgcgcagctgctgtggccctgcttggtgcgcccgctgtcaccgccatggctgccccgtgtttgctgcggcaaggacgagccggggcgctgaagactatgctccaggaagcccaggtgtttcgaggacttgcttctacggtttctttgtctgcggaatcagggaagagtgaaaagggtcagccacagaattccaagaagcaaagtccaccaaaaaatgtagtggaaccaaaggagaggggcaagctcctagccacccagacagcagctgaattgtctaaaaacttatcttcacccagttcttacccgccagctgtgaataagggcaggaaggtagctagtcccagtcccagtggcagcgtgctattcacagatgaaggggttccgaaatttttgtcaagaaagactttggtagagtttccacagaaagttctgtctccattcagaaaacagggctctgattcagaagctcgtcaggtgggtcggaaagtgacgtcgccttcgtcttcatcctcttccagctcctctgattctgaatctgatgatgaggctgacgtttcagaggtcactcctcgagtggtgagcaaaggcagaggggggcttcgaaaaccagaggcctctcattcctttgaaaacagagccccccgagttacagtatcagcaaaagagaaaaccttgctgcagaagccgcatgtggacattactgatccagagaagccccaccagccaaagaagaaagggtcccctgctaagccatcagaaggcagggaaaatgcgagaccaaaaaccacaatgcccagatctcaagtagatgaagagtttttgaagcaaagtttaaaggaaaaacaattgcagaaaacatttagattaaatgaaatagataaagaaagccaaaagccatttgaagttaaaggacccttacctgtccacacaaaatcagggttgtctgcgccaccgaagggcagcccagcgcctgctgtgttggcagaagaggccagagcagaggggcagctgcaagccagtcctcctggggcggcagaggggcatctggaaaaacccgtgccagagccccagcgcaaggcggcccctcccctgcccagaaaggaaacctcagggacgcagggaatagaaggccacctgaagggtggacaggcaatcgtggaagatcagataccaccaagcaatttggagacagttcctgttgagaataaccacggtttccatgaaaagacagcagcgctgaagcttgaggccgagggcgaggccatggaagatgcagccgcgccagggaacgaccgaggcggcacacaggaacctcgaactctcaaaattcaggatgcctcagccctcctcaggccgggagtcacctcgacactgagggccctcggtgtgaagatgaaccttccaccgtcttcactgcatcctggagtgcaaaaataaaatccactcaagagtcacaa

SEQ ID NO: 444999 - DNA, 759 bp, Homo sapiens
ggcggctgttcaggcgcgggtgcgcgcgcagctgctgtggccctgcttggtgcgcccgctgtcaccgccatggctgccccgtgtttgctgcggcaaggacgagccggggcgctgaagactatgctccaggaagcccaggtgtttcgaggacttgcttctacggtttctttgtctgcggaatcagggaagagtgaaaagggtcagccacagaattccaagaagcaaagtccaccaaaaaagccagccccagtgcctgctgagccgtttgacaacactacctacaagaacctgcagcatcatgactacagcacgtacaccttcttagacctcaacctcgaactctcaaaattcaggatgcctcagccctcctcaggccgggagtcacctcgacactgagggccctcggtgtgaagatgaaccttccaccgtcttcactgcatcctggagtgcaaaaataaaatccactcaagagtcacaaggcccgctgtgcataatcggtttcacttttacctttttttttttttttttttttcttggaaacggggctcctcacactctgtgttccacccaggcgtggagttgcccgggggcacaattctctcgcgcctcaaagtgcgaaattccggcctccgtgggtttcaaggtgatcctcccgacattaagcctctccccaagttaggcgtgggacatacacagggatacttccaccacacagggtccagcacataacttgcggatatttttcagcacaaaaaacgg

SEQ ID NO: 445000 - DNA, 3652 bp, Homo sapiens
caaggggagaggtacatcttggtgaaaaagaccaatgatgactggtggcaagtcaagccagatgaaaactccaaagcgttttatgtgccagcccagtatgtgaaggaggtcacgcgcaaagctctcatgccacctgttaagcaggtagctggtctgccaaataactccacgaaaataatgcagagtttgcatcttcagagatcaacagaaaatgtgaacaaattgcctgagctttcaagtttcggaaagccatcgtcatctgttcaaggaacaggtcttattcgtgatgccaatcagaattttggacccagttataatcaaggtcagactgtcaacctaagcctggacctgacccataataacggaaagtttaacaatgactcacattctcctaaagtttccagccagaataggacacgctcatttggtcattttcccggtccagagttcttggatgtagagaaaactagcttctcccaggaacaatcttgtgattccgcaggagaaggctctgaaagaatacatcaagattctgaatctggtgatgaacttagcagcagctccactgaacagataagggcaaccacacctccaaatcaaggaaggccagattctcctgtctatgctaaccttcaagaactgaaaatatcccagtctgctcttcccccacttcctgggagcccggcaattcagattaatggagaatgggaaactcataaagacagctcagggcgttgctattactataacagagggacacaggaaagaacttggaaacctcctcgttggactcgggatgcaagcatcagcaaaggagatttccaaaatccaggggatcaagagtggctcaagcatgttgatgatcaaggtagacaatattactacagtgcagacggatctcggtcagaatgggaattgccaaagtataatgcttcatcccagcagcaaagagaaataattaaaagtaggagcctggacaggcggctgcaagaaccaatagtattaacaaagtggagacatagcaccattgtattggacactaatgataaggaatctccaactgcctcaaaaccctgctttcctgaaaatgagtcttctccctcctcaccaaagcaccaagatacagccagcagtccaaggatcaagagaaatatggattattaaatgtaacaaaaattgctgaaaatgggaaaaaggttcgaaagaactggttgtcttcttgggcggtgttgcagggttcatctttactttttaccaaaactcaaggaagtagcacaagttggtttggcagtaatcagtccaaaccagagttcacagtggacctcaagggggcaacaattgagatggcttcaaaggataaatccagcaaaaagaatgtatttgagctgaaaactcgtcaaggaacagaactgctaattcagtctgacaatgacactgttattaatgattggtttaaagttcttagtagtacaatcaataatcaggcagtagaaactgatgaaggaattgaagaggagataccggattcaccaggaatagaaaagcatgataaagaaaaggaacaaaaggatcccaaaaagcttcgttcctttaaagtatctagcatagattcttcagaacagaaaaaaaccaagaaaaacttaaagaagtttcttacacgacgccccactttgcaagctgttcgtgaaaaaggttatattaaagatcaggtatttggatccaatctcgctaatctgtgtcagagagagaatggcacagtaccaaagtttgtgaagttatgtattgaacatgttgaagaacatggtttggatattgatgggatatacagagtaagtggcaacctcgcagtgatccagaaactaaggtttgcagtcaatcatgatgagaaattggacttgaatgacagtaaatgggaagatattcatgtcattactggagccctcaaaatgttttttcgagaattaccagaacctctttttacatttaatcattttaatgattttgttaatgcaattaagcaagaaccaagacagcgagtcgctgctgttaaggacctaatcagacagttgccaaagccaaaccaagacacaatgcagattcttttccgacatctcagaagagttatagaaaatggagagaaaaatcgaatgacctatcagagtatagcaattgtttttggtcccactctattaaaaccagaaaaagagactggtaatatagcagttcatactgtgtaccagaatcagattgtagaattaattcttctggaactgagttccatcttcggacgttgattcttactgaagacaacctgtggaatagaagctggattccatcagatttcaaatgtttatacacaatgtattttattttttggaccaagcagtgactctttgattttgcactttttttttgagggatcagaagggaaggggagagtcgagatgtgtgttaggccctcatatttgctgctttgttgcaagttgatataactgcgtgtaattatgaattcattttatcctgaatgtttgcatttcatactctgaatttcagtaaaaatcaaaacttaaaattctaaccagtcatatacactggataatttggtaagaaaactgtattttttttccctgaaattggataatgtactttcttctcaagattcatgacttgatagaacaatactttcagttatgttgcaaaggctcttgggcattttaaacaaaatgaagtatatccattttgaaacctgtgtatttctttttcggggtttctgcatgcagtggcagtcttaagtgccaaaattcattataaccccaaaataaccccttgatgaaggcttgctgtcttttactgtgttacacagcatccttactggatatcttagttgcttgtttgggcagcacactaatattacttaaaacactgtgatatactggagttttagttagcggaagtcagttcagggcattttagggctgtcttgctatactgaattgtagctaacaatcctaattatatctagtaccatactgagttattggtatgaccctgtggaaacacacattattttatgtaaatataggctaaagacttaatgtcctttagcttgtgtatataattgtgttgtatagtctcagagtacattctaaccctacatttctaatcattgttattggtaatcttttctgtgaatattaggtttcctccagaaatagtccgttatttgggaaagttaactgtgtgcacttttagatattaactacatttacaggcaaatcactgtaatgagaatggtactggaaaaatactgaatagacttgctaaatggcacatgcactacaagaggaaccttttgggttatttaatatgtacagaaaacattagaaaaaatttattacagaattctaattccagtatgaatagtggaaacccatctgtaaattagatggatgttggatggaaaatgacattgctaaatttgagaatttctttttacctactaatgtagattgctttgtataataaaacacagggtttggaaggttttgttacagggagcatggtctgttgaagatttttaaaatgtatttttctagattaacttctgtacatgaaatgtctaataaaactataagaggtttagagatttttc

SEQ ID NO: 445001 - DNA, 1632 bp, Homo sapiens
ctatgctacttgctgtctttgtaacttgaaaaagttactcaactccttttagtatcagtctgtcatgggtaaatgatttgctatgaagaatacagtaaaagttatagaaaatggagagaaaaatcgaatgacctatcagagtatagcaattgtttttggtcccactctattaaaaccagaaaaagagactggtaatatagcagttcatactgtgtaccagaatcagattgtagaattaattcttctggaactgagttccatcttcggacgttgattcttactgaagacaacctgtggaatagaagctggattccatcagatttcaaatgtttatacacaatgtattttattttttggaccaagcagtgactctttgattttgcactttttttttgagggatcagaagggaaggggagagtcgagatgtgtgttaggccctcatatttgctgctttgttgcaagttgatataactgcgtgtaattatgaattcattttatcctgaatgtttgcatttcatactctgaatttcagtaaaaatcaaaacttaaaattctaaccagtcatatacactggataatttggtaagaaaactgtattttttttccctgaaattggataatgtactttcttctcaagattcatgacttgatagaacaatactttcagttatgttgcaaaggctcttgggcattttaaacaaaatgaagtatatccattttgaaacctgtgtatttctttttcggggtttctgcatgcagtggcagtcttaagtgccaaaattcattataaccccaaaataaccccttgatgaaggcttgctgtcttttactgtgttacacagcatccttactggatatcttagttgcttgtttgggcagcacactaatattacttaaaacactgtgatatactggagttttagttagcggaagtcagttcagggcattttagggctgtcttgctatactgaattgtagctaacaatcctaattatatctagtaccatactgagttattggtatgaccctgtggaaacacacattattttatgtaaatataggctaaagacttaatgtcctttagcttgtgtatataattgtgttgtatagtctcagagtacattctaaccctacatttctaatcattgttattggtaatcttttctgtgaatattaggtttcctccagaaatagtccgttatttgggaaagttaactgtgtgcacttttagatattaactacatttacaggcaaatcactgtaatgagaatggtactggaaaaatactgaatagacttgctaaatggcacatgcactacaagaggaaccttttgggttatttaatatgtacagaaaacattagaaaaaatttattacagaattctaattccagtatgaatagtggaaacccatctgtaaattagatggatgttggatggaaaatgacattgctaaatttgagaatttctttttacctactaatgtagattgctttgtataataaaacacagggtttggaaggttttgttacagggagcatggtctgttgaagatttttaaaatgtatttttctagattaacttctgtacatgaaatgtctaataaaactataagaggtttagagatttttc

SEQ ID NO: 445002 - DNA, 3510 bp, Homo sapiens
tttttgcataccgtatatgtgttgcttttgtgatggaggaaacattttgtttttaaatgtcgtgtggtctatcagtgtacaattcattgtatgcctgtaatgcacctagtacctactacctgagtactccagcccaattaggggaaggcagatcaccaagaaatgtaacacagtctgtataaagaattagaaagaactggttgtcttcttgggcggtgttgcagggttcatctttactttttaccaaaactcaaggaagtagcacaagttggtttggcagtaatcagtccaaaccagagttcacagtggacctcaagggggcaacaattgagatggcttcaaaggataaatccagcaaaaagaatgtatttgagctgaaaactcgtcaaggaacagaactgctaattcagtctgacaatgacactgttattaatgattggtttaaagttcttagtagtacaatcaataatcaggcagtagaaactgatgaaggaattgaagaggagataccggattcaccaggaatagaaaagcatgataaagaaaaggaacaaaaggatcccaaaaagcttcgttcctttaaagtatctagcatagattcttcagaacagaaaaaaaccaagaaaaacttaaagaagtttcttacacgacgccccactttgcaagctgttcgtgaaaaaggttatattaaagatcaggtatttggatccaatctcgctaatctgtgtcagagagagaatggcacagtaccaaagtttgtgaagttatgtattgaacatgttgaagaacatggtttggatattgatgggatatacagagtaagtggcaacctcgcagtgatccagaaactaaggtttgcagtcaatcatgatgagaaattggacttgaatgacagtaaatgggaagatattcatgtcattactggagccctcaaaatgttttttcgagaattaccagaacctctttttacatttaatcattttaatgattttgttaatgcaattaagcaagaaccaagacagcgagtcgctgctgttaaggacctaatcagacagttgccaaagccaaaccaagacacaatgcagattcttttccgacatctcagaagagttatagaaaatggagagaaaaatcgaatgacctatcagagtatagcaattgtttttggtcccactctattaaaaccagaaaaagagactggtaatatagcagttcatactgtgtaccagaatcagattgtagaattaattcttctggaactgagttccatcttcggacgttgattcttactgaagacaacctgtggaatagaagctggattccatcagatttcaaatgtttatacacaatgtattttattttttggaccaagcagtgactctttgattttgcactttttttttgagggatcagaagggaaggggagagtcgagatgtgtgttaggccctcatatttgctgctttgttgcaagttgatataactgcgtgtaattatgaattcattttatcctgaatgtttgcatttcatactctgaatttcagtaaaaatcaaaacttaaaattctaaccagtcatatacactggataatttggtaagaaaactgtattttttttccctgaaattggataatgtactttcttctcaagattcatgacttgatagaacaatactttcagttatgttgcaaaggctcttgggcattttaaacaaaatgaagtatatccattttgaaacctgtgtatttctttttcggggtttctgcatgcagtggcagtcttaagtgccaaaattcattataaccccaaaataaccccttgatgaaggcttgctgtcttttactgtgttacacagcatccttactggatatcttagttgcttgtttgggcagcacactaatattacttaaaacactgtgatatactggagttttagttagcggaagtcagttcagggcattttagggctgtcttgctatactgaattgtagctaacaatcctaattatatctagtaccatactgagttattggtatgaccctgtggaaacacacattattttatgtaaatataggctaaagacttaatgtcctttagcttgtgtatataattgtgttgtatagtctcagagtacattctaaccctacatttctaatcattgttattggtaatcttttctgtgaatattaggtttcctccagaaatagtccgttatttgggaaagttaactgtgtgcacttttagatattaactacatttacaggcaaatcactgtaatgagaatggtactggaaaaatactgaatagacttgctaaatggcacatgcactacaagaggaaccttttgggttatttaatatgtacagaaaacattagaaaaaatttattacagaattctaattccagtatgaatagtggaaacccatctgtaaattagatggatgttggatggaaaatgacattgctaaatttgagaatttctttttacctactaatgtagattgctttgtataataaaacacagggtttggaaggttttgttacagggagcatggtctgttgaagatttttaaaatgtatttttctagattaacttctgtacatgaaatgtctaataaaactataagaggtttagagatttttccattggaaatgtgcattttggtttctaatttttttgttttttcatttactggcatactgttatacctcatttttaaaaatcaactgaatccaatatttcctgtggcaaataacactttcctcatttcataccttttctcctctcttccatgccaacatttctccacccacaacgtacactttttatttctccatcaatatttgaaagcgagtgatttgtgaccaggatttttttttcttagggttgcatttataatttacagattgccttccttgggaacaagtatttttttgtatgatctgtctaaaaacctctcacctgaattttgtggtagaaagtctgtatttgttgttgtgagcgtgttaaattgataacaaaccaaactacttgatagctaaagcagattgtttcgggtggggagaaaaagccctaaatcagaatgtttatatttgcctaaagatgtccttaataatacaatatgctttagatcttgcttatttagtgattgtataccaggaaaacaattagactcaaatcagtgatgttcttgttcttggtgttcatgaacatatatcaaagattaaaattgtcctgtgtttcttgtttcaaggtacgtgtgtgtgtgtgtgtgtgtgtgtgtgtgtgtgtgtgaagtcttaaatgttttattagtctacagctaatcagtttattgtaatattgtatgtacagtgagattaatgtcttgcgttttcatcctttgtgaattaaaaattctcacttgttttgtaataacaaagctagtaatattttcctgtcttgacagcttggttttatagtagaaaatatattaaaagctgaaataaattatcagtggaattttaaaatta

SEQ ID NO: 445003 - DNA, 4662 bp, Homo sapiens
caaggggagaggtacatcttggtgaaaaagaccaatgatgactggtggcaagtcaagccagatgaaaactccaaagcgttttatgtgccagcccagtatgtgaaggaggtcacgcgcaaagctctcatgccacctgttaagcaggtagctggtctgccaaataactccacgaaaataatgcagagtttgcatcttcagagatcaacagaaaatgtgaacaaattgcctgagctttcaagtttcggaaagccatcgtcatctgttcaaggaacaggtcttattcgtgatgccaatcagaattttggacccagttataatcaaggtcagactgtcaacctaagcctggacctgacccataataacggaaagtttaacaatgactcacattctcctaaagtttccagccagaataggacacgctcatttggtcattttcccggtccagagttcttggatgtagagaaaactagcttctcccaggaacaatcttgtgattccgcaggagaaggctctgaaagaatacatcaagattctgaatctggtgatgaacttagcagcagctccactgaacagataagggcaaccacacctccaaatcaaggaaggccagattctcctgtctatgctaaccttcaagaactgaaaatatcccagtctgctcttcccccacttcctgggagcccggcaattcagattaatggagaatgggaaactcataaagacagctcagggcgttgctattactataacagagggacacaggaaagaacttggaaacctcctcgttggactcgggatgcaagcatcagcaaaggagatttccaaaatccaggggatcaagagcttctttcatcggaagaaaactactacagcacttcttacagccagtcagatagtcagtgtggttctcctccaaggggttggtcagaagagttggatgaacgtgggcataccttatataccagtgactatactaatgaaaagtggctcaagcatgttgatgatcaaggtagacaatattactacagtgcagacggatctcggtcagaatgggaattgccaaagtataatgcttcatcccagcagcaaagagaaataattaaaagtaggagcctggacaggcggctgcaagaaccaatagtattaacaaagtggagacatagcaccattgtattggacactaatgataaggaatctccaactgcctcaaaaccctgctttcctgaaaatgagtcttctccctcctcaccaaagcaccaagatacagccagcagtccaaggatcaagagaaatatggattattaaatgtaacaaaaattgctgaaaatgggaaaaaggttcgaaagaactggttgtcttcttgggcggtgttgcagggttcatctttactttttaccaaaactcaaggaagtagcacaagttggtttggcagtaatcagtccaaaccagagttcacagtggacctcaagggggcaacaattgagatggcttcaaaggataaatccagcaaaaagaatgtatttgagctgaaaactcgtcaaggaacagaactgctaattcagtctgacaatgacactgttattaatgattggtttaaagttcttagtagtacaatcaataatcaggcagtagaaactgatgaaggaattgaagaggagataccggattcaccaggaatagaaaagcatgataaagaaaaggaacaaaaggatcccaaaaagcttcgttcctttaaagtatctagcatagattcttcagaacagaaaaaaaccaagaaaaacttaaagaagtttcttacacgacgccccactttgcaagctgttcgtgaaaaaggttatattaaagatcaggtatttggatccaatctcgctaatctgtgtcagagagagaatggcacagtaccaaagtttgtgaagttatgtattgaacatgttgaagaacatggtttggatattgatgggatatacagagtaagtggcaacctcgcagtgatccagaaactaaggtttgcagtcaatcatgatgagaaattggacttgaatgacagtaaatgggaagatattcatgtcattactggagccctcaaaatgttttttcgagaattaccagaacctctttttacatttaatcattttaatgattttgttaatgcaattaagcaagaaccaagacagcgagtcgctgctgttaaggacctaatcagacagttgccaaagccaaaccaagacacaatgcagattcttttccgacatctcagaagagttatagaaaatggagagaaaaatcgaatgacctatcagagtatagcaattgtttttggtcccactctattaaaaccagaaaaagagactggtaatatagcagttcatactgtgtaccagaatcagattgtagaattaattcttctggaactgagttccatcttcggacgttgattcttactgaagacaacctgtggaatagaagctggattccatcagatttcaaatgtttatacacaatgtattttattttttggaccaagcagtgactctttgattttgcactttttttttgagggatcagaagggaaggggagagtcgagatgtgtgttaggccctcatatttgctgctttgttgcaagttgatataactgcgtgtaattatgaattcattttatcctgaatgtttgcatttcatactctgaatttcagtaaaaatcaaaacttaaaattctaaccagtcatatacactggataatttggtaagaaaactgtattttttttccctgaaattggataatgtactttcttctcaagattcatgacttgatagaacaatactttcagttatgttgcaaaggctcttgggcattttaaacaaaatgaagtatatccattttgaaacctgtgtatttctttttcggggtttctgcatgcagtggcagtcttaagtgccaaaattcattataaccccaaaataaccccttgatgaaggcttgctgtcttttactgtgttacacagcatccttactggatatcttagttgcttgtttgggcagcacactaatattacttaaaacactgtgatatactggagttttagttagcggaagtcagttcagggcattttagggctgtcttgctatactgaattgtagctaacaatcctaattatatctagtaccatactgagttattggtatgaccctgtggaaacacacattattttatgtaaatataggctaaagacttaatgtcctttagcttgtgtatataattgtgttgtatagtctcagagtacattctaaccctacatttctaatcattgttattggtaatcttttctgtgaatattaggtttcctccagaaatagtccgttatttgggaaagttaactgtgtgcacttttagatattaactacatttacaggcaaatcactgtaatgagaatggtactggaaaaatactgaatagacttgctaaatggcacatgcactacaagaggaaccttttgggttatttaatatgtacagaaaacattagaaaaaatttattacagaattctaattccagtatgaatagtggaaacccatctgtaaattagatggatgttggatggaaaatgacattgctaaatttgagaatttctttttacctactaatgtagattgctttgtataataaaacacagggtttggaaggttttgttacagggagcatggtctgttgaagatttttaaaatgtatttttctagattaacttctgtacatgaaatgtctaataaaactataagaggtttagagatttttccattggaaatgtgcattttggtttctaatttttttgttttttcatttactggcatactgttatacctcatttttaaaaatcaactgaatccaatatttcctgtggcaaataacactttcctcatttcataccttttctcctctcttccatgccaacatttctccacccacaacgtacactttttatttctccatcaatatttgaaagcgagtgatttgtgaccaggatttttttttcttagggttgcatttataatttacagattgccttccttgggaacaagtatttttttgtatgatctgtctaaaaacctctcacctgaattttgtggtagaaagtctgtatttgttgttgtgagcgtgttaaattgataacaaaccaaactacttgatagctaaagcagattgtttcgggtggggagaaaaagccctaaatcagaatgtttatatttgcctaaagatgtccttaataatacaatatgctttagatcttgcttatttagtgattgtataccaggaaaacaattagactcaaatcagtgatgttcttgttcttggtgttcatgaacatatatcaaagattaaaattgtcctgtgtttcttgtttcaaggtacgtgtgtgtgtgtgtgtgtgtgtgtgtgtgtgtgtgtgaagtcttaaatgttttattagtctacagctaatcagtttattgtaatattgtatgtacagtgagattaatgtcttgcgttttcatcctttgtgaattaaaaattctcacttgttttgtaataacaaagctagtaatattttcctgtcttgacagcttggttttatagtagaaaatatattaaaagctgaaataaattatcagtggaattttaaaatta

SEQ ID NO: 445004 - DNA, 4001 bp, Homo sapiens
tggggtctttgctcagaataggacacgctcattgcagcagctccactgaacagataagggcaaccacacctccaaatcaaggaaggccagattctcctgtctatgctaaccttcaagaactgaaaatatcccagtctgctcttcccccacttcctgggagcccggcaattcagattaatggagaatgggaaactcataaagacagctcagggcgttgctattactataacagagggacacaggaaagaacttggaaacctcctcgttggactcgggatgcaagcatcagcaaaggagatttccaaaatccaggggatcaagagtggctcaagcatgttgatgatcaaggtagacaatattactacagtgcagacggatctcggtcagaatgggaattgccaaagtataatgcttcatcccagcagcaaagagaaataattaaaagtaggagcctggacaggcggctgcaagaaccaatagtattaacaaagtggagacatagcaccattgtattggacactaatgataaggaatctccaactgcctcaaaaccctgctttcctgaaaatgagtcttctccctcctcaccaaagcaccaagatacagccagcagtccaaggatcaagagaaatatggattattaaatgtaacaaaaattgctgaaaatgggaaaaaggttcgaaagaactggttgtcttcttgggcggtgttgcagggttcatctttactttttaccaaaactcaaggaagtagcacaagttggtttggcagtaatcagtccaaaccagagttcacagtggacctcaagggggcaacaattgagatggcttcaaaggataaatccagcaaaaagaatgtatttgagctgaaaactcgtcaaggaacagaactgctaattcagtctgacaatgacactgttattaatgattggtttaaagttcttagtagtacaatcaataatcaggcagtagaaactgatgaaggaattgaagaggagataccggattcaccaggaatagaaaagcatgataaagaaaaggaacaaaaggatcccaaaaagcttcgttcctttaaagtatctagcatagattcttcagaacagaaaaaaaccaagaaaaacttaaagaagtttcttacacgacgccccactttgcaagctgttcgtgaaaaaggttatattaaagatcaggtatttggatccaatctcgctaatctgtgtcagagagagaatggcacagtaccaaagtttgtgaagttatgtattgaacatgttgaagaacatggtttggatattgatgggatatacagagtaagtggcaacctcgcagtgatccagaaactaaggtttgcagtcaatcatgatgagaaattggacttgaatgacagtaaatgggaagatattcatgtcattactggagccctcaaaatgttttttcgagaattaccagaacctctttttacatttaatcattttaatgattttgttaatgcaattaagcaagaaccaagacagcgagtcgctgctgttaaggacctaatcagacagttgccaaagccaaaccaagacacaatgcagattcttttccgacatctcagaagagttatagaaaatggagagaaaaatcgaatgacctatcagagtatagcaattgtttttggtcccactctattaaaaccagaaaaagagactggtaatatagcagttcatactgtgtaccagaatcagattgtagaattaattcttctggaactgagttccatcttcggacgttgattcttactgaagacaacctgtggaatagaagctggattccatcagatttcaaatgtttatacacaatgtattttattttttggaccaagcagtgactctttgattttgcactttttttttgagggatcagaagggaaggggagagtcgagatgtgtgttaggccctcatatttgctgctttgttgcaagttgatataactgcgtgtaattatgaattcattttatcctgaatgtttgcatttcatactctgaatttcagtaaaaatcaaaacttaaaattctaaccagtcatatacactggataatttggtaagaaaactgtattttttttccctgaaattggataatgtactttcttctcaagattcatgacttgatagaacaatactttcagttatgttgcaaaggctcttgggcattttaaacaaaatgaagtatatccattttgaaacctgtgtatttctttttcggggtttctgcatgcagtggcagtcttaagtgccaaaattcattataaccccaaaataaccccttgatgaaggcttgctgtcttttactgtgttacacagcatccttactggatatcttagttgcttgtttgggcagcacactaatattacttaaaacactgtgatatactggagttttagttagcggaagtcagttcagggcattttagggctgtcttgctatactgaattgtagctaacaatcctaattatatctagtaccatactgagttattggtatgaccctgtggaaacacacattattttatgtaaatataggctaaagacttaatgtcctttagcttgtgtatataattgtgttgtatagtctcagagtacattctaaccctacatttctaatcattgttattggtaatcttttctgtgaatattaggtttcctccagaaatagtccgttatttgggaaagttaactgtgtgcacttttagatattaactacatttacaggcaaatcactgtaatgagaatggtactggaaaaatactgaatagacttgctaaatggcacatgcactacaagaggaaccttttgggttatttaatatgtacagaaaacattagaaaaaatttattacagaattctaattccagtatgaatagtggaaacccatctgtaaattagatggatgttggatggaaaatgacattgctaaatttgagaatttctttttacctactaatgtagattgctttgtataataaaacacagggtttggaaggttttgttacagggagcatggtctgttgaagatttttaaaatgtatttttctagattaacttctgtacatgaaatgtctaataaaactataagaggtttagagatttttccattggaaatgtgcattttggtttctaatttttttgttttttcatttactggcatactgttatacctcatttttaaaaatcaactgaatccaatatttcctgtggcaaataacactttcctcatttcataccttttctcctctcttccatgccaacatttctccacccacaacgtacactttttatttctccatcaatatttgaaagcgagtgatttgtgaccaggatttttttttcttagggttgcatttataatttacagattgccttccttgggaacaagtatttttttgtatgatctgtctaaaaacctctcacctgaattttgtggtagaaagtctgtatttgttgttgtgagcgtgttaaattgataacaaaccaaactacttgatagctaaagcagattgtttcgggtggggagaaaaagccctaaatcagaatgtttatatttgcctaaagatgtccttaataatacaatatgctttagatcttgcttatttagtgattgtataccaggaaaacaattagactcaaatcagtgatgttcttgttcttggtgttcatgaacatatatcaaagattaaaattgtcctgtgtttcttgtttcaaggtacgtgtgtgtgtgtgtgtgtgtgtgtgtgtgtgtgtgtgaagtcttaaatgttttattagtctacagctaatcagtttattgtaatattgtatgtacagtgagattaatgtcttgcgttttcatcctttgtgaattaaaaattctcacttgttttgtaataacaaagctagtaatattttcctgtcttgacagcttggttttatagtagaaaatatattaaaagctgaaataaattatcagtggaattttaaaatta

SEQ ID NO: 445005 - DNA, 3150 bp, Homo sapiens
acaaggaaggataagggccaaatgatgagcgaggttggtgaggtagacataagggaggaagaggaaacatccaacaacttgtggtgcagagatataagacaatcaataatcaggcagtagaaactgatgaaggaattgaagaggagataccggattcaccaggaatagaaaagcatgataaagaaaaggaacaaaaggatcccaaaaagcttcgttcctttaaagtatctagcatagattcttcagaacagaaaaaaaccaagaaaaacttaaagaagtttcttacacgacgccccactttgcaagctgttcgtgaaaaaggttatattaaagatcaggtatttggatccaatctcgctaatctgtgtcagagagagaatggcacagtaccaaagtttgtgaagttatgtattgaacatgttgaagaacatggtttggatattgatgggatatacagagtaagtggcaacctcgcagtgatccagaaactaaggtttgcagtcaatcatgatgagaaattggacttgaatgacagtaaatgggaagatattcatgtcattactggagccctcaaaatgttttttcgagaattaccagaacctctttttacatttaatcattttaatgattttgttaatgcaattaagcaagaaccaagacagcgagtcgctgctgttaaggacctaatcagacagttgccaaagccaaaccaagacacaatgcagattcttttccgacatctcagaagagttatagaaaatggagagaaaaatcgaatgacctatcagagtatagcaattgtttttggtcccactctattaaaaccagaaaaagagactggtaatatagcagttcatactgtgtaccagaatcagattgtagaattaattcttctggaactgagttccatcttcggacgttgattcttactgaagacaacctgtggaatagaagctggattccatcagatttcaaatgtttatacacaatgtattttattttttggaccaagcagtgactctttgattttgcactttttttttgagggatcagaagggaaggggagagtcgagatgtgtgttaggccctcatatttgctgctttgttgcaagttgatataactgcgtgtaattatgaattcattttatcctgaatgtttgcatttcatactctgaatttcagtaaaaatcaaaacttaaaattctaaccagtcatatacactggataatttggtaagaaaactgtattttttttccctgaaattggataatgtactttcttctcaagattcatgacttgatagaacaatactttcagttatgttgcaaaggctcttgggcattttaaacaaaatgaagtatatccattttgaaacctgtgtatttctttttcggggtttctgcatgcagtggcagtcttaagtgccaaaattcattataaccccaaaataaccccttgatgaaggcttgctgtcttttactgtgttacacagcatccttactggatatcttagttgcttgtttgggcagcacactaatattacttaaaacactgtgatatactggagttttagttagcggaagtcagttcagggcattttagggctgtcttgctatactgaattgtagctaacaatcctaattatatctagtaccatactgagttattggtatgaccctgtggaaacacacattattttatgtaaatataggctaaagacttaatgtcctttagcttgtgtatataattgtgttgtatagtctcagagtacattctaaccctacatttctaatcattgttattggtaatcttttctgtgaatattaggtttcctccagaaatagtccgttatttgggaaagttaactgtgtgcacttttagatattaactacatttacaggcaaatcactgtaatgagaatggtactggaaaaatactgaatagacttgctaaatggcacatgcactacaagaggaaccttttgggttatttaatatgtacagaaaacattagaaaaaatttattacagaattctaattccagtatgaatagtggaaacccatctgtaaattagatggatgttggatggaaaatgacattgctaaatttgagaatttctttttacctactaatgtagattgctttgtataataaaacacagggtttggaaggttttgttacagggagcatggtctgttgaagatttttaaaatgtatttttctagattaacttctgtacatgaaatgtctaataaaactataagaggtttagagatttttccattggaaatgtgcattttggtttctaatttttttgttttttcatttactggcatactgttatacctcatttttaaaaatcaactgaatccaatatttcctgtggcaaataacactttcctcatttcataccttttctcctctcttccatgccaacatttctccacccacaacgtacactttttatttctccatcaatatttgaaagcgagtgatttgtgaccaggatttttttttcttagggttgcatttataatttacagattgccttccttgggaacaagtatttttttgtatgatctgtctaaaaacctctcacctgaattttgtggtagaaagtctgtatttgttgttgtgagcgtgttaaattgataacaaaccaaactacttgatagctaaagcagattgtttcgggtggggagaaaaagccctaaatcagaatgtttatatttgcctaaagatgtccttaataatacaatatgctttagatcttgcttatttagtgattgtataccaggaaaacaattagactcaaatcagtgatgttcttgttcttggtgttcatgaacatatatcaaagattaaaattgtcctgtgtttcttgtttcaaggtacgtgtgtgtgtgtgtgtgtgtgtgtgtgtgtgtgtgtgaagtcttaaatgttttattagtctacagctaatcagtttattgtaatattgtatgtacagtgagattaatgtcttgcgttttcatcctttgtgaattaaaaattctcacttgttttgtaataacaaagctagtaatattttcctgtcttgacagcttggttttatagtagaaaatatattaaaagctgaaataaattatcagtggaattttaaaatta

SEQ ID NO: 445006 - DNA, 3197 bp, Homo sapiens
tataaaatggtatgcaaaatatgcatgggctgattttacctgctgacttcctttaattttgaattatccccagatgttttcagaaatttgaaattgttagtgttttaagattaatgaaaccatttccttgagctgattcacagtctatatgatgagcagagtagaattactgctgtttattaaacagaattcagagcgaatctccatctctctcccctgccaagcatctaccagaagccatttagagaaaaagaatatttgcccatttgattttaggctaatgcaaatgagtgggaattctgacacatgcaaacgtgttcagaagaggcaaagaagtactttaaacacacacacacacaaattattattgtctcttaggtttggatattgatgggatatacagagtaagtggcaacctcgcagtgatccagaaactaaggtttgcagtcaatcatggtaagattatatttactgttgttattcagatgcatcactcataactttttgaactggcttaaagtaattttttaaaatgtccaattcctgctgtttttcagatgagaaattggacttgaatgacagtaaatgggaagatattcatgtcattactggagccctcaaaatgttttttcgagaattaccagaacctctttttacatttaatcattttaatgattttgttaatgcaattaagcaagaaccaagacagcgagtcgctgctgttaaggacctaatcagacagttgccaaagccaaaccaagacacaatgcagattcttttccgacatctcagaagagttatagaaaatggagagaaaaatcgaatgacctatcagagtatagcaattgtttttggtcccactctattaaaaccagaaaaagagactggtaatatagcagttcatactgtgtaccagaatcagattgtagaattaattcttctggaactgagttccatcttcggacgttgattcttactgaagacaacctgtggaatagaagctggattccatcagatttcaaatgtttatacacaatgtattttattttttggaccaagcagtgactctttgattttgcactttttttttgagggatcagaagggaaggggagagtcgagatgtgtgttaggccctcatatttgctgctttgttgcaagttgatataactgcgtgtaattatgaattcattttatcctgaatgtttgcatttcatactctgaatttcagtaaaaatcaaaacttaaaattctaaccagtcatatacactggataatttggtaagaaaactgtattttttttccctgaaattggataatgtactttcttctcaagattcatgacttgatagaacaatactttcagttatgttgcaaaggctcttgggcattttaaacaaaatgaagtatatccattttgaaacctgtgtatttctttttcggggtttctgcatgcagtggcagtcttaagtgccaaaattcattataaccccaaaataaccccttgatgaaggcttgctgtcttttactgtgttacacagcatccttactggatatcttagttgcttgtttgggcagcacactaatattacttaaaacactgtgatatactggagttttagttagcggaagtcagttcagggcattttagggctgtcttgctatactgaattgtagctaacaatcctaattatatctagtaccatactgagttattggtatgaccctgtggaaacacacattattttatgtaaatataggctaaagacttaatgtcctttagcttgtgtatataattgtgttgtatagtctcagagtacattctaaccctacatttctaatcattgttattggtaatcttttctgtgaatattaggtttcctccagaaatagtccgttatttgggaaagttaactgtgtgcacttttagatattaactacatttacaggcaaatcactgtaatgagaatggtactggaaaaatactgaatagacttgctaaatggcacatgcactacaagaggaaccttttgggttatttaatatgtacagaaaacattagaaaaaatttattacagaattctaattccagtatgaatagtggaaacccatctgtaaattagatggatgttggatggaaaatgacattgctaaatttgagaatttctttttacctactaatgtagattgctttgtataataaaacacagggtttggaaggttttgttacagggagcatggtctgttgaagatttttaaaatgtatttttctagattaacttctgtacatgaaatgtctaataaaactataagaggtttagagatttttccattggaaatgtgcattttggtttctaatttttttgttttttcatttactggcatactgttatacctcatttttaaaaatcaactgaatccaatatttcctgtggcaaataacactttcctcatttcataccttttctcctctcttccatgccaacatttctccacccacaacgtacactttttatttctccatcaatatttgaaagcgagtgatttgtgaccaggatttttttttcttagggttgcatttataatttacagattgccttccttgggaacaagtatttttttgtatgatctgtctaaaaacctctcacctgaattttgtggtagaaagtctgtatttgttgttgtgagcgtgttaaattgataacaaaccaaactacttgatagctaaagcagattgtttcgggtggggagaaaaagccctaaatcagaatgtttatatttgcctaaagatgtccttaataatacaatatgctttagatcttgcttatttagtgattgtataccaggaaaacaattagactcaaatcagtgatgttcttgttcttggtgttcatgaacatatatcaaagattaaaattgtcctgtgtttcttgtttcaaggtacgtgtgtgtgtgtgtgtgtgtgtgtgtgtgtgtgtgtgaagtcttaaatgttttattagtctacagctaatcagtttattgtaatattgtatgtacagtgagattaatgtcttgcgttttcatcctttgtgaattaaaaattctcacttgttttgtaataacaaagctagtaatattttcctgtcttgacagcttggttttatagtagaaaatatattaaaagctgaaataaattatcagtggaattttaaaatta

SEQ ID NO: 445007 - DNA, 2501 bp, Homo sapiens
ctatgctacttgctgtctttgtaacttgaaaaagttactcaactccttttagtatcagtctgtcatgggtaaatgatttgctatgaagaatacagtaaaagttatagaaaatggagagaaaaatcgaatgacctatcagagtatagcaattgtttttggtcccactctattaaaaccagaaaaagagactggtaatatagcagttcatactgtgtaccagaatcagattgtagaattaattcttctggaactgagttccatcttcggacgttgattcttactgaagacaacctgtggaatagaagctggattccatcagatttcaaatgtttatacacaatgtattttattttttggaccaagcagtgactctttgattttgcactttttttttgagggatcagaagggaaggggagagtcgagatgtgtgttaggccctcatatttgctgctttgttgcaagttgatataactgcgtgtaattatgaattcattttatcctgaatgtttgcatttcatactctgaatttcagtaaaaatcaaaacttaaaattctaaccagtcatatacactggataatttggtaagaaaactgtattttttttccctgaaattggataatgtactttcttctcaagattcatgacttgatagaacaatactttcagttatgttgcaaaggctcttgggcattttaaacaaaatgaagtatatccattttgaaacctgtgtatttctttttcggggtttctgcatgcagtggcagtcttaagtgccaaaattcattataaccccaaaataaccccttgatgaaggcttgctgtcttttactgtgttacacagcatccttactggatatcttagttgcttgtttgggcagcacactaatattacttaaaacactgtgatatactggagttttagttagcggaagtcagttcagggcattttagggctgtcttgctatactgaattgtagctaacaatcctaattatatctagtaccatactgagttattggtatgaccctgtggaaacacacattattttatgtaaatataggctaaagacttaatgtcctttagcttgtgtatataattgtgttgtatagtctcagagtacattctaaccctacatttctaatcattgttattggtaatcttttctgtgaatattaggtttcctccagaaatagtccgttatttgggaaagttaactgtgtgcacttttagatattaactacatttacaggcaaatcactgtaatgagaatggtactggaaaaatactgaatagacttgctaaatggcacatgcactacaagaggaaccttttgggttatttaatatgtacagaaaacattagaaaaaatttattacagaattctaattccagtatgaatagtggaaacccatctgtaaattagatggatgttggatggaaaatgacattgctaaatttgagaatttctttttacctactaatgtagattgctttgtataataaaacacagggtttggaaggttttgttacagggagcatggtctgttgaagatttttaaaatgtatttttctagattaacttctgtacatgaaatgtctaataaaactataagaggtttagagatttttccattggaaatgtgcattttggtttctaatttttttgttttttcatttactggcatactgttatacctcatttttaaaaatcaactgaatccaatatttcctgtggcaaataacactttcctcatttcataccttttctcctctcttccatgccaacatttctccacccacaacgtacactttttatttctccatcaatatttgaaagcgagtgatttgtgaccaggatttttttttcttagggttgcatttataatttacagattgccttccttgggaacaagtatttttttgtatgatctgtctaaaaacctctcacctgaattttgtggtagaaagtctgtatttgttgttgtgagcgtgttaaattgataacaaaccaaactacttgatagctaaagcagattgtttcgggtggggagaaaaagccctaaatcagaatgtttatatttgcctaaagatgtccttaataatacaatatgctttagatcttgcttatttagtgattgtataccaggaaaacaattagactcaaatcagtgatgttcttgttcttggtgttcatgaacatatatcaaagattaaaattgtcctgtgtttcttgtttcaaggtacgtgtgtgtgtgtgtgtgtgtgtgtgtgtgtgtgtgtgaagtcttaaatgttttattagtctacagctaatcagtttattgtaatattgtatgtacagtgagattaatgtcttgcgttttcatcctttgtgaattaaaaattctcacttgttttgtaataacaaagctagtaatattttcctgtcttgacagcttggttttatagtagaaaatatattaaaagctgaaataaattatcagtggaattttaaaatta

SEQ ID NO: 445008 - DNA, 2496 bp, Homo sapiens
caaggggagaggtacatcttggtgaaaaagaccaatgatgactggtggcaagtcaagccagatgaaaactccaaagcgttttatgtgccagcccagtatgtgaaggaggtcacgcgcaaagctctcatgccacctgttaagcaggtagctggtctgccaaataactccacgaaaataatgcagagtttgcatcttcagagatcaacagaaaatgtgaacaaattgcctgagctttcaagtttcggaaagccatcgtcatctgttcaaggaacaggtcttattcgtgatgccaatcagaattttggacccagttataatcaaggtcagactgtcaacctaagcctggacctgacccataataacggaaagtttaacaatgactcacattctcctaaagtttccagccagaataggacacgctcatttggtcattttcccggtccagagttcttggatgtagagaaaactagcttctcccaggaacaatcttgtgattccgcaggagaaggctctgaaagaatacatcaagattctgaatctggtgatgaacttagcagcagctccactgaacagataagggcaaccacacctccaaatcaaggaaggccagattctcctgtctatgctaaccttcaagaactgaaaatatcccagtctgctcttcccccacttcctgggagcccggcaattcagattaatggagaatgggaaactcataaagacagctcagggcgttgctattactataacagagggacacaggaaagaacttggaaacctcctcgttggactcgggatgcaagcatcagcaaaggagatttccaaaatccaggggatcaagagcttctttcatcggaagaaaactactacagcacttcttacagccagtcagatagtcagtgtggttctcctccaaggggttggtcagaagagttggatgaacgtgggcataccttatataccagtgactatactaatgaaaagtggctcaagcatgttgatgatcaaggtagacaatattactacagtgcagacggatctcggtcagaatgggaattgccaaagtataatgcttcatcccagcagcaaagagaaataattaaaagtaggagcctggacaggcggctgcaagaaccaatagtattaacaaagtggagacatagcaccattgtattggacactaatgataaggaatctccaactgcctcaaaaccctgctttcctgaaaatgagtcttctccctcctcaccaaagcaccaagatacagccagcagtccaaggatcaagagaaatatggattattaaatgtaacaaaaattgctgaaaatgggaaaaaggttcgaaagaactggttgtcttcttgggcggtgttgcagggttcatctttactttttaccaaaactcaaggaagtagcacaagttggtttggcagtaatcagtccaaaccagagttcacagtggacctcaagggggcaacaattgagatggcttcaaaggataaatccagcaaaaagaatgtatttgagctgaaaactcgtcaaggaacagaactgctaattcagtctgacaatgacactgttattaatgattggtttaaagttcttagtagtacaatcaataatcaggcagtagaaactgatgaaggaattgaagaggagataccggattcaccaggaatagaaaagcatgataaagaaaaggaacaaaaggatcccaaaaagcttcgttcctttaaagtatctagcatagattcttcagaacagaaaaaaaccaagaaaaacttaaagaagtttcttacacgacgccccactttgcaagctgttcgtgaaaaaggttatattaaagaaggttggtaggagaagtattgttgataataatgaatgttggcctacgtcataaataaaatgtttcaaattaaaaacaaacattttcaaacagtaagaatattattctttattcatgtattcaagtacagtgattaaaagacattaagtaattaaaatagtttttttgaaagtttattttaactaaagtagtggacagacataaataacacactaaacttttagaaagcctgtttcagaggaactacatggatgtgatgggtggcagacttttagaaattgtgacaatgaaaagtttagttttgagatgcaaagatcacaataaataagaaattttgaatatcactaacaatagaaagaaaaatgaacaaataatttttacccttggctgtcatttaaggtaactgaaaaattagcataaggtgtttttttctaactaatttatttgcctgttatttcatttataagcactataatggactaacaatcttttttttataggaaaatattctttaaaaaaatcacattacttgtgtatgtagttcttacgagcgtgtttaattccaaaggtaaaattttctaatacctgacttaaaacaatggcatttatttgtaaataaaaataaaagtaaagataatatagtctataatg

SEQ ID NO: 445009 - DNA, 891 bp, Homo sapiens
  misc_feature (613)..(613): n is a, c, g, or t
  misc_feature (616)..(616): n is a, c, g, or t
  misc_feature (631)..(631): n is a, c, g, or t
caaggggagaggtacatcttggtgaaaaagaccaatgatgactggtggcaagtcaagccagatgaaaactccaaagcgttttatgtgccagcccagtatgtgaaggaggtcacgcgcaaagctctcatgccacctgttaagcaggtagctggtctgccaaataactccacgaaaataatgcagagtttgcatcttcagagatcaacagaaaatgtgaacaaattgcctgagctttcaagtttcggaaagccatcgtcatctgttcaaggaacaggtcttattcgtgatgccaatcagaattttggacccagttataatcaaggtcagactgtcaacctaagcctggacctgacccataataacggaaagtttaacaatgactcacattctcctaaagtttccagccagaataggacacgctcatttggtcattttcccggtccagagttcttggatgtagagaaaactagcttctcccaggaacaatcttgtgattccgcaggagaaggctctgaaagaatacatcaagattctgaatctggtgatgaacttagcagcagctccactgaacagataagggtttaaatgtgatactggtgtagatctccttgtnctnagctatattcatccnacaagccataaagccataatgtggtataacatcctttttgagaggtgaatattattgaatgaaaatggctgacagaagtgggaagattattccaggacaagtgtatattgaggtggaatatgattatgaatatgaagcaaaggacagaaagattgtgataacaaggggagaggtacatcttggtgaaaaagacctatgatgactgtgcagtcagccagataaaactccgagcgagttatatgccactcctacgggtcgca

SEQ ID NO: 445010 - DNA, 3462 bp, Homo sapiens
tttttgcataccgtatatgtgttgcttttgtgatggaggaaacattttgtttttaaatgtcgtgtggtctatcagtgtacaattcattgtatgcctgtaatgcacctagtacctactacctgagtactccagcccaattaggggaaggcagatcaccaagaaatgtaacacagtctgtataaagaattagaaagaactggttgtcttcttgggcggtgttgcagggttcatctttactttttaccaaaactcaaggaagtagcacaagttggtttggcagtaatcagtccaaaccagagttcacagtggacctcaagggggcaacaattgagatggcttcaaaggataaatccagcaaaaagaatgtatttgagctgaaaactcgtcaaggaacagaactgctaattcagtctgacaatgacactgttattaatgattggtttaaagttcttagtagtacaatcaataatcaggcagtagaaactgatgaaggaattgaagaggagataccggattcaccaggaatagaaaagcatgataaagaaaaggaacaaaaggatcccaaaaagcttcgttcctttaaagtatctagcatagattcttcagaacagaaaaaaaccaagaaaaacttaaagaagtttcttacacgacgccccactttgcaagctgttcgtgaaaaaggttatattaaagatcaggtatttggatccaatctcgctaatctgtgtcagagagagaatggcacagtaccaaagtttgtgaagttatgtattgaacatgttgaagaacatggtttggatattgatgggatatacagagtaagtggcaacctcgcagtgatccagaaactaaggtttgcagtcaatcatgatgagaaattggacttgaatgacagtaaatgggaagatattcatgtcattactggagccctcaaaatgttttttcgagaattaccagaacctctttttacatttaatcattttaatgattttgttaatgcaattaagcaagaaccaagacagcgagtcgctgctgttaaggacctaatcagacagttgccaaagccaaaccaagacacaatgcagattcttttccgacatctcagaagagttatagaaaatggagagaaaaatcgaatgacctatcagagtatagcaattgtttttggtcccactctattaaaaccagaaaaagagactggtaatatagcagttcatactgtgtaccagaatcagattgtagaattaattcttctggaactgagttccatcttcggacgttgattcttactgaagacaacctgtggaatagaagctggattccatcagatttcaaatgtttatacacaatgtattttattttttggaccaagcagtgactctttgattttgcactttttttttgagggatcagaagggaaggggagagtcgagatgtgtgttaggccctcatatttgctgctttgttgcaagttgatataactgcgtgtaattatgaattcattttatcctgaatgtttgcatttcatactctgaatttcagtaaaaatcaaaacttaaaattctaaccagtcatatacactggataatttggtaagaaaactgtattttttttccctgaaattggataatgtactttcttctcaagattcatgacttgatagaacaatactttcagttatgttgcaaaggctcttgggcattttaaacaaaatgaagtatatccattttgaaacctgtgtatttctttttcggggtttctgcatgcagtggcagtcttaagtgccaaaattcattataaccccaaaataaccccttgatgaaggcttgctgtcttttactgtgttacacagcatccttactggatatcttagttgcttgtttgggcagcacactaatattacttaaaacactgtgatatactggagttttagttagcggaagtcagttcagggcattttagggctgtcttgctatactgaattgtagctaacaatcctaattatatctagtaccatactgagttattggtatgaccctgtggaaacacacattattttatgtaaatataggctaaagacttaatgtcctttagcttgtgtatataattgtgttgtatagtctcagagtacattctaaccctacatttctaatcattgttattggtaatcttttctgtgaatattaggtttcctccagaaatagtccgttatttgggaaagttaactgtgtgcacttttagatattaactacatttacaggcaaatcactgtaatgagaatggtactggaaaaatactgaatagacttgctaaatggcacatgcactacaagaggaaccttttgggttatttaatatgtacagaaaacattagaaaaaatttattacagaattctaattccagtatgaatagtggaaacccatctgtaaattagatggatgttggatggaaaatgacattgctaaatttgagaatttctttttacctactaatgtagattgctttgtataataaaacacagggtttggaaggttttgttacagggagcatggtctgttgaagatttttaaaatgtatttttctagattaacttctgtacatgaaatgtctaataaaactataagaggtttagagatttttccattggaaatgtgcattttggtttctaatttttttgttttttcatttactggcatactgttatacctcatttttaaaaatcaactgaatccaatatttcctgtggcaaataacactttcctcatttcataccttttctcctctcttccatgccaacatttctccacccacaacgtacactttttatttctccatcaatatttgaaagcgagtgatttgtgaccaggatttttttttcttagggttgcatttataatttacagattgccttccttgggaacaagtatttttttgtatgatctgtctaaaaacctctcacctgaattttgtggtagaaagtctgtatttgttgttgtgagcgtgttaaattgataacaaaccaaactacttgatagctaaagcagattgtttcgggtggggagaaaaagccctaaatcagaatgtttatatttgcctaaagatgtccttaataatacaatatgctttagatcttgcttatttagtgattgtataccaggaaaacaattagactcaaatcagtgatgttcttgttcttggtgttcatgaacatatatcaaagattaaaattgtcctgtgtttcttgtttcaaggtacgtgtgtgtgtgtgtgtgtgtgtgtgtgtgtgaagtcttaaatgttccaccatcccccccccactagagcgttttgtcacgtgttgcactttaacagtattttatattttttgcaacgccccaagttttagatctttctagagcttggttgttcctcctctcaatctcagatttttttttcccatcctcgcagagacccaattgtcca

SEQ ID NO: 445011 - DNA, 4620 bp, Homo sapiens
caaggggagaggtacatcttggtgaaaaagaccaatgatgactggtggcaagtcaagccagatgaaaactccaaagcgttttatgtgccagcccagtatgtgaaggaggtcacgcgcaaagctctcatgccacctgttaagcaggtagctggtctgccaaataactccacgaaaataatgcagagtttgcatcttcagagatcaacagaaaatgtgaacaaattgcctgagctttcaagtttcggaaagccatcgtcatctgttcaaggaacaggtcttattcgtgatgccaatcagaattttggacccagttataatcaaggtcagactgtcaacctaagcctggacctgacccataataacggaaagtttaacaatgactcacattctcctaaagtttccagccagaataggacacgctcatttggtcattttcccggtccagagttcttggatgtagagaaaactagcttctcccaggaacaatcttgtgattccgcaggagaaggctctgaaagaatacatcaagattctgaatctggtgatgaacttagcagcagctccactgaacagataagggcaaccacacctccaaatcaaggaaggccagattctcctgtctatgctaaccttcaagaactgaaaatatcccagtctgctcttcccccacttcctgggagcccggcaattcagattaatggagaatgggaaactcataaagacagctcagggcgttgctattactataacagagggacacaggaaagaacttggaaacctcctcgttggactcgggatgcaagcatcagcaaaggagatttccaaaatccaggggatcaagagcttctttcatcggaagaaaactactacagcacttcttacagccagtcagatagtcagtgtggttctcctccaaggggttggtcagaagagttggatgaacgtgggcataccttatataccagtgactatactaatgaaaagtggctcaagcatgttgatgatcaaggtagacaatattactacagtgcagacggatctcggtcagaatgggaattgccaaagtataatgcttcatcccagcagcaaagagaaataattaaaagtaggagcctggacaggcggctgcaagaaccaatagtattaacaaagtggagacatagcaccattgtattggacactaatgataaggaatctccaactgcctcaaaaccctgctttcctgaaaatgagtcttctccctcctcaccaaagcaccaagatacagccagcagtccaaggatcaagagaaatatggattattaaatgtaacaaaaattgctgaaaatgggaaaaaggttcgaaagaactggttgtcttcttgggcggtgttgcagggttcatctttactttttaccaaaactcaaggaagtagcacaagttggtttggcagtaatcagtccaaaccagagttcacagtggacctcaagggggcaacaattgagatggcttcaaaggataaatccagcaaaaagaatgtatttgagctgaaaactcgtcaaggaacagaactgctaattcagtctgacaatgacactgttattaatgattggtttaaagttcttagtagtacaatcaataatcaggcagtagaaactgatgaaggaattgaagaggagataccggattcaccaggaatagaaaagcatgataaagaaaaggaacaaaaggatcccaaaaagcttcgttcctttaaagtatctagcatagattcttcagaacagaaaaaaaccaagaaaaacttaaagaagtttcttacacgacgccccactttgcaagctgttcgtgaaaaaggttatattaaagagaatggcacagtaccaaagtttgtgaagttatgtattgaacatgttgaagaacatggtttggatattgatgggatatacagagtaagtggcaacctcgcagtgatccagaaactaaggtttgcagtcaatcatgatgagaaattggacttgaatgacagtaaatgggaagatattcatgtcattactggagccctcaaaatgttttttcgagaattaccagaacctctttttacatttaatcattttaatgattttgttaatgcaattaagcaagaaccaagacagcgagtcgctgctgttaaggacctaatcagacagttgccaaagccaaaccaagacacaatgcagattcttttccgacatctcagaagagttatagaaaatggagagaaaaatcgaatgacctatcagagtatagcaattgtttttggtcccactctattaaaaccagaaaaagagactggtaatatagcagttcatactgtgtaccagaatcagattgtagaattaattcttctggaactgagttccatcttcggacgttgattcttactgaagacaacctgtggaatagaagctggattccatcagatttcaaatgtttatacacaatgtattttattttttggaccaagcagtgactctttgattttgcactttttttttgagggatcagaagggaaggggagagtcgagatgtgtgttaggccctcatatttgctgctttgttgcaagttgatataactgcgtgtaattatgaattcattttatcctgaatgtttgcatttcatactctgaatttcagtaaaaatcaaaacttaaaattctaaccagtcatatacactggataatttggtaagaaaactgtattttttttccctgaaattggataatgtactttcttctcaagattcatgacttgatagaacaatactttcagttatgttgcaaaggctcttgggcattttaaacaaaatgaagtatatccattttgaaacctgtgtatttctttttcggggtttctgcatgcagtggcagtcttaagtgccaaaattcattataaccccaaaataaccccttgatgaaggcttgctgtcttttactgtgttacacagcatccttactggatatcttagttgcttgtttgggcagcacactaatattacttaaaacactgtgatatactggagttttagttagcggaagtcagttcagggcattttagggctgtcttgctatactgaattgtagctaacaatcctaattatatctagtaccatactgagttattggtatgaccctgtggaaacacacattattttatgtaaatataggctaaagacttaatgtcctttagcttgtgtatataattgtgttgtatagtctcagagtacattctaaccctacatttctaatcattgttattggtaatcttttctgtgaatattaggtttcctccagaaatagtccgttatttgggaaagttaactgtgtgcacttttagatattaactacatttacaggcaaatcactgtaatgagaatggtactggaaaaatactgaatagacttgctaaatggcacatgcactacaagaggaaccttttgggttatttaatatgtacagaaaacattagaaaaaatttattacagaattctaattccagtatgaatagtggaaacccatctgtaaattagatggatgttggatggaaaatgacattgctaaatttgagaatttctttttacctactaatgtagattgctttgtataataaaacacagggtttggaaggttttgttacagggagcatggtctgttgaagatttttaaaatgtatttttctagattaacttctgtacatgaaatgtctaataaaactataagaggtttagagatttttccattggaaatgtgcattttggtttctaatttttttgttttttcatttactggcatactgttatacctcatttttaaaaatcaactgaatccaatatttcctgtggcaaataacactttcctcatttcataccttttctcctctcttccatgccaacatttctccacccacaacgtacactttttatttctccatcaatatttgaaagcgagtgatttgtgaccaggatttttttttcttagggttgcatttataatttacagattgccttccttgggaacaagtatttttttgtatgatctgtctaaaaacctctcacctgaattttgtggtagaaagtctgtatttgttgttgtgagcgtgttaaattgataacaaaccaaactacttgatagctaaagcagattgtttcgggtggggagaaaaagccctaaatcagaatgtttatatttgcctaaagatgtccttaataatacaatatgctttagatcttgcttatttagtgattgtataccaggaaaacaattagactcaaatcagtgatgttcttgttcttggtgttcatgaacatatatcaaagattaaaattgtcctgtgtttcttgtttcaaggtacgtgtgtgtgtgtgtgtgtgtgtgtgtgtgtgtgtgtgaagtcttaaatgttttattagtctacagctaatcagtttattgtaatattgtatgtacagtgagattaatgtcttgcgttttcatcctttgtgaattaaaaattctcacttgttttgtaataacaaagctagtaatattttcctgtcttgacagcttggttttatagtagaaaatatattaaaagctgaaataaattatcagtggaattttaaaatta

SEQ ID NO: 445012 - DNA, 4641 bp, Homo sapiens
caaggggagaggtacatcttggtgaaaaagaccaatgatgactggtggcaagtcaagccagatgaaaactccaaagcgttttatgtgccagcccagtatgtgaaggaggtcacgcgcaaagctctcatgccacctgttaagcaggtagctggtctgccaaataactccacgaaaataatgcagagtttgcatcttcagagatcaacagaaaatgtgaacaaattgcctgagctttcaagtttcggaaagccatcgtcatctgttcaaggaacaggtcttattcgtgatgccaatcagaattttggacccagttataatcaaggtcagactgtcaacctaagcctggacctgacccataataacggaaagtttaacaatgactcacattctcctaaagtttccagccagaataggacacgctcatttggtcattttcccggtccagagttcttggatgtagagaaaactagcttctcccaggaacaatcttgtgattccgcaggagaaggctctgaaagaatacatcaagattctgaatctggtgatgaacttagcagcagctccactgaacagataagggcaaccacacctccaaatcaaggaaggccagattctcctgtctatgctaaccttcaagaactgaaaatatcccagtctgctcttcccccacttcctgggagcccggcaattcagattaatggagaatgggaaactcataaagacagctcagggcgttgctattactataacagagggacacaggaaagaacttggaaacctcctcgttggactcgggatgcaagcatcagcaaaggagatttccaaaatccaggggatcaagagcttctttcatcggaagaaaactactacagcacttcttacagccagtcagatagtcagtgtggttctcctccaaggggttggtcagaagagttggatgaacgtgggcataccttatataccagtgactatactaatgaaaagtggctcaagcatgttgatgatcaaggtagacaatattactacagtgcagacggatctcggtcagaatgggaattgccaaagtataatgcttcatcccagcagcaaagagaaataattaaaagtaggagcctggacaggcggctgcaagaaccaatagtattaacaaagtggagacatagcaccattgtattggacactaatgataaggaatctccaactgcctcaaaaccctgctttcctgaaaatgagtcttctccctcctcaccaaagcaccaagatacagccagcagtccaaggatcaagagaaatatggattattaaatgtaacaaaaattgctgaaaatgggaaaaaggttcgaaagaactggttgtcttcttgggcggtgttgcagggttcatctttactttttaccaaaactcaaggaagtagcacaagttggtttggcagtaatcagtccaaaccagagttcacagtggacctcaagggggcaacaattgagatggcttcaaaggataaatccagcaaaaagaatgtatttgagctgaaaactcgtcaaggaacagaactgctaattcagtctgacaatgacactgttattaatgattggtttaaagttcttagtagtacaatcaataatcaggcagtagaaactgatgaaggaattgaagaggagataccggattcaccaggaatagaaaagcatgataaagaaaaggaacaaaaggatcccaaaaagcttcgttcctttaaagtatctagcatagattcttcagaacagaaaaaaaccaagaaaaacttaaagaagtttcttacacgacgccccactttgcaagctgttcgtgaaaaaggttatattaaagatcaggtatttggatccaatctcgctaatctgtgtcagagagagaatggcacagtaccaaagtttgtgaagttatgtattgaacatgttgaagaacatggtttggatattgatgggatatacagagtaagtggcaacctcgcagtgatccagaaactaaggtttgcagtcaatcatgatgagaaattggacttgaatgacagtaaatgggaagatattcatgtcattactggagccctcaaaatgttttttcgagaattaccagaacctctttttacatttaatcattttaatgattttgttaatgcaattaagcaagaaccaagacagcgagtcgctgctgttaaggacctaatcagacagttgccaaagccaaaccaagacacaatgcagattcttttccgacatctcagaagagttatagaaaatggagagaaaaatcgaatgacctatcagagtatagcaattgtttttggtcccactctattaaaaccagaaaaagagactggtaatatagcagttcatactgtgtaccagaatcagattgtagaattaattcttctggaactgagttccatcttcggacgttgattcttactgaagacaacctgtggaatagaagctggattccatcagatttcaaatgtttatacacaatgtattttattttttggaccaagcagtgactctttgattttgcactttttttttgagggatcagaagggaaggggagagtcgagatgtgtgttaggccctcatatttgctgctttgttgcaagttgatataactgcgtgtaattatgaattcattttatcctgaatgtttgcatttcatactctgaatttcagtaaaaatcaaaacttaaaattataatttggtaagaaaactgtattttttttccctgaaattggataatgtactttcttctcaagattcatgacttgatagaacaatactttcagttatgttgcaaaggctcttgggcattttaaacaaaatgaagtatatccattttgaaacctgtgtatttctttttcggggtttctgcatgcagtggcagtcttaagtgccaaaattcattataaccccaaaataaccccttgatgaaggcttgctgtcttttactgtgttacacagcatccttactggatatcttagttgcttgtttgggcagcacactaatattacttaaaacactgtgatatactggagttttagttagcggaagtcagttcagggcattttagggctgtcttgctatactgaattgtagctaacaatcctaattatatctagtaccatactgagttattggtatgaccctgtggaaacacacattattttatgtaaatataggctaaagacttaatgtcctttagcttgtgtatataattgtgttgtatagtctcagagtacattctaaccctacatttctaatcattgttattggtaatcttttctgtgaatattaggtttcctccagaaatagtccgttatttgggaaagttaactgtgtgcacttttagatattaactacatttacaggcaaatcactgtaatgagaatggtactggaaaaatactgaatagacttgctaaatggcacatgcactacaagaggaaccttttgggttatttaatatgtacagaaaacattagaaaaaatttattacagaattctaattccagtatgaatagtggaaacccatctgtaaattagatggatgttggatggaaaatgacattgctaaatttgagaatttctttttacctactaatgtagattgctttgtataataaaacacagggtttggaaggttttgttacagggagcatggtctgttgaagatttttaaaatgtatttttctagattaacttctgtacatgaaatgtctaataaaactataagaggtttagagatttttccattggaaatgtgcattttggtttctaatttttttgttttttcatttactggcatactgttatacctcatttttaaaaatcaactgaatccaatatttcctgtggcaaataacactttcctcatttcataccttttctcctctcttccatgccaacatttctccacccacaacgtacactttttatttctccatcaatatttgaaagcgagtgatttgtgaccaggatttttttttcttagggttgcatttataatttacagattgccttccttgggaacaagtatttttttgtatgatctgtctaaaaacctctcacctgaattttgtggtagaaagtctgtatttgttgttgtgagcgtgttaaattgataacaaaccaaactacttgatagctaaagcagattgtttcgggtggggagaaaaagccctaaatcagaatgtttatatttgcctaaagatgtccttaataatacaatatgctttagatcttgcttatttagtgattgtataccaggaaaacaattagactcaaatcagtgatgttcttgttcttggtgttcatgaacatatatcaaagattaaaattgtcctgtgtttcttgtttcaaggtacgtgtgtgtgtgtgtgtgtgtgtgtgtgtgtgtgtgtgaagtcttaaatgttttattagtctacagctaatcagtttattgtaatattgtatgtacagtgagattaatgtcttgcgttttcatcctttgtgaattaaaaattctcacttgttttgtaataacaaagctagtaatattttcctgtcttgacagcttggttttatagtagaaaatatattaaaagctgaaataaattatcagtggaattttaaaatta

SEQ ID NO: 445013 - DNA, 2417 bp, Homo sapiens
caaggggagaggtacatcttggtgaaaaagaccaatgatgactggtggcaagtcaagccagatgaaaactccaaagcgttttatgtgccagcccagtatgtgaaggaggtcacgcgcaaagctctcatgccacctgttaagcaggtagctggtctgccaaataactccacgaaaataatgcagagtttgcatcttcagagatcaacagaaaatgtgaacaaattgcctgagctttcaagtttcggaaagccatcgtcatctgttcaaggaacaggtcttattcgtgatgccaatcagaattttggacccagttataatcaaggtcagactgtcaacctaagcctggacctgacccataataacggaaagtttaacaatgactcacattctcctaaagtttccagccagaataggacacgctcatttggtcattttcccggtccagagttcttggatgtagagaaaactagcttctcccaggaacaatcttgtgattccgcaggagaaggctctgaaagaatacatcaagattctgaatctggtgatgaacttagcagcagctccactgaacagataagggcaaccacacctccaaatcaaggaaggccagattctcctgtctatgctaaccttcaagaactgaaaatatcccagtctgctcttcccccacttcctgggagcccggcaattcagattaatggagaatgggaaactcataaagacagctcagggcgttgctattactataacagagggacacaggaaagaacttggaaacctcctcgttggactcgggatgcaagcatcagcaaaggagatttccaaaatccaggggatcaagagcttctttcatcggaagaaaactactacagcacttcttacagccagtcagatagtcagtgtggttctcctccaaggggttggtcagaagagttggatgaacgtgggcataccttatataccagtgactatactaatgaaaagtggctcaagcatgttgatgatcaaggtagacaatattactacagtgcagacggatctcggtcagaatgggaattgccaaagtataatgcttcatcccagcagcaaagagaaataattaaaagtaggagcctggacaggcggctgcaagaaccaatagtattaacaaagtggagacatagcaccattgtattggacactaatgataaggcagtccaaggatcaagagaaatatggattattaaatgtaacaaaaattgctgaaaatgggaaaaaggttcgaaagaactggttgtcttcttgggcggtgttgcagggttcatctttactttttaccaaaactcaaggaagtagcacaagttggtttggcagtaatcagtccaaaccagagttcacagtggacctcaagggggcaacaattgagatggcttcaaaggataaatccagcaaaaagaatgtatttgagctgaaaactcgtcaaggaacagaactgctaattcagtctgacaatgacactgttattaatgattggtttaaagttcttagtagtacaatcaataatcaggcagtagaaactgatgaaggaattgaagaggagataccggattcaccaggaatagaaaagcatgataaagaaaaggaacaaaaggatcccaaaaagcttcgttcctttaaagtatctagcatagattcttcagaacagaaaaaaaccaagaaaaacttaaagaagtttcttacacgacgccccactttgcaagctgttcgtgaaaaaggttatattaaagaaggttggtaggagaagtattgttgataataatgaatgttggcctacgtcataaataaaatgtttcaaattaaaaacaaacattttcaaacagtaagaatattattctttattcatgtattcaagtacagtgattaaaagacattaagtaattaaaatagtttttttgaaagtttattttaactaaagtagtggacagacataaataacacactaaacttttagaaagcctgtttcagaggaactacatggatgtgatgggtggcagacttttagaaattgtgacaatgaaaagtttagttttgagatgcaaagatcacaataaataagaaattttgaatatcactaacaatagaaagaaaaatgaacaaataatttttacccttggctgtcatttaaggtaactgaaaaattagcataaggtgtttttttctaactaatttatttgcctgttatttcatttataagcactataatggactaacaatcttttttttataggaaaatattctttaaaaaaatcacattacttgtgtatgtagttcttacgagcgtgtttaattccaaaggtaaaattttctaatacctgacttaaaacaatggcatttatttgtaaataaaaataaaagtaaagataatatagtctataatg

SEQ ID NO: 445014 - DNA, 2328 bp, Homo sapiens
tataaaatggtatgcaaaatatgcatgggctgattttacctgctgacttcctttaattttgaattatccccagatgttttcagaaatttgaaattgttagtgttttaagattaatgaaaccatttccttgagctgattcacagtctatatgatgagcagagtagaattactgctgtttattaaacagaattcagagcgaatctccatctctctcccctgccaagcatctaccagaagccatttagagaaaaagaatatttgcccatttgattttaggctaatgcaaatgagtgggaattctgacacatgcaaacgtgttcagaagaggcaaagaagtactttaaacacacacacacacaaattattattgtctcttaggtttggatattgatgggatatacagagtaagtggcaacctcgcagtgatccagaaactaaggtttgcagtcaatcatggtaagattatatttactgttgttattcagatgcatcactcataactttttgaactggcttaaagtaattttttaaaatgtccaattcctgctgtttttcagatgagaaattggacttgaatgacagtaaatgggaagatattcatgtcattactggagccctcaaaatgttttttcgagaattaccagaacctctttttacatttaatcattttaatgattttgttaatgcaattaagcaagaaccaagacagcgagtcgctgctgttaaggacctaatcagacagttgccaaagccaaaccaagacacaatgcagattcttttccgacatctcagaagagttatagaaaatggagagaaaaatcgaatgacctatcagagtatagcaattgtttttggtcccactctattaaaaccagaaaaagagactggtaatatagcagttcatactgtgtaccagaatcagattgtagaattaattcttctggaactgagttccatcttcggacgttgattcttactgaagacaacctgtggaatagaagctggattccatcagatttcaaatgtttatacacaatgtattttattttttggaccaagcagtgactctttgattttgcactttttttttgagggatcagaagggaaggggagagtcgagatgtgtgttaggccctcatatttgctgctttgttgcaagttgatataactgcgtgtaattatgaattcattttatcctgaatgtttgcatttcatactctgaatttcagtaaaaatcaaaacttaaaattctaaccagtcatatacactggataatttggtaagaaaactgtattttttttccctgaaattggataatgtactttcttctcaagattcatgacttgatagaacaatactttcagttatgttgcaaaggctcttgggcattttaaacaaaatgaagtatatccattttgaaacctgtgtatttctttttcggggtttctgcatgcagtggcagtcttaagtgccaaaattcattataaccccaaaataaccccttgatgaaggcttgctgtcttttactgtgttacacagcatccttactggatatcttagttgcttgtttgggcagcacactaatattacttaaaacactgtgatatactggagttttagttagcggaagtcagttcagggcattttagggctgtcttgctatactgaattgtagctaacaatcctaattatatctagtaccatactgagttattggtatgaccctgtggaaacacacattattttatgtaaatataggctaaagacttaatgtcctttagcttgtgtatataattgtgttgtatagtctcagagtacattctaaccctacatttctaatcattgttattggtaatcttttctgtgaatattaggtttcctccagaaatagtccgttatttgggaaagttaactgtgtgcacttttagatattaactacatttacaggcaaatcactgtaatgagaatggtactggaaaaatactgaatagacttgctaaatggcacatgcactacaagaggaaccttttgggttatttaatatgtacagaaaacattagaaaaaatttattacagaattctaattccagtatgaatagtggaaacccatctgtaaattagatggatgttggatggaaaatgacattgctaaatttgagaatttctttttacctactaatgtagattgctttgtataataaaacacagggtttggaaggttttgttacagggagcatggtctgttgaagatttttaaaatgtatttttctagattaacttctgtacatgaaatgtctaataaaactataagaggtttagagatttttc

SEQ ID NO: 445015 - DNA, 846 bp, Homo sapiens
ctccccctccccgcgctccgcagctgggaatcacgggactagccttcgtttccttggcaacgcagtacacaagtgctagccctagcagctcgcgatgtgcttcagcagagcagacgctgcggataactacccttttggaacatgtcaacagaggaaactttttcctcacttccatcccccgaatttgattgggaacaagtttgtccctcttaggggatcaccccacagagggcctgggtgttatttttcagatggatatggcttggcatacgacttatctaagatcccaaccagtataaaaggatatactttgggagccagaacagctgtgaggtttaagccaatacagaaggaaatgacacctcatgcaggcaggtaccagaaagtaagtcctcagcaggaaaaacacaaacaaaattttgctccatttaatgtcttggtgcctcgatttaagaactacccaaaggacacttactatcccagccctggtgcatacaacccagagaagaagccaccgccaaaaattgcctggccaatgaaatttggatctccagactgggctcaggttccatgtctacagaaaagaaccctaaaagctgagctgtccacagacaaagactttagaaagcatcggaaccgtgtggcctacctaagcctgtattataattgagcggctgtaactaccttcacgtgctcctcttatacacagactctccaggactgaggacagagctgctcttcttcttctacgttactgtggccctcttgtctggcagcctggagcccagggagggacaggggcttatagctgctgtatgagaacataaagactagtgcacagtgcta

SEQ ID NO: 445016 - DNA, 1115 bp, Homo sapiens
ggtgcgttgaagagagtctgacgcgggagttaggtaagtacccttgggggaacactgttaagcagaggaaaattatcccattatttctatcccccgtgaagttggatggggacccgcagttgggtccctcctatagggagttcaccactgacagtagggccttggcgttggtattcattacacgatggatagtggcttggaaagtgactgagcgttaatcgtaaaggtactcccaatacactacgtcattcacacaacggcactatactttggtggagcctggcacagaggagggaggcttcaagccaaactcacagaaggaaactgacatcctatcatgcaagtgcgacggctacgctagaaagttagatccatccatgacaggaataaataacatgacatgagtttggctccggttaataatgtcttggtgcctcgatttaagaactacccaaaggacacttactatcccagccctggtgcatacaacccagagaagaagccaccgccaaaaattgcctggccaatgaaatttggatctccagactgggctcaggttccatgtctacagaaaagaaccctaaaagctgagctgtccacagacaaagactttagaaagcatcggaaccgtgtggcctacctaagcctgtattataattgagcggctgtaactaccttcacgtgctcctcttatacacagactctccaggactgaggacagagctgctcttcttcttctacgttactgtggccctcttgtctggcagcctggagcccagggagggacaggggcttatagctgctgtatgagaacataaagactagtgcacagtgctatctccatctactgacttgtggtgtacacgtgcatgtctgggtctgtgggtttctgttgggtgctgagttgggtgatttcattttagtgaaatatttgtgggcccctgctctctagttctaattcccaggagccaattttatatattctaccactagccctggtcataggaggctgttagcctatacatgtcaagggtttggatgggatttgggcttgctagatacagaaaacacttaaggcagattaaaacatgtattggagctctaaaaaaaaagtt

SEQ ID NO: 445017 - DNA, 879 bp, Homo sapiens
ctccccctccccgcgctccgcagctgggaatcacgggactagccttcgtttccttggcaacgcagtacacaagtgctagccctagcagctcgcgatgtgcttcagcagagcagacgctgcggataactacccttttggaacatgtcaacagaggaaactttttcctcacttccatcccccgaatttgattgggaacaagtttgtccctcttaggggatcaccccacagagggcctgggtgttatttttcagatggatatggcttggcatacgacttatctaagatcccaaccagtataaaaggatatactttgggagccagaacagctgtgaggtttaagccaatacagaaggaaatgacacctcatgcaggcaggtaccagaaagtaagtcctcagcaggaaaaacacaaacaaaattttgctccatttaatgtcttggtgcctcgatttaagaactacccaaaggacacttactatcccagtatgtctcctcccttttggtgcacttcaacaaaaaaagcaataggaggaaaagaagtacgtaataaaagaagcacataaagaagggatgacatccaaaccatcgcagttaaataaggaaccattcagagatttaatcaattgtctcacagatttctggcattgtagaatgtagaatcatagttactcattcaatgaatttttattaacatgccaggtagttttgtaggttcgatagatttttgcactaaatccatcacacaaggctcctgatttcttggggcttacattctagagtccagacagagcacaggcaaatacacaagaaaatatcaatagtgatagagtgaccatataatttgttagtcaaacgatgacacttctgagagtaaaagggg

SEQ ID NO: 445018 - DNA, 804 bp, Homo sapiens
ctccccctccccgcgctccgcagctgggaatcacgggactagccttcgtttccttggcaacgcagtacacaagtgctagccctagcagctcgcgatgtgcttcagcagagcagacgctgcggataactacccttttggaacatgtcaacagaggaaactttttcctcacttccatcccccgaatttgattgggaacaagtttgtccctcttaggggatcaccccacagagggcctgggtgttatttttcagatggatatggcttggcatacgacttatctaagatcccaaccagtataaaaggatatactttgggagccagaacagctgtgaggtttaagccaatacagaaggaaatgacacctcatgcaggcaggtaccagaaagtaagtcctcagcaggaaaaacacaaacaaaattttgctccatttaatgtcttggtgcctcgatttaagaactacccaaaggacacttactatcccagtgcctggccaatgaaatttggatctccagactgggctcaggttccatgtctacagaaaagaaccctaaaagctgagctgtccacagacaaagactttagaaagcatcggaaccgtgtggcctacctaagcctgtattataattgagcggctgtaactaccttcacgtgctcctcttatacacagactctccaggactgaggacagagctgctcttcttcttctacgttactgtggccctcttgtctggcagcctggagcccagggagggacaggggcttatagctgctgtatgagaacataaagactagtgcacagtgcta

SEQ ID NO: 445019 - DNA, 1124 bp, Homo sapiens
ctccccctccccgcgctccgcagctgggaatcacgggactagccttcgtttccttggcaacgcagtacacaagtgctagccctagcagctcgcgatgtgcttcagcagagcagacgctgcggataactacccttttggaacatgtcaacagaggaaactttttcctcacttccatcccccgaatttgattgggaacaagtttgtccctcttaggggatcaccccacagagggcctgggtgttatttttcagatggatatggcttggcatacgacttatctaagatcccaaccagtataaaaggatatactttgggagccagaacagctgtgaggtttaagccaatacagaaggaaatgacacctcatgcaggcaggtaccagaaagtaagtcctcagcaggaaaaacacaaacaaaattttgctccatttaatgtcttggtgcctcgatttaagaactacccaaaggacacttactatcccagccctggtgcatacaacccagagaagaagccaccgccaaaaattgcctggccaatgaaatttggatctccagactgggctcaggttccatgtctacagaaaagaaccctaaaagctgagctgtccacagacaaagactttagaaagcatcggaaccgtgtggcctacctaagcctgtattataattgagcggctgtaactaccttcacgtgctcctcttatacacagactctccaggactgaggacagagctgctcttcttcttctacgttactgtggccctcttgtctggcagcctggagcccagggagggacaggggcttatagctgctgtatgagaacataaagactagtgcacagtgctatctccatctactgacttgtggtgtacacgtgcatgtctgggtctgtgggtttctgttgggtgctgagttgggtgatttcattttagtgaaatatttgtgggcccctgctctctagttctaattcccaggagccaattttatatattctaccactagccctggtcataggaggctgttagcctatacatgtcaagggtttggatgggatttgggcttgctagatacagaaaacacttaaggcagattaaaacatgtattggagctctaaaaaaaaagtt

SEQ ID NO: 445020 - DNA, 1025 bp, Homo sapiens
ctccccctccccgcgctccgcagctgggaatcacgggactagccttcgtttccttggcaacgcagtacacaagtgctagccctagcagctcgcgatgtgcttcagcagagcagacgctgcggataactacccttttggaacatgtcaacagaggaaactttttcctcacttccatcccccgaatttgattgggaacaagtttgtccctcttaggggatcaccccacagagggcctgggtgttatttttcagatgaaatgacacctcatgcaggcaggtaccagaaagtaagtcctcagcaggaaaaacacaaacaaaattttgctccatttaatgtcttggtgcctcgatttaagaactacccaaaggacacttactatcccagccctggtgcatacaacccagagaagaagccaccgccaaaaattgcctggccaatgaaatttggatctccagactgggctcaggttccatgtctacagaaaagaaccctaaaagctgagctgtccacagacaaagactttagaaagcatcggaaccgtgtggcctacctaagcctgtattataattgagcggctgtaactaccttcacgtgctcctcttatacacagactctccaggactgaggacagagctgctcttcttcttctacgttactgtggccctcttgtctggcagcctggagcccagggagggacaggggcttatagctgctgtatgagaacataaagactagtgcacagtgctatctccatctactgacttgtggtgtacacgtgcatgtctgggtctgtgggtttctgttgggtgctgagttgggtgatttcattttagtgaaatatttgtgggcccctgctctctagttctaattcccaggagccaattttatatattctaccactagccctggtcataggaggctgttagcctatacatgtcaagggtttggatgggatttgggcttgctagatacagaaaacacttaaggcagattaaaacatgtattggagctctaaaaaaaaagtt

SEQ ID NO: 445021 - DNA, 984 bp, Homo sapiens
ctccccctccccgcgctccgcagctgggaatcacgggactagccttcgtttccttggcaacgcagtacacaagtgctagccctagcagctcgcgatgtgcttcagcagagcagggatatggcttggcatacgacttatctaagatcccaaccagtataaaaggatatactttgggagccagaacagctgtgaggtttaagccaatacagaaggaaatgacacctcatgcaggcaggtaccagaaagtaagtcctcagcaggaaaaacacaaacaaaattttgctccatttaatgtcttggtgcctcgatttaagaactacccaaaggacacttactatcccagccctggtgcatacaacccagagaagaagccaccgccaaaaattgcctggccaatgaaatttggatctccagactgggctcaggttccatgtctacagaaaagaaccctaaaagctgagctgtccacagacaaagactttagaaagcatcggaaccgtgtggcctacctaagcctgtattataattgagcggctgtaactaccttcacgtgctcctcttatacacagactctccaggactgaggacagagctgctcttcttcttctacgttactgtggccctcttgtctggcagcctggagcccagggagggacaggggcttatagctgctgtatgagaacataaagactagtgcacagtgctatctccatctactgacttgtggtgtacacgtgcatgtctgggtctgtgggtttctgttgggtgctgagttgggtgatttcattttagtgaaatatttgtgggcccctgctctctagttctaattcccaggagccaattttatatattctaccactagccctggtcataggaggctgttagcctatacatgtcaagggtttggatgggatttgggcttgctagatacagaaaacacttaaggcagattaaaacatgtattggagctctaaaaaaaaagtt

SEQ ID NO: 445022 - DNA, 2063 bp, Homo sapiens
gccccggctctggctctgccggcggagggggcggagagaacccgcagctgcaacttcgcctggagcctttgagcctgggctcagccggggatctagcagccgtcaccgccgagtcgccgcttccccggcgcgggcctcagcccagccggcttggccatggcaggcgccggcagtgcggcgaatctggcccctgcgctccccgcccgtagctgagcagccgttaaccagccatcccgcctttcctcctgcccgtgtcgccgaggcccacgctccgcgcaagtttccgccgccgaagaagcaggaggacggacgtgaggagtcgggcgtccctggcccacccggccctctcgcccgcgatgtgggggcgcttcctggctccggaggccagcggccgggatagccccggcggagcccgcagcttccctgccggcccagattattcatcagcatggctacctgctaatgaatcattgtggcaggccacaactgttccatctaaccatcgaaataaccatatcaggagacacagtatagcttctgacagtggagacactggcattggaacttcctgttctgatagcgtggaagatcattcaacttcaagtggcacattatcttttaagcctagtcaatcattgattactcttcctactgcccatgtgatgccgtctaattccagcgcttcaatttccaaacttagggaatcattgacaccagatggctcaaaatggagtacaagcctcatgcaaacattgggaaaccacagtaggggggagcaggactcttccctagacatgaaggacttccggccacttcggaaatggtcatctttatccaaactcactgccccggataactgtggccagggtggcactgtatgcagagaagagtcaaggaatggtttggagaagatagggaaggctaaggctttaacatcacaactgaggacaattgggcctagctgtttacatgatagtatggagatgcttaggttagaggacaaggaaataaataaaaaacggtcatcaactctggactgcaagtataaatttgagagctgtagcaaggaggactttagagcctcttcctctactcttaggagacagactgtagacatgacatatagtgccttacctgaaagcaagcccattatgacaagctcagaggcttttgaacctccaaaatatttaatgcttggtcaacaggcagtaggtggagttcccattcagccttccgtaaggactcagatgtggcttacagagcagctgcggacaaatcctttggaaggtagaaatacagaggattcttacagtttagctccttggcaacagcagcaaattgaagactttcgacaaggaagtgaaacaccaatgcaggttttgactggatcatctcgtcaaagttattcacctggctatcaggatttcagtaagtgggaatcaatgttgaaaataaaagaaggacttctaaggcagaaagaaattgtaatcgatcggcagaagcaacaaattacccacctgcatgagaggataagggataatgaattacgggctcaacatgccatgttaggacattatgtaaattgtgaggattcttatgtggctagtttgcagccacaatatgagaacacttcactccagacaccattttcagaggaatcagtttcccattcccaacaaggggaatttgagcaaaagcttgcatctactgagaaagaagttttacagcttaatgagtttctcaaacaaagactaagcctatttagtgaagagaagaagaaactagaggaaaaacttaaaactagagatcgatacatcagtagtctgaaaaagaaatgccagaaggaatctgaacaaaacaaagaaaagcagagaagaattgagaccttggaaaagtatctggctgatcttccaactctagatgatgtacagagtcagagtctacagctgcagattctggaagaaaaaaataagaatttacaagaggctttgatagatacagaaaaaaaacttgaagagatcaaaaagcagtgtcaagataaagagacacagttaatatgccag

SEQ ID NO: 445023 - DNA, 4416 bp, Homo sapiens
gccccggctctggctctgccggcggagggggcggagagaacccgcagctgcaacttcgcctggagcctttgagcctgggctcagccggggatctagcagccgtcaccgccgagtcgccgcttccccggcgcgggcctcagcccagccggcttggccatggcaggcgccggcagtgcggcgaatctggcccctgcgctccccgcccgtagctgagcagccgttaaccagccatcccgcctttcctcctgcccgtgtcgccgaggcccacgctccgcgcaagtttccgccgccgaagaagcaggaggacggacgtgaggagtcgggcgtccctggcccacccggccctctcgcccgcgatgtgggggcgcttcctggctccggaggccagcggccgggatagccccggcggagcccgcagcttccctgccggcccagattattcatcagcatggctacctgctaatgaatcattgtggcaggccacaactgttccatctaaccatcgaaataaccatatcaggagacacagtatagcttctgacagtggagacactggcattggaacttcctgttctgatagcgtggaagatcattcaacttcaagtggcacattatcttttaagcctagtcaatcattgattactcttcctactgcccatgtgatgccgtctaattccagcgcttcaatttccaaacttagggaatcattgacaccagatggctcaaaatggagtacaagcctcatgcaaacattgggaaaccacagtaggggggagcaggactcttccctagacatgaaggacttccggccacttcggaaatggtcatctttatccaaactcactgccccggataactgtggccagggtggcactgtatgcagagaagagtcaaggaatggtttggagaagatagggaaggctaaggctttaacatcacaactgaggacaattgggcctagctgtttacatgatagtatggagatgcttaggttagaggacaaggaaataaataaaaaacggtcatcaactctggactgcaagtataaatttgagagctgtagcaaggaggactttagagcctcttcctctactcttaggagacagactgtagacatgacatatagtgccttacctgaaagcaagcccattatgacaagctcagaggcttttgaacctccaaaatatttaatgcttggtcaacaggcagtaggtggagttcccattcagccttccgtaaggactcagatgtggcttacagagcagctgcggacaaatcctttggaaggtagaaatacagaggattcttacagtttagctccttggcaacagcagcaaattgaagactttcgacaaggaagtgaaacaccaatgcaggttttgactggatcatctcgtcaaagttattcacctggctatcaggatttcagtaagtgggaatcaatgttgaaaataaaagaaggacttctaaggcagaaagaaattgtaatcgatcggcagaagcaacaaattacccacctgcatgagaggataagggataatgaattacgggctcaacatgccatgttaggacattatgtaaattgtgaggattcttatgtggctagtttgcagccacaatatgagaacacttcactccagacaccattttcagaggaatcagtttcccattcccaacaaggggaatttgagcaaaagcttgcatctactgagaaagaagttttacagcttaatgagtttctcaaacaaagactaagcctatttagtgaagagaagaagaaactagaggaaaaacttaaaactagagatcgatacatcagtagtctgaaaaagaaatgccagaaggaatctgaacaaaacaaagaaaagcagagaagaattgagaccttggaaaagtatctggctgatcttccaactctagatgatgtacagagtcagagtctacagctgcagattctggaagaaaaaaataagaatttacaagaggctttgatagatacagaaaaaaaacttgaagagatcaaaaagcagtgtcaagataaagagacacagttaatatgccagaaaaagaaagaaaaggagttagtaactaccgttcagagtttgcaacaaaaagtagaaagatgccttgaagatggaatccgccttcccatgttagatgcaaaacagcttcagaatgaaaatgataatctcagacaacaaaatgagactgctagtaagataatagacagccaacaagatgagattgacagaatgattttagaaattcagtctatgcaaggaaagctttctaaagagaaactgaccactcaaaagatgatggaagagctggaaaagaaagaaagaaatgtacagagattaacaaaagcattgcttgaaaaccaaagacaaacagatgagacatgctctttattggatcagggccaggaacctgaccaatctaggcagcagacagttctttccaaacggccactatttgatttgactgtgattgatcagctgttcaaggaaatgtcctgttgtttgtttgacttgaaagcattgtgtagtattcttaatcagcgtgctcagggcaaggagcctaatctttcattattactgggaataagatcaatgaactgttcagctgaagagactgagaatgaccacagcacagaaacactcactaaaaagctgtcagatgtgtgccagttacgaagagacattgatgaattaaggactacaatatcagaccgctatgctcaggacatgggagacaactgcattactcagtgatcaagtgttagtcccacagcaataatgacctgttgtttaaatgctgctgtgttatggagccataatggaaggttgcaagtgacatgacttgcacttagggattttttttctgtggatttgttttgttgaaggggagaagggaagtgaagagattttgaaggggcttatctaatcaggcaaaaagaaaaaaaatcaaattacctttggaaaatatgataaaatctacaaggaaaaaaatgtctatattctcaaactactgattgtaggaccaagctgtgaagagtacccttcacatgaaggagtaggattccttttaatcctatagctttgtgtgtttgtgtgtgcatgtatgtgtgttgttgtgtgtgtgtgcacgtgctttattcacaaatttataagggtttctagggtcagagcagagcttctgagaaaggcacacgctgtttattcttatatttctttcatatagaagcttgtgttgtactttgggattttcagtggctggctgaacaagagttcaaacagcaggcaagtgttgtcatggtagtacaggaggcaaaaccatttatattttgaacacttactgcactgataggatgttttgtggttgagctgattttagtactgtagataggtcagctgtttttccagagtgattgtggatttcccaagaggtgtgaaattttgacgtgatgctctttttccttagcattgtaatgtatgtgttacaagaaaggttaacataacttgaactaattttaacatgttccttactatttacaattttttatttatatgttttatatatatacatatataaatgtaaacaaagccatatataattaataaaggcattggatcattattataaaaggaagattaacaaagttaccctggaacaatagcttacttatccaaatctcaacatttacattttaacagttttgtatgtttcaaagttgaaactactgtaagagaaagccaatactatttatatctgaatcaacagtagcataaacattttttaattgagattgtattttaatcccttttgttaaagtacattaacaacagtttttcacaggatatgaacttggcgaaattagttcttaatctgaattacagggtattactatgaaatgcagttgattttgcagtagacgtacagtcatttaaacttccaaatgagtgttgtccatgtttctgttggtattttggaaggattatacattttattgccttcagcattgattatgttcttttgaatatacttagttttggcgaaagccttgtcctttgtaagttggtttgatcttgtgatgcaaccaagtctcatttaggtcaagactaaataagagatggaggggtagagggtgtgactcaagcaggataatattgatttgataaagagcatatcacatgcctgttttcttgccagataaagggcatagcacatgcctgttttcttatatactagaataaaggctctcctaggaaagatttttcttaaatatttaaaagtgaaaatgtgagacaaggccttcaaggagactacccaggaagatcacagtttaaaatgttggctatacagctctcaatagattattttatagttatagttgaataatcagttataatacac

SEQ ID NO: 445024 - DNA, 4096 bp, Homo sapiens
aaacagctgacccttggctaacattacatgatttggagaaataattggaagtctaccacagggagactaaatgtaaaactccaatcagataaattacaacacggatgtggcccagattattcatcagcatggctacctgctaatgaatcattgtggcaggccacaactgttccatctaaccatcgaaataaccatatcaggagacacagtatagcttctgacagtggagacactggcattggaacttcctgttctgatagcgtggaagatcattcaacttcaagtggcacattatcttttaagcctagtcaatcattgattactcttcctactgcccatgtgatgccgtctaattccagcgcttcaatttccaaacttagggaatcattgacaccagatggctcaaaatggagtacaagcctcatgcaaacattgggaaaccacagtaggggggagcaggactcttccctagacatgaaggacttccggccacttcggaaatggtcatctttatccaaactcactgccccggataactgtggccagggtggcactgtatgcagagaagagtcaaggaatggtttggagaagatagggaaggctaaggctttaacatcacaactgaggacaattgggcctagctgtttacatgatagtatggagatgcttaggttagaggacaaggaaataaataaaaaacggtcatcaactctggactgcaagtataaatttgagagctgtagcaaggaggactttagagcctcttcctctactcttaggagacagactgtagacatgacatatagtgccttacctgaaagcaagcccattatgacaagctcagaggcttttgaacctccaaaatatttaatgcttggtcaacaggcagtaggtggagttcccattcagccttccgtaaggactcagatgtggcttacagagcagctgcggacaaatcctttggaaggtagaaatacagaggattcttacagtttagctccttggcaacagcagcaaattgaagactttcgacaaggaagtgaaacaccaatgcaggttttgactggatcatctcgtcaaagttattcacctggctatcaggatttcagtaagtgggaatcaatgttgaaaataaaagaaggacttctaaggcagaaagaaattgtaatcgatcggcagaagcaacaaattacccacctgcatgagaggataagggataatgaattacgggctcaacatgccatgttaggacattatgtaaattgtgaggattcttatgtggctagtttgcagccacaatatgagaacacttcactccagacaccattttcagaggaatcagtttcccattcccaacaaggggaatttgagcaaaagcttgcatctactgagaaagaagttttacagcttaatgagtttctcaaacaaagactaagcctatttagtgaagagaagaagaaactagaggaaaaacttaaaactagagatcgatacatcagtagtctgaaaaagaaatgccagaaggaatctgaacaaaacaaagaaaagcagagaagaattgagaccttggaaaagtatctggctgatcttccaactctagatgatgtacagagtcagagtctacagctgcagattctggaagaaaaaaataagaatttacaagaggctttgatagatacagaaaaaaaacttgaagagatcaaaaagcagtgtcaagataaagagacacagttaatatgccagaaaaagaaagaaaaggagttagtaactaccgttcagagtttgcaacaaaaagtagaaagatgccttgaagatggaatccgccttcccatgttagatgcaaaacagcttcagaatgaaaatgataatctcagacaacaaaatgagactgctagtaagataatagacagccaacaagatgagattgacagaatgattttagaaattcagtctatgcaaggaaagctttctaaagagaaactgaccactcaaaagatgatggaagagctggaaaagaaagaaagaaatgtacagagattaacaaaagcattgcttgaaaaccaaagacaaacagatgagacatgctctttattggatcagggccaggaacctgaccaatctaggcagcagacagttctttccaaacggccactatttgatttgactgtgattgatcagctgttcaaggaaatgtcctgttgtttgtttgacttgaaagcattgtgtagtattcttaatcagcgtgctcagggcaaggagcctaatctttcattattactgggaataagatcaatgaactgttcagctgaagagactgagaatgaccacagcacagaaacactcactaaaaagctgtcagatgtgtgccagttacgaagagacattgatgaattaaggactacaatatcagaccgctatgctcaggacatgggagacaactgcattactcagtgatcaagtgttagtcccacagcaataatgacctgttgtttaaatgctgctgtgttatggagccataatggaaggttgcaagtgacatgacttgcacttagggattttttttctgtggatttgttttgttgaaggggagaagggaagtgaagagattttgaaggggcttatctaatcaggcaaaaagaaaaaaaatcaaattacctttggaaaatatgataaaatctacaaggaaaaaaatgtctatattctcaaactactgattgtaggaccaagctgtgaagagtacccttcacatgaaggagtaggattccttttaatcctatagctttgtgtgtttgtgtgtgcatgtatgtgtgttgttgtgtgtgtgtgcacgtgctttattcacaaatttataagggtttctagggtcagagcagagcttctgagaaaggcacacgctgtttattcttatatttctttcatatagaagcttgtgttgtactttgggattttcagtggctggctgaacaagagttcaaacagcaggcaagtgttgtcatggtagtacaggaggcaaaaccatttatattttgaacacttactgcactgataggatgttttgtggttgagctgattttagtactgtagataggtcagctgtttttccagagtgattgtggatttcccaagaggtgtgaaattttgacgtgatgctctttttccttagcattgtaatgtatgtgttacaagaaaggttaacataacttgaactaattttaacatgttccttactatttacaattttttatttatatgttttatatatatacatatataaatgtaaacaaagccatatataattaataaaggcattggatcattattataaaaggaagattaacaaagttaccctggaacaatagcttacttatccaaatctcaacatttacattttaacagttttgtatgtttcaaagttgaaactactgtaagagaaagccaatactatttatatctgaatcaacagtagcataaacattttttaattgagattgtattttaatcccttttgttaaagtacattaacaacagtttttcacaggatatgaacttggcgaaattagttcttaatctgaattacagggtattactatgaaatgcagttgattttgcagtagacgtacagtcatttaaacttccaaatgagtgttgtccatgtttctgttggtattttggaaggattatacattttattgccttcagcattgattatgttcttttgaatatacttagttttggcgaaagccttgtcctttgtaagttggtttgatcttgtgatgcaaccaagtctcatttaggtcaagactaaataagagatggaggggtagagggtgtgactcaagcaggataatattgatttgataaagagcatatcacatgcctgttttcttgccagataaagggcatagcacatgcctgttttcttatatactagaataaaggctctcctaggaaagatttttcttaaatatttaaaagtgaaaatgtgagacaaggccttcaaggagactacccaggaagatcacagtttaaaatgttggctatacagctctcaatagattattttatagttatagttgaataatcagttataatacac

SEQ ID NO: 445025 - DNA, 3906 bp, Homo sapiens
tgtgtacaaagcaagagaccaagggagctttgaagaagaacttattgtccttaacaccagcttttcatcttgctttatatcattcaacttcaagtggcacattatcttttaagcctagtcaatcattgattactcttcctactgcccatgtgatgccgtctaattccagcgcttcaatttccaaacttagggaatcattgacaccagatggctcaaaatggagtacaagcctcatgcaaacattgggaaaccacagtaggggggagcaggactcttccctagacatgaaggacttccggccacttcggaaatggtcatctttatccaaactcactgccccggataactgtggccagggtggcactgtatgcagagaagagtcaaggaatggtttggagaagatagggaaggctaaggctttaacatcacaactgaggacaattgggcctagctgtttacatgatagtatggagatgcttaggttagaggacaaggaaataaataaaaaacggtcatcaactctggactgcaagtataaatttgagagctgtagcaaggaggactttagagcctcttcctctactcttaggagacagactgtagacatgacatatagtgccttacctgaaagcaagcccattatgacaagctcagaggcttttgaacctccaaaatatttaatgcttggtcaacaggcagtaggtggagttcccattcagccttccgtaaggactcagatgtggcttacagagcagctgcggacaaatcctttggaaggtagaaatacagaggattcttacagtttagctccttggcaacagcagcaaattgaagactttcgacaaggaagtgaaacaccaatgcaggttttgactggatcatctcgtcaaagttattcacctggctatcaggatttcagtaagtgggaatcaatgttgaaaataaaagaaggacttctaaggcagaaagaaattgtaatcgatcggcagaagcaacaaattacccacctgcatgagaggataagggataatgaattacgggctcaacatgccatgttaggacattatgtaaattgtgaggattcttatgtggctagtttgcagccacaatatgagaacacttcactccagacaccattttcagaggaatcagtttcccattcccaacaaggggaatttgagcaaaagcttgcatctactgagaaagaagttttacagcttaatgagtttctcaaacaaagactaagcctatttagtgaagagaagaagaaactagaggaaaaacttaaaactagagatcgatacatcagtagtctgaaaaagaaatgccagaaggaatctgaacaaaacaaagaaaagcagagaagaattgagaccttggaaaagtatctggctgatcttccaactctagatgatgtacagagtcagagtctacagctgcagattctggaagaaaaaaataagaatttacaagaggctttgatagatacagaaaaaaaacttgaagagatcaaaaagcagtgtcaagataaagagacacagttaatatgccagaaaaagaaagaaaaggagttagtaactaccgttcagagtttgcaacaaaaagtagaaagatgccttgaagatggaatccgccttcccatgttagatgcaaaacagcttcagaatgaaaatgataatctcagacaacaaaatgagactgctagtaagataatagacagccaacaagatgagattgacagaatgattttagaaattcagtctatgcaaggaaagctttctaaagagaaactgaccactcaaaagatgatggaagagctggaaaagaaagaaagaaatgtacagagattaacaaaagcattgcttgaaaaccaaagacaaacagatgagacatgctctttattggatcagggccaggaacctgaccaatctaggcagcagacagttctttccaaacggccactatttgatttgactgtgattgatcagctgttcaaggaaatgtcctgttgtttgtttgacttgaaagcattgtgtagtattcttaatcagcgtgctcagggcaaggagcctaatctttcattattactgggaataagatcaatgaactgttcagctgaagagactgagaatgaccacagcacagaaacactcactaaaaagctgtcagatgtgtgccagttacgaagagacattgatgaattaaggactacaatatcagaccgctatgctcaggacatgggagacaactgcattactcagtgatcaagtgttagtcccacagcaataatgacctgttgtttaaatgctgctgtgttatggagccataatggaaggttgcaagtgacatgacttgcacttagggattttttttctgtggatttgttttgttgaaggggagaagggaagtgaagagattttgaaggggcttatctaatcaggcaaaaagaaaaaaaatcaaattacctttggaaaatatgataaaatctacaaggaaaaaaatgtctatattctcaaactactgattgtaggaccaagctgtgaagagtacccttcacatgaaggagtaggattccttttaatcctatagctttgtgtgtttgtgtgtgcatgtatgtgtgttgttgtgtgtgtgtgcacgtgctttattcacaaatttataagggtttctagggtcagagcagagcttctgagaaaggcacacgctgtttattcttatatttctttcatatagaagcttgtgttgtactttgggattttcagtggctggctgaacaagagttcaaacagcaggcaagtgttgtcatggtagtacaggaggcaaaaccatttatattttgaacacttactgcactgataggatgttttgtggttgagctgattttagtactgtagataggtcagctgtttttccagagtgattgtggatttcccaagaggtgtgaaattttgacgtgatgctctttttccttagcattgtaatgtatgtgttacaagaaaggttaacataacttgaactaattttaacatgttccttactatttacaattttttatttatatgttttatatatatacatatataaatgtaaacaaagccatatataattaataaaggcattggatcattattataaaaggaagattaacaaagttaccctggaacaatagcttacttatccaaatctcaacatttacattttaacagttttgtatgtttcaaagttgaaactactgtaagagaaagccaatactatttatatctgaatcaacagtagcataaacattttttaattgagattgtattttaatcccttttgttaaagtacattaacaacagtttttcacaggatatgaacttggcgaaattagttcttaatctgaattacagggtattactatgaaatgcagttgattttgcagtagacgtacagtcatttaaacttccaaatgagtgttgtccatgtttctgttggtattttggaaggattatacattttattgccttcagcattgattatgttcttttgaatatacttagttttggcgaaagccttgtcctttgtaagttggtttgatcttgtgatgcaaccaagtctcatttaggtcaagactaaataagagatggaggggtagagggtgtgactcaagcaggataatattgatttgataaagagcatatcacatgcctgttttcttgccagataaagggcatagcacatgcctgttttcttatatactagaataaaggctctcctaggaaagatttttcttaaatatttaaaagtgaaaatgtgagacaaggccttcaaggagactacccaggaagatcacagtttaaaatgttggctatacagctctcaatagattattttatagttatagttgaataatcagttataatacac

SEQ ID NO: 445026 - DNA, 2505 bp, Homo sapiens
gccccggctctggctctgccggcggagggggcggagagaacccgcagctgcaacttcgcctggagcctttgagcctgggctcagccggggatctagcagccgtcaccgccgagtcgccgcttccccggcgcgggcctcagcccagccggcttggccatggcaggcgccggcagtgcggcgaatctggcccctgcgctccccgcccgtagctgagcagccgttaaccagccatcccgcctttcctcctgcccgtgtcgccgaggcccacgctccgcgcaagtttccgccgccgaagaagcaggaggacggacgtgaggagtcgggcgtccctggcccacccggccctctcgcccgcgatgtgggggcgcttcctggctccggaggccagcggccgggatagccccggcggagcccgcagcttccctgccggcccagattattcatcagcatggctacctgctaatgaatcattgtggcaggccacaactgttccatctaaccatcgaaataaccatatcaggagacacagtatagcttctgacagtggagacactggcattggaacttcctgttctgatagcgtggaagatcattcaacttcaagtggcacattatcttttaagcctagtcaatcattgattactcttcctactgcccatgtgatgccgtctaattccagcgcttcaatttccaaacttagggaatcattgacaccagatggctcaaaatggagtacaagcctcatgcaaacattgggaaaccacagtaggggggagcaggactcttccctagacatgaaggacttccggccacttcggaaatggtcatctttatccaaactcactgccccggataactgtggccagggtggcactgtatgcagagaagagtcaaggaatggtttggagaagatagggaaggctaaggctttaacatcacaactgaggacaattgggcctagctgtttacatgatagtatggagatgcttaggttagaggacaaggaaataaataaaaaacggtcatcaactctggactgcaagtataaatttgagagctgtagcaaggaggactttagagcctcttcctctactcttaggagacagactgtagacatgacatatagtgccttacctgaaagcaagcccattatgacaagctcagaggcttttgaacctccaaaatatttaatgcttggtcaacaggcagtaggtggagttcccattcagccttccgtaaggactcagatgtggcttacagagcagctgcggacaaatcctttggaaggtagaaatacagaggattcttacagtttagctccttggcaacagcagcaaattgaagactttcgacaaggaagtgaaacaccaatgcaggttttgactggatcatctcgtcaaagttattcacctggctatcaggatttcagtaagtgggaatcaatgttgaaaataaaagaaggacttctaaggcagaaagaaattgtaatcgatcggcagaagcaacaaattacccacctgcatgagaggataagggataatgaattacgggctcaacatgccatgttaggacattatgtaaattgtgaggattcttatgtggctagtttgcagccacaatatgagaacacttcactccagacaccattttcagaggaatcagtttcccattcccaacaaggggaatttgagcaaaagcttgcatctactgagaaagaagttttacagcttaatgagtttctcaaacaaagactaagcctatttagtgaagagaagaagaaactagaggaaaaacttaaaactagagatcgatacatcagtagtctgaaaaagaaatgccagaaggaatctgaacaaaacaaagaaaagcagagaagaattgagaccttggaaaagtatctggctgatcttccaactctagatgatgtacagagtcagagtctacagctgcagattctggaagaaaaaaataagaatttacaagaggctttgatagatacagaaaaaaaacttgaagagatcaaaaagcagtgtcaagataaagagacacagttaatatgccagaaaaagaaagaaaaggagttagtaactaccgttcagagtttgcaacaaaaagtagaaagatgccttgaagatggaatccgccttcccatgttagatgcaaaacagcttcagaatgaaaatgataatctcagacaacaaaatgagactgctagtaagataatagacagccaacaagatgagattgacagaatgattttagaaattcagtctatgcaaggaaagctttctaaagagaaactgaccactcaaaagatgatggaagagctggaaaagaaagaaagaaatgtacagagattaacaaaagcattgcttgaaaaccaaagacaaacagatgagacatgctctttattggatcagggccaggaacatattcacaaggccttcagccaaatattcacaaaaccctcaggagatgtgaaggcaccatctcaaaaggcccttg

SEQ ID NO: 445027 - DNA, 1051 bp, Homo sapiens
  misc_feature (872)..(872): n is a, c, g, or t
  misc_feature (1011)..(1011): n is a, c, g, or t
gccccggctctggctctgccggcggagggggcggagagaacccgcagctgcaacttcgcctggagcctttgagcctgggctcagccggggatctagcagccgtcaccgccgagtcgccgcttccccggcgcgggcctcagcccagccggcttggccatggcaggcgccggcagtgcggcgaatctggcccctgcgctccccgcccgtagctgagcagccgttaaccagccatcccgcctttcctcctgcccgtgtcgccgaggcccacgctccgcgcaagtttccgccgccgaagaagcaggaggacggacgtgaggagtcgggcgtccctggcccacccggccctctcgcccgcgatgtgggggcgcttcctggctccggaggccagcggccgggatagccccggcggagcccgcagcttccctgccggcccagattattcatcagcatggctacctgctaatgaatcattgtggcaggccacaactgttccatctaaccatcgaaataaccatatcaggagacacagtatagcttctgacagtggagacactggcattggaacttcctgttctgatagcgtggaaggtgagctaaaattcttattgtttatatatgaatctttgaagagtggttgtggtacaagaattttcaggggatatgttttattgtttcatactgaaaattatagtgtttgaatatttaataatgttcagtgttgctgtatatcaaataaaattgtccctctaatcgaccgggcgcggtggctctcatgatccacctgcctcggcctcccaaagtgctgggattacaggcgtgagcaccgcgcccggcctagatgctcttcttttaaaattcagggcacttcgctnttctgctgaggtttatgaatgtttaaaaactgctttgcggtccccaaagtaatttgacaagtctgacagctattgattaaaaacccgaaattattcaggctgcaggatgacttggggggatttagatggaaagtttttngttttcttcctctcgccctctggcacccctcctcccccgc

SEQ ID NO: 445028 - DNA, 908 bp, Homo sapiens
gccccggctctggctctgccggcggagggggcggagagaacccgcagctgcaacttcgcctggagcctttgagcctgggctcagccggggatctagcagccgtcaccgccgagtcgccgcttccccggcgcgggcctcagcccagccggcttggccatggcaggcgccggcagtgcggcgaatctggcccctgcgctccccgcccgtagctgagcagccgttaaccagccatcccgcctttcctcctgcccgtgtcgccgaggcccacgctccgcgcaagtttccgccgccgaagaagcaggaggacggacgtgaggagtcgggcgtccctggcccacccggccctctcgcccgcgatgtgggggcgcttcctggctccggaggccagcggccgggatagccccggcggagcccgcagcttccctgccggcccagattattcatcagcatggctacctgctaatgaatcattgtggcaggccacaactgttccatctaaccatcgaaataaccatatcaggagacacagtatagcttctgacagtggagacactggcattggaacttcctgttctgatagcgtggaaggtgagctaaaattcttattgtttatatatgaatctttgaagagtggttgtggtacaagaattttcaggggatatgttttattgtttcatactgaaaattatagtgtttgaatatttaataatgttcagtgttgctgtatatcaaataaaattgtccctctaatcgaccgggcgcggtggctctcatgatccacctgcctcggcctcccaaagtgctgggattacaggcgtgagcaccgcgcccggcctaggattttttgtttcaagacttagggaaacttctttgctgaggtggggatgataaattattaatactcattg

SEQ ID NO: 445029 - DNA, 691 bp, Homo sapiens
gtgtaaacatgtttctgcaggttttgactggatcatctcgtcaaagttattcacctggctatcaggatttcagtaagtgggaatcaatgttgaaaataaaagaaggacttctaaggcagaaagaaattgtaatcgatcggcagaagcaacaaattacccacctgcatgagaggataagggataatgaattacgggctcaacatgccatgttaggacattatgtaaattgtgaggattcttatgtggctagtttgcagccacaatatgagaacacttcactccagacaccattttcagaggaatcagtttcccattcccaacaaggggaatttgagcaaaagcttgcatctactgagaaagaagttttacagcttaatgagtttctcaaacaaagactaagcctatttagtgaagagaagaagaaactagaggaaaaagtaggtttttctaataaagttgaattaggtcaacaacatttcctcagcatataattatttgtctgtcatttaccctgtcaggtgtcatgccaggttatgtatacatttatgtggaggtgattaattttgtagtaacttttgagaagccctctgctgtctgcagaaatccaaggattttctttgaggatagaaatgctcttgtatatctttctaacaaatagtaaaatctttaaaaaattaattgcctacaccaa

SEQ ID NO: 445030 - DNA, 4096 bp, Homo sapiens
gacttctaggaatactgtggtaacaatgaaacataactctggcctaaacccaactgaacatgttctttcataatagctggtaaattaatctgaggccaagcaataaatggcccagattattcatcagcatggctacctgctaatgaatcattgtggcaggccacaactgttccatctaaccatcgaaataaccatatcaggagacacagtatagcttctgacagtggagacactggcattggaacttcctgttctgatagcgtggaagatcattcaacttcaagtggcacattatcttttaagcctagtcaatcattgattactcttcctactgcccatgtgatgccgtctaattccagcgcttcaatttccaaacttagggaatcattgacaccagatggctcaaaatggagtacaagcctcatgcaaacattgggaaaccacagtaggggggagcaggactcttccctagacatgaaggacttccggccacttcggaaatggtcatctttatccaaactcactgccccggataactgtggccagggtggcactgtatgcagagaagagtcaaggaatggtttggagaagatagggaaggctaaggctttaacatcacaactgaggacaattgggcctagctgtttacatgatagtatggagatgcttaggttagaggacaaggaaataaataaaaaacggtcatcaactctggactgcaagtataaatttgagagctgtagcaaggaggactttagagcctcttcctctactcttaggagacagactgtagacatgacatatagtgccttacctgaaagcaagcccattatgacaagctcagaggcttttgaacctccaaaatatttaatgcttggtcaacaggcagtaggtggagttcccattcagccttccgtaaggactcagatgtggcttacagagcagctgcggacaaatcctttggaaggtagaaatacagaggattcttacagtttagctccttggcaacagcagcaaattgaagactttcgacaaggaagtgaaacaccaatgcaggttttgactggatcatctcgtcaaagttattcacctggctatcaggatttcagtaagtgggaatcaatgttgaaaataaaagaaggacttctaaggcagaaagaaattgtaatcgatcggcagaagcaacaaattacccacctgcatgagaggataagggataatgaattacgggctcaacatgccatgttaggacattatgtaaattgtgaggattcttatgtggctagtttgcagccacaatatgagaacacttcactccagacaccattttcagaggaatcagtttcccattcccaacaaggggaatttgagcaaaagcttgcatctactgagaaagaagttttacagcttaatgagtttctcaaacaaagactaagcctatttagtgaagagaagaagaaactagaggaaaaacttaaaactagagatcgatacatcagtagtctgaaaaagaaatgccagaaggaatctgaacaaaacaaagaaaagcagagaagaattgagaccttggaaaagtatctggctgatcttccaactctagatgatgtacagagtcagagtctacagctgcagattctggaagaaaaaaataagaatttacaagaggctttgatagatacagaaaaaaaacttgaagagatcaaaaagcagtgtcaagataaagagacacagttaatatgccagaaaaagaaagaaaaggagttagtaactaccgttcagagtttgcaacaaaaagtagaaagatgccttgaagatggaatccgccttcccatgttagatgcaaaacagcttcagaatgaaaatgataatctcagacaacaaaatgagactgctagtaagataatagacagccaacaagatgagattgacagaatgattttagaaattcagtctatgcaaggaaagctttctaaagagaaactgaccactcaaaagatgatggaagagctggaaaagaaagaaagaaatgtacagagattaacaaaagcattgcttgaaaaccaaagacaaacagatgagacatgctctttattggatcagggccaggaacctgaccaatctaggcagcagacagttctttccaaacggccactatttgatttgactgtgattgatcagctgttcaaggaaatgtcctgttgtttgtttgacttgaaagcattgtgtagtattcttaatcagcgtgctcagggcaaggagcctaatctttcattattactgggaataagatcaatgaactgttcagctgaagagactgagaatgaccacagcacagaaacactcactaaaaagctgtcagatgtgtgccagttacgaagagacattgatgaattaaggactacaatatcagaccgctatgctcaggacatgggagacaactgcattactcagtgatcaagtgttagtcccacagcaataatgacctgttgtttaaatgctgctgtgttatggagccataatggaaggttgcaagtgacatgacttgcacttagggattttttttctgtggatttgttttgttgaaggggagaagggaagtgaagagattttgaaggggcttatctaatcaggcaaaaagaaaaaaaatcaaattacctttggaaaatatgataaaatctacaaggaaaaaaatgtctatattctcaaactactgattgtaggaccaagctgtgaagagtacccttcacatgaaggagtaggattccttttaatcctatagctttgtgtgtttgtgtgtgcatgtatgtgtgttgttgtgtgtgtgtgcacgtgctttattcacaaatttataagggtttctagggtcagagcagagcttctgagaaaggcacacgctgtttattcttatatttctttcatatagaagcttgtgttgtactttgggattttcagtggctggctgaacaagagttcaaacagcaggcaagtgttgtcatggtagtacaggaggcaaaaccatttatattttgaacacttactgcactgataggatgttttgtggttgagctgattttagtactgtagataggtcagctgtttttccagagtgattgtggatttcccaagaggtgtgaaattttgacgtgatgctctttttccttagcattgtaatgtatgtgttacaagaaaggttaacataacttgaactaattttaacatgttccttactatttacaattttttatttatatgttttatatatatacatatataaatgtaaacaaagccatatataattaataaaggcattggatcattattataaaaggaagattaacaaagttaccctggaacaatagcttacttatccaaatctcaacatttacattttaacagttttgtatgtttcaaagttgaaactactgtaagagaaagccaatactatttatatctgaatcaacagtagcataaacattttttaattgagattgtattttaatcccttttgttaaagtacattaacaacagtttttcacaggatatgaacttggcgaaattagttcttaatctgaattacagggtattactatgaaatgcagttgattttgcagtagacgtacagtcatttaaacttccaaatgagtgttgtccatgtttctgttggtattttggaaggattatacattttattgccttcagcattgattatgttcttttgaatatacttagttttggcgaaagccttgtcctttgtaagttggtttgatcttgtgatgcaaccaagtctcatttaggtcaagactaaataagagatggaggggtagagggtgtgactcaagcaggataatattgatttgataaagagcatatcacatgcctgttttcttgccagataaagggcatagcacatgcctgttttcttatatactagaataaaggctctcctaggaaagatttttcttaaatatttaaaagtgaaaatgtgagacaaggccttcaaggagactacccaggaagatcacagtttaaaatgttggctatacagctctcaatagattattttatagttatagttgaataatcagttataatacac

SEQ ID NO: 445031 - DNA, 2047 bp, Homo sapiens
gccccggctctggctctgccggcggagggggcggagagaacccgcagctgcaacttcgcctggagcctttgagcctgggctcagccggggatctagcagccgtcaccgccgagtcgccgcttccccggcgcgggcctcagcccagccggcttggccatggcaggcgccggcagtgcggcgaatctggcccctgcgctccccgcccgtagctgagcagccgttaaccagccatcccgcctttcctcctgcccgtgtcgccgaggcccacgctccgcgcaagtttccgccgccgaagaagcaggaggacggacgtgaggagtcgggcgtccctggcccacccggccctctcgcccgcgatgtgggggcgcttcctggctccggaggccagcggccgggatagccccggcggagcccgcagcttccctgccggcccagattattcatcagcatggctacctgctaatgaatcattgtggcaggccacaactgttccatctaaccatcgaaataaccatatcaggagacacagtatagcttctgacagtggagacactggcattggaacttcctgttctgatagcgtggaagatcattcaacttcaagtggcacattatcttttaagcctagtcaatcattgattactcttcctactgcccatgtgatgccgtctaattccagcgcttcaatttccaaacttagggaatcattgacaccagatggctcaaaatggagtacaagcctcatgcaaacattgggaaaccacagtaggggggagcaggactcttccctagacatgaaggacttccggccacttcggaaatggtcatctttatccaaactcactgccccggataactgtggccagggtggcactgtatgcagagaagagtcaaggaatggtttggagaagatagggaaggctaaggctttaacatcacaactgaggacaattgggcctagctgtttacatgatagtatggagatgcttaggttagaggacaaggaaataaataaaaaacggtcatcaactctggactgcaagtataaatttgagagctgtagcaaggaggactttagagcctcttcctctactcttaggagacagactgtagacatgacatatagtgccttacctgaaagcaagcccattatgacaagctcagaggcttttgaacctccaaaatatttaatgcttggtcaacaggcagtaggtggagttcccattcagccttccgtaaggactcagatgtggcttacagagcagctgcggacaaatcctttggaaggtagaaatacagaggattcttacagtttagctccttggcaacagcagcaaattgaagactttcgacaaggaagtgaaacaccaatgcaggttttgactggatcatctcgtcaaagttattcacctggctatcaggatttcagtaagtgggaatcaatgttgaaaataaaagaaggacttctaaggcagaaagaaattgtaatcgatcggcagaagcaacaaattacccacctgcatgagaggataagggataatgaattacgggctcaacatgccatgttaggacattatgtaaattgtgaggattcttatgtggctagtttgcagccacaatatgagaacacttcactccagacaccattttcagaggaatcagtttcccattcccaacaaggggaatttgagcaaaagcttgcatctactgagaaagaagttttacagcttaatgagtttctcaaacaaagactaagcctatttagtgaagagaagaagaaactagaggaaaaagtaggtttttctaataaagttgaattaggtcaacaacatttcctcagcatataattatttgtctgtcatttaccctgtcaggtgtcatgccaggttatgtatacatttatgtggaggtgattaattttgtagtaacttttgagaagccctctgctgtctgcagaaatccaaggattttctttgaggatagaaatgctcttgtatatctttctaacaaatagtaaaatctttaaaaaattaattgcctacaccaa

SEQ ID NO: 445032 - DNA, 1593 bp, Homo sapiens
gccccggctctggctctgccggcggagggggcggagagaacccgcagctgcaacttcgcctggagcctttgagcctgggctcagccggggatctagcagccgtcaccgccgagtcgccgcttccccggcgcgggcctcagcccagccggcttggccatggcaggcgccggcagtgcggcgaatctggcccctgcgctccccgcccgtagctgagcagccgttaaccagccatcccgcctttcctcctgcccgtgtcgccgaggcccacgctccgcgcaagtttccgccgccgaagaagcaggaggacggacgtgaggagtcgggcgtccctggcccacccggccctctcgcccgcgatgtgggggcgcttcctggctccggaggccagcggccgggatagccccggcggagcccgcagcttccctgccggcccagattattcatcagcatggctacctgctaatgaatcattgtggcaggccacaactgttccatctaaccatcgaaataaccatatcaggagacacagtatagcttctgacagtggagacactggcattggaacttcctgttctgatagcgtggaagatcattcaacttcaagtggcacattatcttttaagcctagtcaatcattgattactcttcctactgcccatgtgatgccgtctaattccagcgcttcaatttccaaacttagggaatcattgacaccagatggctcaaaatggagtacaagcctcatgcaaacattgggaaaccacagtaggggggagcaggactcttccctagacatgaaggacttccggccacttcggaaatggtcatctttatccaaactcactgccccggataactgtggccagggtggcactgtatgcagagaagagtcaaggaatggtttggagaagatagggaaggctaaggctttaacatcacaactgaggacaattgggcctagctgtttacatgatagtatggagatgcttaggttagaggacaaggaaataaataaaaaacggtcatcaactctggactgcaagtataaatttgagagctgtagcaaggaggactttagagcctcttcctctactcttaggagacagactgtagacatgacatatagtgccttacctgaaagcaagcccattatgacaagctcagaggcttttgaacctccaaaatatttaatgcttggtcaacaggcagtaggtggagttcccattcagccttccgtaaggactcagatgtggcttacagagcagctgcggacaaatcctttggaaggtagaaatacagaggattcttacagtttagctccttggcaacagcagcaaattgaagactttcgacaaggaagtgaaacaccaatgcaggtaaggtgcaaaatctagtgtttgcttccctccagtggatgttatgagtacagtagcacacttacagtaagcatataacaagtgttcacagattgttttgcatttccttttccctgcaagttaataggcagaaatgttacaaaccgaaaagtgttgttgataaacttgcaaagcatttgagactaattaacatgaaaatctgaaaaccttgtaccta

SEQ ID NO: 445033 - DNA, 936 bp, Homo sapiens
agaagtcacaaggtcgtttactaaacggaaactaagaaaaagaaaagccacatcagccggcacaagcctctctaacttgtgtgccctgaggctcatcagatgcgaagtcctggcgacaagatagggtcgcccgcagtggcttcctaaagcgcagatccaggccggctcccagcgtggaatccgacccatgtacttcgcctctccacgtggcatcagatgctctgccggctgtcaccgtgaactccagccctcgcggagccgacactgacctggctacttcagagttcggagggaaatagcgtctccgtaccctcgccccacctgggctgctcctcggaccgccgctcgtcccagactccaggaggcgccaccaggcctcgctgaccccgctccatatctccgggagccctcagctggtcggccgcggcgaccggaagctccggactgaggtactggttccgcccgccgctcttccagccgagactcggcagcggcggtcggagcggctgccacgccgcacctgcccgcgagggggcgcgccaggcccaggccgcagccgactgccgcgctctctgtccccgccctccgccatccccggactgcgctcacctgtctgggccgctggcctgggaggcgggggccggcgggagccaagccgaggaaagggcggagcggctctccgggcgcgtcatcggagcaccatggcggagctaggagctggcggcgacggccacaggggcggcgacggcgcagtgcgaagcgaaacaggtgaccgcacagcggggatagtgggggtcccgtcgggcaggggacggcgagcggggccggcgggctggcaccgaaatcacccggcgccggcagccccctccccgcccgcgcggccgcggcccggaacaaccggccctgcgcgccgcgcaccctgctccgagagcgcct

SEQ ID NO: 445034 - DNA, 472 bp, Homo sapiens
tgaggatacaagagaaatgaatgtttaaacccctaaccgagaaaagtacaatctgtgtatgccacttggaaaaatgaaggctgtggcctaagctgatgtaaagaaaagaacatatgtttcctatgagtaacagaattcacttaaatataagactgtgaatcctaacagaattgcctattcttatataagtgtatataacagtatagtaagttttagaaatttaaggtattactatggtattcttgaaataagattttagataaatgtcatattaatcttgttctttttctgtctcttcatgtagaagttatatgagtgtttcttctgaagaaccaaagctgaaatttaatgagaatttctacaattaatggaattcctttcctgctataaaggagcatcccctccacccgttttctagagttcttgaccatcattttgaaaagatttattaaaactagctaaagacaacaga

SEQ ID NO: 445035 - DNA, 241 bp, Homo sapiens
gactccatctcaaaaaaaaaaaaaaaagtgcatattgtatttttccaaaataacagaccattttaaataatctatttcatcagttaaatatgccaggctggctttttttctgtgtctaatcttcttgctcaattcttcctttcctatagcgacttgaggagattatgaaaagaaccaggagaacagaagctacagataaggtattgacatggccgttttctaactacttttgtatgctttt

SEQ ID NO: 445036 - DNA, 4484 bp, Homo sapiens
agaagtcacaaggtcgtttactaaacggaaactaagaaaaagaaaagccacatcagccggcacaagcctctctaacttgtgtgccctgaggctcatcagatgcgaagtcctggcgacaagatagggtcgcccgcagtggcttcctaaagcgcagatccaggccggctcccagcgtggaatccgacccatgtacttcgcctctccacgtggcatcagatgctctgccggctgtcaccgtgaactccagccctcgcggagccgacactgacctggctacttcagagttcggagggaaatagcgtctccgtaccctcgccccacctgggctgctcctcggaccgccgctcgtcccagactccaggaggcgccaccaggcctcgctgaccccgctccatatctccgggagccctcagctggtcggccgcggcgaccggaagctccggactgaggtactggttccgcccgccgctcttccagccgagactcggcagcggcggtcggagcggctgccacgccgcacctgcccgcgagggggcgcgccaggcccaggccgcagccgactgccgcgctctctgtccccgccctccgccatccccggactgcgctcacctgtctgggccgctggcctgggaggcgggggccggcgggagccaagccgaggaaagggcggagcggctctccgggcgcgtcatcggagcaccatggcggagctaggagctggcggcgacggccacaggggcggcgacggcgcagtgcgaagcgaaacagcacccgacagctacaaagtgcaagataagaaaaatgcctccagccgccctgcctctgcaatttcaggacaaaataacaaccactcaggaaataaaccagaccctccgcctgtgttacgtgttgatgaccggcagcggctggcccgggagcgacgtgaggaacgggagaaacagctagctgcaagagaaatagtgtggttagaaagagaagagcgagccaggcagcactacgagaagcacctggaagagcggaagaagaggttggaggagcagaggcagaaggaggagcggaggagggctgctgtggaggagaagcggaggcagagacttgaggaggacaaagaacgccacgaagctgttgtacggcgcacaatggaaaggagccagaagccaaaacagaagcataaccgttggtcgtggggaggctctctccatgggagccctagcatccacagtgcagctcgccgcctgcagctcagcccatgggagagcagcgttgttaacagactcctgacgcccacacattcgttcctggccagaagtaaaagcacagctgccttgtctggagaagcagcatcttgcagccccatcatcatgccctacaaagctgcacactctagaaattcgatggatcgaccaaaactctttgtaacaccacctgagggctcttctcgcaggaggatcattcatggcacagcgagctataaaaaagaaagagagagagaaaatgtactcttcctcacatctggcacccgaagggctgtatctccatctaatcccaaagcaagacaaccagctcgctcccgactttggcttccgtccaagtctcttcctcatttgcctggcacacccagaccgacatcctccttgccacccggctcagtcaaagctgctcctgctcaggtccggcccccatcccccggcaacatccgccctgtcaagagggaagtcaaagtggagcctgagaagaaagatcctgagaaggaacctcagaaagttgccaatgagccctcactaaagggcagagcacctttagtgaaggtagaagaagccacagttgaagagcggacacctgctgaaccagaagttggccctgctgctccagccatggccccagctccagcctcggccccagctccagcctcggccccagctccagccccggtccccaccccagccatggtctcagccccgtcatccactgtgaatgccagtgcttctgttaagacttctgcaggcaccaccgacccagaggaggccacaaggcttctagctgagaagaggcggctggcccgagagcagagagaaaaggaagaaagggagaggagggagcaggaagagcttgaaagacaaaagagagaggaattggctcaacgtgtggctgaagagaggacgactcgccgtgaggaggagtcgcgcaggctggaagccgagcaggcccgggagaaggaggagcagctgcagcggcaggcggaggagcgggcgctgcgcgagcgggaggaggcagagcgcgcccagaggcagaaagaagaagaagctcgcgttcgtgaagaagcagagagggtccggcaggaacgagagaagcatttccagagagaagagcaagagcgcctggagagaaagaagcgacttgaggagattatgaaaagaaccaggagaacagaagctacagataagaaaaccagtgatcagagaaacggtgatatagccaagggagctctcactggaggaacagaggtgtctgcacttccatgtacaacaaacgctccgggaaatggaaagccagttggcagcccacatgtggttacctcacaccagtcaaaagtgacagtggagagcactcccgatttggaaaaacaaccaaatgaaaatggtgtatctgttcagaatgaaaattttgaagaaattataaacttacccattggatctaaaccatccagattagatgtcaccaacagtgagagcccagaaattcctttgaatccaattttggcctttgatgatgaagggacacttgggcccctgcctcaggtagatggtgttcagacacagcagactgcagaagttatatgagtgtttcttctgaagaaccaaagctgaaatttaatgagaatttctacaattaatggaattcctttcctgctataaaggagcatcccctccacccgttttctagagttcttgaccatcattttgaaaagatttattaaaactagctaaagacaacagactggatagcttttctaataattttcatcaataggaaaaaagaaatacgtctcattcttcaatactttaaaatggctttttccagtgtgctccttcttagcaatcaatatttttctgcattctttaaaagacaagagaatttggttataaaagaaatgggctgactaggcatgatttttttggtcttaaaagcttaacatgtaaaattggcaaaaaaaattttttaccttttataatacttgaaaaataagtacctctttgttctacaagtagaatgaataggagaagagtttaagcctgtttttttaaaatattattgcaaagagctctatttgtagaagcaaattataggcagattaccaggttcttataaatacagcttgtacatggacattctgcaaacccagctgtcacatttttcttgcaactccttttgcaaaagcagactaaaatgttttaaaatgtgaaaaaacattattttttcaaagcaagaaaataatttactgccctcttacataatgtatttataaagtttttccagataaactaatcaaataaattagaataatgtgacaacattacaaatttaatttgttagctgcattccttctgatgttaccacgatagaatgttactgatgattcagggctatttctgaagtctgtatgttgctgctgtccccagtgatggtggacttatctttgccttacctgatcacaaattatgttggggaaaataaagatttaatatttctttaaatagaaaaagaatttggttttgctcgtttaagagcaatgagaaaatgatggaatgttgactgtgtttggcacacaggacacggaccttcatggaagtccttgctctgcgtggcatctgtcagcttttcacctttcattcttattcttcacttttgctgctgagcctagctgtacaaacttgcactttcatttgctaatataaattcagttttattttaccattttagagactactaatgattaaatgtagaaggagagggtgcacatgtttttatgtggagtgtttaaaagataaatttataccactgtaatgtgcagcttttattaaaagagaaattggttgaactgctaggttgaatgagagacttcatctattggactattttttttaatccaggcatatggtctttagtaatggcttgtaatttgtgaaaacattaatttgggggttttccctgttttcagttgtccatgtacacatagtcattatattagaaaagaaagctgttcaacaaacttgtttaatttgtttaaatcaacatagcatgaaacaccaaataaaatgtttgacatagttttaaaaaaaaaaaaaaaaaaaaaaaaaaaaaaaaaaaaaattttaaggagaaggaaaaaaaaaaaaagaaaaaaaagagagggaaaaaaaaagagagagaagaaaagaaaaaaaaggagagggaggagaaaaaggggaggaggaaaaaaaggg

SEQ ID NO: 445037 - DNA, 3893 bp, Homo sapiens
  misc_feature (30)..(30): n is a, c, g, or t
  misc_feature (50)..(50): n is a, c, g, or t
tcgcttcgcactgcgccgtcgccgcccctntggccgtcgccgccagctcntagctccgccatggtgcacccgacagctacaaagtgcaagataagaaaaatgcctccagccgccctgcctctgcaatttcaggacaaaataacaaccactcaggaaataaaccagaccctccgcctgtgttacgtgttgatgaccggcagcggctggcccgggagcgacgtgaggaacgggagaaacagctagctgcaagagaaatagtgtggttagaaagagaagagcgagccaggcagcactacgagaagcacctggaagagcggaagaagaggttggaggagcagaggcagaaggaggagcggaggagggctgctgtggaggagaagcggaggcagagacttgaggaggacaaagaacgccacgaagctgttgtacggcgcacaatggaaaggagccagaagccaaaacagaagcataaccgttggtcgtggggaggctctctccatgggagccctagcatccacagtgcagatccagacaggcggtcagtttccaccatgaatctttcgaaatatgttgatcccgtcattagcaagcggctctcctcttcatctgcaactttactaaattctccagatagagctcgccgcctgcagctcagcccatgggagagcagcgttgttaacagactcctgacgcccacacattcgttcctggccagaagtaaaagcacagctgccttgtctggagaagcagcatcttgcagccccatcatcatgccctacaaagctgcacactctagaaattcgatggatcgaccaaaactctttgtaacaccacctgagggctcttctcgcaggaggatcattcatggcacagcgagctataaaaaagaaagagagagagaaaatgtactcttcctcacatctggcacccgaagggctgtatctccatctaatcccaaagcaagacaaccagctcgctcccgactttggcttccgtccaagtctcttcctcatttgcctggcacacccagaccgacatcctccttgccacccggctcagtcaaagctgctcctgctcaggtccggcccccatcccccggcaacatccgccctgtcaagagggaagtcaaagtggagcctgagaagaaagatcctgagaaggaacctcagaaagttgccaatgagccctcactaaagggcagagcacctttagtgaaggtagaagaagccacagttgaagagcggacacctgctgaaccagaagttggccctgctgctccagccatggccccagctccagcctcggccccagctccagcctcggccccagctccagccccggtccccaccccagccatggtctcagccccgtcatccactgtgaatgccagtgcttctgttaagacttctgcaggcaccaccgacccagaggaggccacaaggcttctagctgagaagaggcggctggcccgagagcagagagaaaaggaagaaagggagaggagggagcaggaagagcttgaaagacaaaagagagaggaattggctcaacgtgtggctgaagagaggacgactcgccgtgaggaggagtcgcgcaggctggaagccgagcaggcccgggagaaggaggagcagctgcagcggcaggcggaggagcgggcgctgcgcgagcgggaggaggcagagcgcgcccagaggcagaaagaagaagaagctcgcgttcgtgaagaagcagagagggtccggcaggaacgagagaagcatttccagagagaagagcaagagcgcctggagagaaagaagcgacttgaggagattatgaaaagaaccaggagaacagaagctacagataagaaaaccagtgatcagagaaacggtgatatagccaagggagctctcactggaggaacagaggtgtctgcacttccatgtacaacaaacgctccgggaaatggaaagccagttggcagcccacatgtggttacctcacaccagtcaaaagtgacagtggagagcactcccgatttggaaaaacaaccaaatgaaaatggtgtatctgttcagaatgaaaattttgaagaaattataaacttacccattggatctaaaccatccagattagatgtcaccaacagtgagagcccagaaattcctttgaatccaattttggcctttgatgatgaagggacacttgggcccctgcctcaggtagatggtgttcagacacagcagactgcagaagttatatgagtgtttcttctgaagaaccaaagctgaaatttaatgagaatttctacaattaatggaattcctttcctgctataaaggagcatcccctccacccgttttctagagttcttgaccatcattttgaaaagatttattaaaactagctaaagacaacagactggatagcttttctaataattttcatcaataggaaaaaagaaatacgtctcattcttcaatactttaaaatggctttttccagtgtgctccttcttagcaatcaatatttttctgcattctttaaaagacaagagaatttggttataaaagaaatgggctgactaggcatgatttttttggtcttaaaagcttaacatgtaaaattggcaaaaaaaattttttaccttttataatacttgaaaaataagtacctctttgttctacaagtagaatgaataggagaagagtttaagcctgtttttttaaaatattattgcaaagagctctatttgtagaagcaaattataggcagattaccaggttcttataaatacagcttgtacatggacattctgcaaacccagctgtcacatttttcttgcaactccttttgcaaaagcagactaaaatgttttaaaatgtgaaaaaacattattttttcaaagcaagaaaataatttactgccctcttacataatgtatttataaagtttttccagataaactaatcaaataaattagaataatgtgacaacattacaaatttaatttgttagctgcattccttctgatgttaccacgatagaatgttactgatgattcagggctatttctgaagtctgtatgttgctgctgtccccagtgatggtggacttatctttgccttacctgatcacaaattatgttggggaaaataaagatttaatatttctttaaatagaaaaagaatttggttttgctcgtttaagagcaatgagaaaatgatggaatgttgactgtgtttggcacacaggacacggaccttcatggaagtccttgctctgcgtggcatctgtcagcttttcacctttcattcttattcttcacttttgctgctgagcctagctgtacaaacttgcactttcatttgctaatataaattcagttttattttaccattttagagactactaatgattaaatgtagaaggagagggtgcacatgtttttatgtggagtgtttaaaagataaatttataccactgtaatgtgcagcttttattaaaagagaaattggttgaactgctaggttgaatgagagacttcatctattggactattttttttaatccaggcatatggtctttagtaatggcttgtaatttgtgaaaacattaatttgggggttttccctgttttcagttgtccatgtacacatagtcattatattagaaaagaaagctgttcaacaaacttgtttaatttgtttaaatcaacatagcatgaaacaccaaataaaatgtttgacatagttttaaaaaaaaaaaaaaaaaaaaaaaaaaaaaaaaaaaaaattttaaggagaaggaaaaaaaaaaaaagaaaaaaaagagagggaaaaaaaaagagagagaagaaaagaaaaaaaaggagagggaggagaaaaaggggaggaggaaaaaaaggg

SEQ ID NO: 445038 - DNA, 2397 bp, Homo sapiens
gcggccgcaccccaccctggccccggccccagtcccgcagggagacgccccagcccagcagaggagggtgcggactggactgctggtgctcccgctttccacaccttctccatccgccacctcgcccccacctctgggcaccccctgggagacccgggcagcccgcctgtttgtcagaggcagacgccgaccttctgttttcagaaagaagaagaagctcgcgttcgtgaagaagcagagagggtccggcaggaacgagagaagcatttccagagagaagagcaagagcgcctggagagaaagaagcgacttgaggagattatgaaaagaaccaggagaacagaagctacagataagaaaaccagtgatcagagaaacggtgatatagccaagggagctctcactggaggaacagaggtgtctgcacttccatgtacaacaaacgctccgggaaatggaaagccagttggcagcccacatgtggttacctcacaccagtcaaaagtgacagtggagagcactcccgatttggaaaaacaaccaaatgaaaatggtgtatctgttcagaatgaaaattttgaagaaattataaacttacccattggatctaaaccatccagattagatgtcaccaacagtgagagcccagaaattcctttgaatccaattttggcctttgatgatgaagggacacttgggcccctgcctcaggtagatggtgttcagacacagcagactgcagaagttatatgagtgtttcttctgaagaaccaaagctgaaatttaatgagaatttctacaattaatggaattcctttcctgctataaaggagcatcccctccacccgttttctagagttcttgaccatcattttgaaaagatttattaaaactagctaaagacaacagactggatagcttttctaataattttcatcaataggaaaaaagaaatacgtctcattcttcaatactttaaaatggctttttccagtgtgctccttcttagcaatcaatatttttctgcattctttaaaagacaagagaatttggttataaaagaaatgggctgactaggcatgatttttttggtcttaaaagcttaacatgtaaaattggcaaaaaaaattttttaccttttataatacttgaaaaataagtacctctttgttctacaagtagaatgaataggagaagagtttaagcctgtttttttaaaatattattgcaaagagctctatttgtagaagcaaattataggcagattaccaggttcttataaatacagcttgtacatggacattctgcaaacccagctgtcacatttttcttgcaactccttttgcaaaagcagactaaaatgttttaaaatgtgaaaaaacattattttttcaaagcaagaaaataatttactgccctcttacataatgtatttataaagtttttccagataaactaatcaaataaattagaataatgtgacaacattacaaatttaatttgttagctgcattccttctgatgttaccacgatagaatgttactgatgattcagggctatttctgaagtctgtatgttgctgctgtccccagtgatggtggacttatctttgccttacctgatcacaaattatgttggggaaaataaagatttaatatttctttaaatagaaaaagaatttggttttgctcgtttaagagcaatgagaaaatgatggaatgttgactgtgtttggcacacaggacacggaccttcatggaagtccttgctctgcgtggcatctgtcagcttttcacctttcattcttattcttcacttttgctgctgagcctagctgtacaaacttgcactttcatttgctaatataaattcagttttattttaccattttagagactactaatgattaaatgtagaaggagagggtgcacatgtttttatgtggagtgtttaaaagataaatttataccactgtaatgtgcagcttttattaaaagagaaattggttgaactgctaggttgaatgagagacttcatctattggactattttttttaatccaggcatatggtctttagtaatggcttgtaatttgtgaaaacattaatttgggggttttccctgttttcagttgtccatgtacacatagtcattatattagaaaagaaagctgttcaacaaacttgtttaatttgtttaaatcaacatagcatgaaacaccaaataaaatgtttgacatagttttaaaaaaaaaaaaaaaaaaaaaaaaaaaaaaaaaaaaaattttaaggagaaggaaaaaaaaaaaaagaaaaaaaagagagggaaaaaaaaagagagagaagaaaagaaaaaaaaggagagggaggagaaaaaggggaggaggaaaaaaaggg

SEQ ID NO: 445039 - DNA, 1959 bp, Homo sapiens
tgaggatacaagagaaatgaatgtttaaacccctaaccgagaaaagtacaatctgtgtatgccacttggaaaaatgaaggctgtggcctaagctgatgtaaagaaaagaacatatgtttcctatgagtaacagaattcacttaaatataagactgtgaatcctaacagaattgcctattcttatataagtgtatataacagtatagtaagttttagaaatttaaggtattactatggtattcttgaaataagattttagataaatgtcatattaatcttgttctttttctgtctcttcatgtagaagttatatgagtgtttcttctgaagaaccaaagctgaaatttaatgagaatttctacaattaatggaattcctttcctgctataaaggagcatcccctccacccgttttctagagttcttgaccatcattttgaaaagatttattaaaactagctaaagacaacagactggatagcttttctaataattttcatcaataggaaaaaagaaatacgtctcattcttcaatactttaaaatggctttttccagtgtgctccttcttagcaatcaatatttttctgcattctttaaaagacaagagaatttggttataaaagaaatgggctgactaggcatgatttttttggtcttaaaagcttaacatgtaaaattggcaaaaaaaattttttaccttttataatacttgaaaaataagtacctctttgttctacaagtagaatgaataggagaagagtttaagcctgtttttttaaaatattattgcaaagagctctatttgtagaagcaaattataggcagattaccaggttcttataaatacagcttgtacatggacattctgcaaacccagctgtcacatttttcttgcaactccttttgcaaaagcagactaaaatgttttaaaatgtgaaaaaacattattttttcaaagcaagaaaataatttactgccctcttacataatgtatttataaagtttttccagataaactaatcaaataaattagaataatgtgacaacattacaaatttaatttgttagctgcattccttctgatgttaccacgatagaatgttactgatgattcagggctatttctgaagtctgtatgttgctgctgtccccagtgatggtggacttatctttgccttacctgatcacaaattatgttggggaaaataaagatttaatatttctttaaatagaaaaagaatttggttttgctcgtttaagagcaatgagaaaatgatggaatgttgactgtgtttggcacacaggacacggaccttcatggaagtccttgctctgcgtggcatctgtcagcttttcacctttcattcttattcttcacttttgctgctgagcctagctgtacaaacttgcactttcatttgctaatataaattcagttttattttaccattttagagactactaatgattaaatgtagaaggagagggtgcacatgtttttatgtggagtgtttaaaagataaatttataccactgtaatgtgcagcttttattaaaagagaaattggttgaactgctaggttgaatgagagacttcatctattggactattttttttaatccaggcatatggtctttagtaatggcttgtaatttgtgaaaacattaatttgggggttttccctgttttcagttgtccatgtacacatagtcattatattagaaaagaaagctgttcaacaaacttgtttaatttgtttaaatcaacatagcatgaaacaccaaataaaatgtttgacatagttttaaaaaaaaaaaaaaaaaaaaaaaaaaaaaaaaaaaaaattttaaggagaaggaaaaaaaaaaaaagaaaaaaaagagagggaaaaaaaaagagagagaagaaaagaaaaaaaaggagagggaggagaaaaaggggaggaggaaaaaaaggg

SEQ ID NO: 445040 - DNA, 3250 bp, Homo sapiens
  misc_feature (3206)..(3206): n is a, c, g, or t
agaagtcacaaggtcgtttactaaacggaaactaagaaaaagaaaagccacatcagccggcacaagcctctctaacttgtgtgccctgaggctcatcagatgcgaagtcctggcgacaagatagggtcgcccgcagtggcttcctaaagcgcagatccaggccggctcccagcgtggaatccgacccatgtacttcgcctctccacgtggcatcagatgctctgccggctgtcaccgtgaactccagccctcgcggagccgacactgacctggctacttcagagttcggagggaaatagcgtctccgtaccctcgccccacctgggctgctcctcggaccgccgctcgtcccagactccaggaggcgccaccaggcctcgctgaccccgctccatatctccgggagccctcagctggtcggccgcggcgaccggaagctccggactgaggtactggttccgcccgccgctcttccagccgagactcggcagcggcggtcggagcggctgccacgccgcacctgcccgcgagggggcgcgccaggcccaggccgcagccgactgccgcgctctctgtccccgccctccgccatccccggactgcgctcacctgtctgggccgctggcctgggaggcgggggccggcgggagccaagccgaggaaagggcggagcggctctccgggcgcgtcatcggagcaccatggcggagctaggagctggcggcgacggccacaggggcggcgacggcgcagtgcgaagcgaaacagcacccgacagctacaaagtgcaagataagaaaaatgcctccagccgccctgcctctgcaatttcaggacaaaataacaaccactcaggaaataaaccagaccctccgcctgtgttacgtgttgatgaccggcagcggctggcccgggagcgacgtgaggaacgggagaaacagctagctgcaagagaaatagtgtggttagaaagagaagagcgagccaggcagcactacgagaagcacctggaagagcggaagaagaggttggaggagcagaggcagaaggaggagcggaggagggctgctgtggaggagaagcggaggcagagacttgaggaggacaaagaacgccacgaagctgttgtacggcgcacaatggaaaggagccagaagccaaaacagaagcataaccgttggtcgtggggaggctctctccatgggagccctagcatccacagtgcagctcgccgcctgcagctcagcccatgggagagcagcgttgttaacagactcctgacgcccacacattcgttcctggccagaagtaaaagcacagctgccttgtctggagaagcagcatcttgcagccccatcatcatgccctacaaagctgcacactctagaaattcgatggatcgaccaaaactctttgtaacaccacctgagggctcttctcgcaggaggatcattcatggcacagcgagctataaaaaagaaagagagagagaaaatgtactcttcctcacatctggcacccgaagggctgtatctccatctaatcccaaagcaagacaaccagctcgctcccgactttggcttccgtccaagtctcttcctcatttgcctggcacacccagaccgacatcctccttgccacccggctcagtcaaagctgctcctgctcaggtccggcccccatcccccggcaacatccgccctgtcaagagggaagtcaaagtggagcctgagaagaaagatcctgagaaggaacctcagaaagttgccaatgagccctcactaaagggcagagcacctttagtgaaggtagaagaagccacagttgaagagcggacacctgctgaaccagaagttggccctgctgctccagccatggccccagctccagcctcggccccagctccagcctcggccccagctccagccccggtccccaccccagccatggtctcagccccgtcatccactgtgaatgccagtgcttctgttaagacttctgcaggcaccaccgacccagaggaggccacaaggcttctagctgagaagaggcggctggcccgagagcagagagaaaaggaagaaagggagaggagggagcaggaagagcttgaaagacaaaagagagaggaattggctcaacgtgtggctgaagagaggacgactcgccgtgaggaggagtcgcgcaggctggaagccgagcaggcccgggagaaggaggagcagctgcagcggcaggcggaggagcgggcgctgcgcgagcgggaggaggcagagcgcgcccagaggcagaaagaagaagaagctcgcgttcgtgaagaagcagagagggtccggcaggaacgagagaagcatttccagagagaagagcaagagcgcctggagagaaagaagcgacttgaggagattatgaaaagaaccaggagaacagaagctacagataagaaaaccagtgatcagagaaacggtgatatagccaagggagctctcactggaggaacagaggtgtctgcacttccatgtacaacaaacgctccgggaaatggaaagccagttggcagcccacatgtggttacctcacaccagtcaaaagtgacagtggagagcactcccgatttggaaaaacaaccaaatgaaaatggtgtatctgttcagaatgaaaattttgaagaaattataaacttacccattggatctaaaccatccagattagatgtcaccaacagtgagagcccagaaattcctttgaatccaattttggcctttgatgatgaagggacacttgggcccctgcctcaggtagatggtgttcagacacagcagactgcagaagttatatgagtgtttcttctgaagaaccaaagctgaaatttaatgagaatttctacaattaatggaattcctttcctgctataaaggagcatcccctccacccgttttctagagttcttgaccatcattttgaaaagatttattaaaactagctaaagacaacagactggatagcttttctaataattttcatcaataggaaaaaagaaatacgtctcattcttcaatactttaaaatggctttttccagtgtgctccttcttagcaatcaatatttttctgcattctttaaaagacaagagaatttggttataaaagaaatgggctgactaggcatgatcactttgcccgtcgggggcgggcgtgtaaaattancaaaaaataaataataagttgacgcggccccgaatttattatta

SEQ ID NO: 445041 - DNA, 2720 bp, Homo sapiens
agaagtcacaaggtcgtttactaaacggaaactaagaaaaagaaaagccacatcagccggcacaagcctctctaacttgtgtgccctgaggctcatcagatgcgaagtcctggcgacaagatagggtcgcccgcagtggcttcctaaagcgcagatccaggccggctcccagcgtggaatccgacccatgtacttcgcctctccacgtggcatcagatgctctgccggctgtcaccgtgaactccagccctcgcggagccgacactgacctggctacttcagagttcggagggaaatagcgtctccgtaccctcgccccacctgggctgctcctcggaccgccgctcgtcccagactccaggaggcgccaccaggcctcgctgaccccgctccatatctccgggagccctcagctggtcggccgcggcgaccggaagctccggactgaggtactggttccgcccgccgctcttccagccgagactcggcagcggcggtcggagcggctgccacgccgcacctgcccgcgagggggcgcgccaggcccaggccgcagccgactgccgcgctctctgtccccgccctccgccatccccggactgcgctcacctgtctgggccgctggcctgggaggcgggggccggcgggagccaagccgaggaaagggcggagcggctctccgggcgcgtcatcggagcaccatggcggagctaggagctggcggcgacggccacaggggcggcgacggcgcagtgcgaagcgaaacagcacccgacagctacaaagtgcaagataagaaaaatgcctccagccgccctgcctctgcaatttcaggacaaaataacaaccactcaggaaataaaccagaccctccgcctgtgttacgtgttgatgaccggcagcggctggcccgggagcgacgtgaggaacgggagaaacagctagctgcaagagaaatagtgtggttagaaagagaagagcgagccaggcagcactacgagaagcacctggaagagcggaagaagaggttggaggagcagaggcagaaggaggagcggaggagggctgctgtggaggagaagcggaggcagagacttgaggaggacaaagaacgccacgaagctgttgtacggcgcacaatggaaaggagccagaagccaaaacagaagcataaccgttggtcgtggggaggctctctccatgggagccctagcatccacagtgcagatccagacaggcggtcagtttccaccatgaatctttcgaaatatgttgatcccgtcattagcaagcggctctcctcttcatctgcaactttactaaattctccagatagagctcgccgcctgcagctcagcccatgggagagcagcgttgttaacagactcctgacgcccacacattcgttcctggccagaagtaaaagcacagctgccttgtctggagaagcagcatcttgcagccccatcatcatgccctacaaagctgcacactctagaaattcgatggatcgaccaaaactctttgtaacaccacctgagggctcttctcgcaggaggatcattcatggcacagcgagctataaaaaagaaagagagagagaaaatgtactcttcctcacatctggcacccgaagggctgtatctccatctaatcccaaagcaagacaaccagctcgctcccgactttggcttccgtccaagtctcttcctcatttgcctggcacacccagaccgacatcctccttgccacccggctcagtcaaagctgctcctgctcaggtccggcccccatcccccggcaacatccgccctgtcaagagggaagtcaaagtggagcctgagaagaaagatcctgagaaggaacctcagaaagttgccaatgagccctcactaaagggcagagcacctttagtgaaggtagaagaagccacagttgaagagcggacacctgctgaaccagaagttggccctgctgctccagccatggccccagctccagcctcggccccagctccagcctcggccccagctccagccccggtccccaccccagccatggtctcagccccgtcatccactgtgaatgccagtgcttctgttaagacttctgcaggcaccaccgacccagaggaggccacaaggcttctagctgagaagaggcggctggcccgagagcagagagaaaaggaagaaagggagaggagggagcaggaagagcttgaaagacaaaagagagaggaattggctcaacgtgtggctgaagagaggacgactcgccgtgaggaggagtcgcgcaggctggaagccgagcaggcccgggagaaggaggagcagctgcagcggcaggcggaggagcgggcgctgcgcgagcgggaggaggcagagcgcgcccagaggcagaaagaagaagaagctcgcgttcgtgaagaagcagagagggtccggcaggaacgagagaagcatttccagagagaagagcaagagcgcctggagagaaagaaggtagctgcgtcttagtagagaggcccgggacgcgaacttgcacctctaagacccagagactagccctggccgtcagaaaacgcgtgttctacccttgccacataaactagtagccccctcagtgataacaatctcctgcaaagaaatctctctcggtgttttagccgtcaccaaaaaacacttacttccacttcatgtagcttaaggcagttccaa

SEQ ID NO: 445042 - DNA, 508 bp, Homo sapiens
gaccattttaaataatctatttcatcagttaaatatgccaggctggctttttttctgtgtctaatcttcttgctcaattcttcctttcctatagcgacttgaggagattatgaaaagaaccaggagaacagaagctacagataaggtattgacatggccgttttctaactacttttgtatgcttttatctttttcattttcacttgtaactctaatttttaaaagtcctctttttttcttcttcgtagaaaaccagtgatcagagaaacggtgatatagccaagggagctctcactggaggaacaggtatttctgtcaatgaactcaaaccaatttatatataaaatgtttaaattgactctccaggggtgaagatattcaggaattgatggagggaaaaaagatccagtgcttacagactcacagaagcttaggggtctgtcatcgagtccttccttcctcttatgtaaaactgtctagtgtttctaccagttacttttcacgtttg

SEQ ID NO: 445043 - DNA, 515 bp, Homo sapiens
agttgtccatgtacacatagtcattatattagaaaagaaagctgttcaacaaacttgtttaatttgtttaaatcaacatagcatgaaacaccaaataaaatgtttgacatagttttacttttagctttctcatatgttataacttcactcagattgattcttgagtcttcagattgtccttcatttaactcagtgacattttcctagcctcctgttgattaagcatataggatagccttatttaaaatttagagcagtaggtgtattttggctgtttttctttttcatgtgtgtttttaaactttagtcatcattagcaaacggaaagccttctaagtaatcaagttttaattagaagtggtgcaaaattcttaattatattgtgttaaagagcagcgctgccagagaatgaccctgacctttacaatggctggcttgctttttggccagcactggaaaaatctatatttacttgcagaccttaaggaggtcttcagtattcaccctacattaag

SEQ ID NO: 445044 - DNA, 4595 bp, Homo sapiens
agaagtcacaaggtcgtttactaaacggaaactaagaaaaagaaaagccacatcagccggcacaagcctctctaacttgtgtgccctgaggctcatcagatgcgaagtcctggcgacaagatagggtcgcccgcagtggcttcctaaagcgcagatccaggccggctcccagcgtggaatccgacccatgtacttcgcctctccacgtggcatcagatgctctgccggctgtcaccgtgaactccagccctcgcggagccgacactgacctggctacttcagagttcggagggaaatagcgtctccgtaccctcgccccacctgggctgctcctcggaccgccgctcgtcccagactccaggaggcgccaccaggcctcgctgaccccgctccatatctccgggagccctcagctggtcggccgcggcgaccggaagctccggactgaggtactggttccgcccgccgctcttccagccgagactcggcagcggcggtcggagcggctgccacgccgcacctgcccgcgagggggcgcgccaggcccaggccgcagccgactgccgcgctctctgtccccgccctccgccatccccggactgcgctcacctgtctgggccgctggcctgggaggcgggggccggcgggagccaagccgaggaaagggcggagcggctctccgggcgcgtcatcggagcaccatggcggagctaggagctggcggcgacggccacaggggcggcgacggcgcagtgcgaagcgaaacagcacccgacagctacaaagtgcaagataagaaaaatgcctccagccgccctgcctctgcaatttcaggacaaaataacaaccactcaggaaataaaccagaccctccgcctgtgttacgtgttgatgaccggcagcggctggcccgggagcgacgtgaggaacgggagaaacagctagctgcaagagaaatagtgtggttagaaagagaagagcgagccaggcagcactacgagaagcacctggaagagcggaagaagaggttggaggagcagaggcagaaggaggagcggaggagggctgctgtggaggagaagcggaggcagagacttgaggaggacaaagaacgccacgaagctgttgtacggcgcacaatggaaaggagccagaagccaaaacagaagcataaccgttggtcgtggggaggctctctccatgggagccctagcatccacagtgcagatccagacaggcggtcagtttccaccatgaatctttcgaaatatgttgatcccgtcattagcaagcggctctcctcttcatctgcaactttactaaattctccagatagagctcgccgcctgcagctcagcccatgggagagcagcgttgttaacagactcctgacgcccacacattcgttcctggccagaagtaaaagcacagctgccttgtctggagaagcagcatcttgcagccccatcatcatgccctacaaagctgcacactctagaaattcgatggatcgaccaaaactctttgtaacaccacctgagggctcttctcgcaggaggatcattcatggcacagcgagctataaaaaagaaagagagagagaaaatgtactcttcctcacatctggcacccgaagggctgtatctccatctaatcccaaagcaagacaaccagctcgctcccgactttggcttccgtccaagtctcttcctcatttgcctggcacacccagaccgacatcctccttgccacccggctcagtcaaagctgctcctgctcaggtccggcccccatcccccggcaacatccgccctgtcaagagggaagtcaaagtggagcctgagaagaaagatcctgagaaggaacctcagaaagttgccaatgagccctcactaaagggcagagcacctttagtgaaggtagaagaagccacagttgaagagcggacacctgctgaaccagaagttggccctgctgctccagccatggccccagctccagcctcggccccagctccagcctcggccccagctccagccccggtccccaccccagccatggtctcagccccgtcatccactgtgaatgccagtgcttctgttaagacttctgcaggcaccaccgacccagaggaggccacaaggcttctagctgagaagaggcggctggcccgagagcagagagaaaaggaagaaagggagaggagggagcaggaagagcttgaaagacaaaagagagaggaattggctcaacgtgtggctgaagagaggacgactcgccgtgaggaggagtcgcgcaggctggaagccgagcaggcccgggagaaggaggagcagctgcagcggcaggcggaggagcgggcgctgcgcgagcgggaggaggcagagcgcgcccagaggcagaaagaagaagaagctcgcgttcgtgaagaagcagagagggtccggcaggaacgagagaagcatttccagagagaagagcaagagcgcctggagagaaagaagcgacttgaggagattatgaaaagaaccaggagaacagaagctacagataagaaaaccagtgatcagagaaacggtgatatagccaagggagctctcactggaggaacagaggtgtctgcacttccatgtacaacaaacgctccgggaaatggaaagccagttggcagcccacatgtggttacctcacaccagtcaaaagtgacagtggagagcactcccgatttggaaaaacaaccaaatgaaaatggtgtatctgttcagaatgaaaattttgaagaaattataaacttacccattggatctaaaccatccagattagatgtcaccaacagtgagagcccagaaattcctttgaatccaattttggcctttgatgatgaagggacacttgggcccctgcctcaggtagatggtgttcagacacagcagactgcagaagttatatgagtgtttcttctgaagaaccaaagctgaaatttaatgagaatttctacaattaatggaattcctttcctgctataaaggagcatcccctccacccgttttctagagttcttgaccatcattttgaaaagatttattaaaactagctaaagacaacagactggatagcttttctaataattttcatcaataggaaaaaagaaatacgtctcattcttcaatactttaaaatggctttttccagtgtgctccttcttagcaatcaatatttttctgcattctttaaaagacaagagaatttggttataaaagaaatgggctgactaggcatgatttttttggtcttaaaagcttaacatgtaaaattggcaaaaaaaattttttaccttttataatacttgaaaaataagtacctctttgttctacaagtagaatgaataggagaagagtttaagcctgtttttttaaaatattattgcaaagagctctatttgtagaagcaaattataggcagattaccaggttcttataaatacagcttgtacatggacattctgcaaacccagctgtcacatttttcttgcaactccttttgcaaaagcagactaaaatgttttaaaatgtgaaaaaacattattttttcaaagcaagaaaataatttactgccctcttacataatgtatttataaagtttttccagataaactaatcaaataaattagaataatgtgacaacattacaaatttaatttgttagctgcattccttctgatgttaccacgatagaatgttactgatgattcagggctatttctgaagtctgtatgttgctgctgtccccagtgatggtggacttatctttgccttacctgatcacaaattatgttggggaaaataaagatttaatatttctttaaatagaaaaagaatttggttttgctcgtttaagagcaatgagaaaatgatggaatgttgactgtgtttggcacacaggacacggaccttcatggaagtccttgctctgcgtggcatctgtcagcttttcacctttcattcttattcttcacttttgctgctgagcctagctgtacaaacttgcactttcatttgctaatataaattcagttttattttaccattttagagactactaatgattaaatgtagaaggagagggtgcacatgtttttatgtggagtgtttaaaagataaatttataccactgtaatgtgcagcttttattaaaagagaaattggttgaactgctaggttgaatgagagacttcatctattggactattttttttaatccaggcatatggtctttagtaatggcttgtaatttgtgaaaacattaatttgggggttttccctgttttcagttgtccatgtacacatagtcattatattagaaaagaaagctgttcaacaaacttgtttaatttgtttaaatcaacatagcatgaaacaccaaataaaatgtttgacatagttttaaaaaaaaaaaaaaaaaaaaaaaaaaaaaaaaaaaaaattttaaggagaaggaaaaaaaaaaaaagaaaaaaaagagagggaaaaaaaaagagagagaagaaaagaaaaaaaaggagagggaggagaaaaaggggaggaggaaaaaaaggg

SEQ ID NO: 445045 - DNA, 4313 bp, Homo sapiens
agaagtcacaaggtcgtttactaaacggaaactaagaaaaagaaaagccacatcagccggcacaagcctctctaacttgtgtgccctgaggctcatcagatgcgaagtcctggcgacaagatagggtcgcccgcagtggcttcctaaagcgcagatccaggccggctcccagcgtggaatccgacccatgtacttcgcctctccacgtggcatcagatgctctgccggctgtcaccgtgaactccagccctcgcggagccgacactgacctggctacttcagagttcggagggaaatagcgtctccgtaccctcgccccacctgggctgctcctcggaccgccgctcgtcccagactccaggaggcgccaccaggcctcgctgaccccgctccatatctccgggagccctcagctggtcggccgcggcgaccggaagctccggactgaggtactggttccgcccgccgctcttccagccgagactcggcagcggcggtcggagcggctgccacgccgcacctgcccgcgagggggcgcgccaggcccaggccgcagccgactgccgcgctctctgtccccgccctccgccatccccggactgcgctcacctgtctgggccgctggcctgggaggcgggggccggcgggagccaagccgaggaaagggcggagcggctctccgggcgcgtcatcggagcaccatggcggagctaggagctggcggcgacggccacaggggcggcgacggcgcagtgcgaagcgaaacagcacccgacagctacaaagtgcaagataagaaaaatgcctccagccgccctgcctctgcaatttcaggacaaaataacaaccactcaggaaataaaccagaccctccgcctgtgttacgtgttgatgaccggcagcggctggcccgggagcgacgtgaggaacgggagaaacagctagatccagacaggcggtcagtttccaccatgaatctttcgaaatatgttgatcccgtcattagcaagcggctctcctcttcatctgcaactttactaaattctccagatagagctcgccgcctgcagctcagcccatgggagagcagcgttgttaacagactcctgacgcccacacattcgttcctggccagaagtaaaagcacagctgccttgtctggagaagcagcatcttgcagccccatcatcatgccctacaaagctgcacactctagaaattcgatggatcgaccaaaactctttgtaacaccacctgagggctcttctcgcaggaggatcattcatggcacagcgagctataaaaaagaaagagagagagaaaatgtactcttcctcacatctggcacccgaagggctgtatctccatctaatcccaaagcaagacaaccagctcgctcccgactttggcttccgtccaagtctcttcctcatttgcctggcacacccagaccgacatcctccttgccacccggctcagtcaaagctgctcctgctcaggtccggcccccatcccccggcaacatccgccctgtcaagagggaagtcaaagtggagcctgagaagaaagatcctgagaaggaacctcagaaagttgccaatgagccctcactaaagggcagagcacctttagtgaaggtagaagaagccacagttgaagagcggacacctgctgaaccagaagttggccctgctgctccagccatggccccagctccagcctcggccccagctccagcctcggccccagctccagccccggtccccaccccagccatggtctcagccccgtcatccactgtgaatgccagtgcttctgttaagacttctgcaggcaccaccgacccagaggaggccacaaggcttctagctgagaagaggcggctggcccgagagcagagagaaaaggaagaaagggagaggagggagcaggaagagcttgaaagacaaaagagagaggaattggctcaacgtgtggctgaagagaggacgactcgccgtgaggaggagtcgcgcaggctggaagccgagcaggcccgggagaaggaggagcagctgcagcggcaggcggaggagcgggcgctgcgcgagcgggaggaggcagagcgcgcccagaggcagaaagaagaagaagctcgcgttcgtgaagaagcagagagggtccggcaggaacgagagaagcatttccagagagaagagcaagagcgcctggagagaaagaagcgacttgaggagattatgaaaagaaccaggagaacagaagctacagataagaaaaccagtgatcagagaaacggtgatatagccaagggagctctcactggaggaacagaggtgtctgcacttccatgtacaacaaacgctccgggaaatggaaagccagttggcagcccacatgtggttacctcacaccagtcaaaagtgacagtggagagcactcccgatttggaaaaacaaccaaatgaaaatggtgtatctgttcagaatgaaaattttgaagaaattataaacttacccattggatctaaaccatccagattagatgtcaccaacagtgagagcccagaaattcctttgaatccaattttggcctttgatgatgaagggacacttgggcccctgcctcaggtagatggtgttcagacacagcagactgcagaagttatatgagtgtttcttctgaagaaccaaagctgaaatttaatgagaatttctacaattaatggaattcctttcctgctataaaggagcatcccctccacccgttttctagagttcttgaccatcattttgaaaagatttattaaaactagctaaagacaacagactggatagcttttctaataattttcatcaataggaaaaaagaaatacgtctcattcttcaatactttaaaatggctttttccagtgtgctccttcttagcaatcaatatttttctgcattctttaaaagacaagagaatttggttataaaagaaatgggctgactaggcatgatttttttggtcttaaaagcttaacatgtaaaattggcaaaaaaaattttttaccttttataatacttgaaaaataagtacctctttgttctacaagtagaatgaataggagaagagtttaagcctgtttttttaaaatattattgcaaagagctctatttgtagaagcaaattataggcagattaccaggttcttataaatacagcttgtacatggacattctgcaaacccagctgtcacatttttcttgcaactccttttgcaaaagcagactaaaatgttttaaaatgtgaaaaaacattattttttcaaagcaagaaaataatttactgccctcttacataatgtatttataaagtttttccagataaactaatcaaataaattagaataatgtgacaacattacaaatttaatttgttagctgcattccttctgatgttaccacgatagaatgttactgatgattcagggctatttctgaagtctgtatgttgctgctgtccccagtgatggtggacttatctttgccttacctgatcacaaattatgttggggaaaataaagatttaatatttctttaaatagaaaaagaatttggttttgctcgtttaagagcaatgagaaaatgatggaatgttgactgtgtttggcacacaggacacggaccttcatggaagtccttgctctgcgtggcatctgtcagcttttcacctttcattcttattcttcacttttgctgctgagcctagctgtacaaacttgcactttcatttgctaatataaattcagttttattttaccattttagagactactaatgattaaatgtagaaggagagggtgcacatgtttttatgtggagtgtttaaaagataaatttataccactgtaatgtgcagcttttattaaaagagaaattggttgaactgctaggttgaatgagagacttcatctattggactattttttttaatccaggcatatggtctttagtaatggcttgtaatttgtgaaaacattaatttgggggttttccctgttttcagttgtccatgtacacatagtcattatattagaaaagaaagctgttcaacaaacttgtttaatttgtttaaatcaacatagcatgaaacaccaaataaaatgtttgacatagttttaaaaaaaaaaaaaaaaaaaaaaaaaaaaaaaaaaaaaattttaaggagaaggaaaaaaaaaaaaagaaaaaaaagagagggaaaaaaaaagagagagaagaaaagaaaaaaaaggagagggaggagaaaaaggggaggaggaaaaaaaggg

SEQ ID NO: 445046 - DNA, 2997 bp, Homo sapiens
agaagtcacaaggtcgtttactaaacggaaactaagaaaaagaaaagccacatcagccggcacaagcctctctaacttgtgtgccctgaggctcatcagatgcgaagtcctggcgacaagatagggtcgcccgcagtggcttcctaaagcgcagatccaggccggctcccagcgtggaatccgacccatgtacttcgcctctccacgtggcatcagatgctctgccggctgtcaccgtgaactccagccctcgcggagccgacactgacctggctacttcagagttcggagggaaatagcgtctccgtaccctcgccccacctgggctgctcctcggaccgccgctcgtcccagactccaggaggcgccaccaggcctcgctgaccccgctccatatctccgggagccctcagctggtcggccgcggcgaccggaagctccggactgaggtactggttccgcccgccgctcttccagccgagactcggcagcggcggtcggagcggctgccacgccgcacctgcccgcgagggggcgcgccaggcccaggccgcagccgactgccgcgctctctgtccccgccctccgccatccccggactgcgctcacctgtctgggccgctggcctgggaggcgggggccggcgggagccaagccgaggaaagggcggagcggctctccgggcgcgtcatcggagcaccatggcggagctaggagctggcggcgacggccacaggggcggcgacggcgcagtgcgaagcgaaacagcacccgacagctacaaagtgcaagataagaaaaatgcctccagccgccctgcctctgcaatttcaggacaaaataacaaccactcaggaaataaaccagaccctccgcctgtgttacgtgttgatgaccggcagcggctggcccgggagcgacgtgaggaacgggagaaacagctagctgcaagagaaatagtgtggttagaaagagaagagcgagccaggcagcactacgagaagcacctggaagagcggaagaagaggttggaggagcagaggcagaaggaggagcggaggagggctgctgtggaggagaagcggaggcagagacttgaggaggacaaagaacgccacgaagctgttgtacggcgcacaatggaaaggagccagaagccaaaacagaagcataaccgttggtcgtggggaggctctctccatgggagccctagcatccacagtgcagctcgccgcctgcagctcagcccatgggagagcagcgttgttaacagactcctgacgcccacacattcgttcctggccagaagtaaaagcacagctgccttgtctggagaagcagcatcttgcagccccatcatcatgccctacaaagctgcacactctagaaattcgatggatcgaccaaaactctttgtaacaccacctgagggctcttctcgcaggaggatcattcatggcacagcgagctataaaaaagaaagagagagagaaaatgtactcttcctcacatctggcacccgaagggctgtatctccatctaatcccaaagcaagacaaccagctcgctcccgactttggcttccgtccaagtctcttcctcatttgcctggcacacccagaccgacatcctccttgccacccggctcagtcaaagctgctcctgctcaggtccggcccccatcccccggcaacatccgccctgtcaagagggaagtcaaagtggagcctgagaagaaagatcctgagaaggaacctcagaaagttgccaatgagccctcactaaagggcagagcacctttagtgaaggtagaagaagccacagttgaagagcggacacctgctgaaccagaagttggccctgctgctccagccatggccccagctccagcctcggccccagctccagcctcggccccagctccagccccggtccccaccccagccatggtctcagccccgtcatccactgtgaatgccagtgcttctgttaagacttctgcaggcaccaccgacccagaggaggccacaaggcttctagctgagaagaggcggctggcccgagagcagagagaaaaggaagaaagggagaggagggagcaggaagagcttgaaagacaaaagagagaggaattggctcaacgtgtggctgaagagaggacgactcgccgtgaggaggagtcgcgcaggctggaagccgagcaggcccgggagaaggaggagcagctgcagcggcaggcggaggagcgggcgctgcgcgagcgggaggaggcagagcgcgcccagaggcagaaagaagaagaagctcgcgttcgtgaagaagcagagagggtccggcaggaacgagagaagcatttccagagagaagagcaagagcgcctggagagaaagaagcgacttgaggagattatgaaaagaaccaggagaacagaagctacagataagaaaaccagtgatcagagaaacggtgatatagccaagggagctctcactggaggaacagaggtgtctgcacttccatgtacaacaaacgctccgggaaatggaaagccagttggcagcccacatgtggttacctcacaccagtcaaaagtgacagtggagagcactcccgatttggaaaaacaaccaaatgaaaatggtgtatctgttcagaatgaaaattttgaagaaattataaacttacccattggatctaaaccatccagattagatgtcaccaacagtgagagcccagaaattcctttgaatccaattttggcctttgatgatgaagggacacttgggcccctgcctcaggtagatggtgttcagacacagcagactgcagaagttatatgagtgtttcttctgaagaaccaaagctgaaatttaatgagaatttctacaattaatggaattcctttcctgctataaaggagcatcccctccacccgttttctagagttcttgaccatcattttgaaaagatttattaaaactagctaaagacaacaga

SEQ ID NO: 445047 - DNA, 3123 bp, Homo sapiens
agaagtcacaaggtcgtttactaaacggaaactaagaaaaagaaaagccacatcagccggcacaagcctctctaacttgtgtgccctgaggctcatcagatgcgaagtcctggcgacaagatagggtcgcccgcagtggcttcctaaagcgcagatccaggccggctcccagcgtggaatccgacccatgtacttcgcctctccacgtggcatcagatgctctgccggctgtcaccgtgaactccagccctcgcggagccgacactgacctggctacttcagagttcggagggaaatagcgtctccgtaccctcgccccacctgggctgctcctcggaccgccgctcgtcccagactccaggaggcgccaccaggcctcgctgaccccgctccatatctccgggagccctcagctggtcggccgcggcgaccggaagctccggactgaggtactggttccgcccgccgctcttccagccgagactcggcagcggcggtcggagcggctgccacgccgcacctgcccgcgagggggcgcgccaggcccaggccgcagccgactgccgcgctctctgtccccgccctccgccatccccggactgcgctcacctgtctgggccgctggcctgggaggcgggggccggcgggagccaagccgaggaaagggcggagcggctctccgggcgcgtcatcggagcaccatggcggagctaggagctggcggcgacggccacaggggcggcgacggcgcagtgcgaagcgaaacagcacccgacagctacaaagtgcaagataagaaaaatgcctccagccgccctgcctctgcaatttcaggacaaaataacaaccactcaggaaataaaccagaccctccgcctgtgttacgtgttgatgaccggcagcggctggcccgggagcgacgtgaggaacgggagaaacagctagctgcaagagaaatagtgtggttagaaagagaagagcgagccaggcagcactacgagaagcacctggaagagcggaagaagaggttggaggagcagaggcagaaggaggagcggaggagggctgctgtggaggagaagcggaggcagagacttgaggaggacaaagaacgccacgaagctgttgtacggcgcacaatggaaaggagccagaagccaaaacagaagcataaccgttggtcgtggggaggctctctccatgggagccctagcatccacagtgcagatccagacaggcggtcagtttccaccatgaatctttcgaaatatgttgatcccgtcattagcaagcggctctcctcttcatctgcaactttactaaattctccagatagagctcgccgcctgcagctcagcccatgggagagcagcgttgttaacagactcctgacgcccacacattcgttcctggccagaagtaaaagcacagctgccttgtctggagaagcagcatcttgcagccccatcatcatgccctacaaagctgcacactctagaaattcgatggatcgaccaaaactctttgtaacaccacctgagggctcttctcgcaggaggatcattcatggcacagcgagctataaaaaagaaagagagagagaaaatgtactcttcctcacatctggcacccgaagggctgtatctccatctaatcccaaagcaagacaaccagctcgctcccgactttggcttccgtccaagtctcttcctcatttgcctggcacacccagaccgacatcctccttgccacccggctcagtcaaagctgctcctgctcaggtccggcccccatcccccggcaacatccgccctgtcaagagggaagtcaaagtggagcctgagaagaaagatcctgagaaggaacctcagaaagttgccaatgagccctcactaaagggcagagcacctttagtgaaggtagaagaagccacagttgaagagcggacacctgctgaaccagaagttggccctgctgctccagccatggccccagctccagcctcggccccagctccagcctcggccccagctccagccccggtccccaccccagccatggtctcagccccgtcatccactgtgaatgccagtgcttctgttaagacttctgcaggcaccaccgacccagaggaggccacaaggcttctagctgagaagaggcggctggcccgagagcagagagaaaaggaagaaagggagaggagggagcaggaagagcttgaaagacaaaagagagaggaattggctcaacgtgtggctgaagagaggacgactcgccgtgaggaggagtcgcgcaggctggaagccgagcaggcccgggagaaggaggagcagctgcagcggcaggcggaggagcgggcgctgcgcgagcgggaggaggcagagcgcgcccagaggcagaaagaagaagaagctcgcgttcgtgaagaagcagagagggtccggcaggaacgagagaagcatttccagagagaagagcaagagcgcctggagagaaagaagcgacttgaggagattatgaaaagaaccaggagaacagaagctacagataagaaaaccagtgatcagagaaacggtgatatagccaagggagctctcactggaggaacaggtatttctgtcaatgaactcaaaccaatttatatataaaatgtttaaattgactctccaggggtgaagatattcaggaattgatggagggaaaaaagatccagtgcttacagactcacagaagcttaggggtctgtcatcgagtccttccttcctcttatgtaaaactgtctagtgtttctaccagttacttttcacgtttgtttatactctaatgggttgcttgatattttaaatcatcttatgtaatatgtatttatgcatatatgtatatatacttatacatatatgtgtatacatatacttttagaagaatttcttttgagtttataaaactaaatttcatttatcacatactgtctgctcaagtagtgtatatttatatttcctcttaagaaaggactttaaatttacacattggacaacttgtattatagaagttctcagaaaaatgatttaaatgttatttatcttagatctgacttcaaaataaagttaaaaatttgttgaa

SEQ ID NO: 445048 - DNA, 358 bp, Homo sapiens
gcttccgtccaagtctcttcctcatttgcctggcacacccagaccgacatcctccttgccacccggctcagtcaaagctgctcctgctcaggtccggcccccatcccccggcaacatccgccctgtcaagagggaagtcaaagtggagcctgagaagaaagatcctgagaaggaacctcagaaagttgccaatgagccctcactaaagggcagagcacctttagtgaaggtagaagaagccacagttgaagagcggacacctgctgaaccagaagttggccctggtaagagcaaactcacctgtggtctgggtgctctctctttttctcccgcactgttttgatgaagctttttttgt

SEQ ID NO: 445049 - DNA, 1970 bp, Homo sapiens
tagagacggggtttcaccatgttggccaggctggtcttgaactcttgacctcatgtagtccacccgcctctgcctcccaaagtgctgcgattacaggcgtgagccaccgtgcccggcagaggtaaaacgttttcatgttcatgtttttgtaactttgttacatttaatgaacaaattagataaaaagcactatgctcttatgctgcttaatctgtgagaaatgattgtgggggtgggactagttatgaccattcacagttggtgcacttcaatcagtaaatgtcacagaggaaatgtggacggtaaattaactcggcaagtcggtcatgcaaagacgaattagaaatcttaatatttgtaagcagacaaaaaatgtgtctggaaggatcctcacccagttaaatggtatttgctccttgggtgtagagggagggaagggatggggtagaggggaatgtcagagttcactttaacttcatgcacatgtggaaatgtttgaaatgttcacagtaaattttataatttcagaaaaactgcttaaggttgaaaagagaaatttaagaaattgctgacggaataaaaacataatagaactacaacaccgaaggaaatgaaagaagcaagaaggaaagcaccagaagtgatttggaagagaaatcctaaaatgaatgtgaacaacagagtgatcagaagagtgtagggaattaatagtttctttaaacaagccatctcacaatggaagcctgtgtgtcttgaaattgctgtggttattattcactctgccctttgaagaactgcagaaattcatagggcaatgttaagtgtttgtgtctccaaaaaagatgttggagtcgttaccctcagaacctcaggtaatcatgttagttaatccattaggttagttcctaattgactatgactgtgtccttagaaaaatgggaaatttggtcacagaggcagatgtacagagggaagacgatgtgaagacacaggaagaacatcttcaagccaaggaacacacggggctaccagaagccgagatagaagcatggaacatatgttctagtaagaagtgtctgggttgttttggttttttttctttggagtttttgtggtattaaattatttttaaattatgttttattgtagacctcacaattctttttttttctttttcactcaaactacagcaaaatattatatttctatcctatatttcatgggcttacctctagccaattgtttttaactgccatgtaatattttacatcatgaagctttcatccttgattcaaatcctctgattatggacatgtatttcctccattttcctgctatgaaatatatcaccaccagcttgattcaaccttaaaaataaggtcatcagtattatgttctaaataaacttatggccatacatgagaaatgtaccttgcagctgaatggctaggtcatatggtgatctagtatgtaactggaattatgttatacattgcccttcctctcccataagatggacaaaagtgtttctgtatcactgtgtcccagacaatatttagaattacccagctttccagtttttactttagaagtttaaagtgatatagaatatatctggtatttctcatattgaaatacatttgaacattagttcatatcctttcattgccttttgtttttcctcttctgtcaatggtctactcatatgttggcctgtctttatttgtatcttgactttttattgtgtattttgtttatggtggggtactttattggtgattaatacgattttcaagtatattatatgggctagtcccttgatactattgacactgtatttatcttcagtctcttgttggtatctaactttggttctgaagtttatggaatggaagtatttaattggaaagattaaacatattgattttaattaaaaaaaagtcgacgcggccgcgaatttagtagtagta

SEQ ID NO: 445050 - DNA, 1563 bp, Homo sapiens
tagagacggggtttcaccatgttggccaggctggtcttgaactcttgacctcatgtagtccacccgcctctgcctcccaaagtgctgcgattacaggcgtgagccaccgtgcccggcagagaaaaactgcttaaggttgaaaagagaaatttaagaaattgctgacggaataaaaacataatagaactacaacaccgaaggaaatgaaagaagcaagaaggaaagcaccagaagtgatttggaagagaaatcctaaaatgaatgtgaacaacagagtgatcagaagagtgtagggaattaatagtttctttaaacaagccatctcacaatggaagcctgtgtgtcttgaaattgctgtggttattattcactctgccctttgaagaactgcagaaattcatagggcaatgttaagtgtttgtgtctccaaaaaagatgttggagtcgttaccctcagaacctcaggtaatcatgttagttaatccattaggttagttcctaattgactatgactgtgtccttagaaaaatgggaaatttggtcacagaggcagatgtacagagggaagacgatgtgaagacacaggaagaacatcttcaagccaaggaacacacggggctaccagaagccgagatagaagcatggaacatatgttctagtaagaagtgtctgggttgttttggttttttttctttggagtttttgtggtattaaattatttttaaattatgttttattgtagacctcacaattctttttttttctttttcactcaaactacagcaaaatattatatttctatcctatatttcatgggcttacctctagccaattgtttttaactgccatgtaatattttacatcatgaagctttcatccttgattcaaatcctctgattatggacatgtatttcctccattttcctgctatgaaatatatcaccaccagcttgattcaaccttaaaaataaggtcatcagtattatgttctaaataaacttatggccatacatgagaaatgtaccttgcagctgaatggctaggtcatatggtgatctagtatgtaactggaattatgttatacattgcccttcctctcccataagatggacaaaagtgtttctgtatcactgtgtcccagacaatatttagaattacccagctttccagtttttactttagaagtttaaagtgatatagaatatatctggtatttctcatattgaaatacatttgaacattagttcatatcctttcattgccttttgtttttcctcttctgtcaatggtctactcatatgttggcctgtctttatttgtatcttgactttttattgtgtattttgtttatggtggggtactttattggtgattaatacgattttcaagtatattatatgggctagtcccttgatactattgacactgtatttatcttcagtctcttgttggtatctaactttggttctgaagtttatggaatggaagtatttaattggaaagattaaacatattgattttaattaaaaaaaagtcgacgcggccgcgaatttagtagtagta

SEQ ID NO: 445051 - DNA, 1482 bp, Homo sapiens
cagctcctcggagagaatcatttgaacctgggaggtggaggttcccgtgaccccagttcgcacccctgcactccaccctgggcgaccgagtgagactctgtctaaaaaaaaaaaaaaagttaagttggataatgaaaccgaaagcaccagaagtgatttggaagagaaatcctaaaatgaatgtgaacaacagagtgatcagaagagtgtagggaattaatagtttctttaaacaagccatctcacaatggaagcctgtgtgtcttgaaattgctgtggttattattcactctgccctttgaagaactgcagaaattcatagggcaatgttaagtgtttgtgtctccaaaaaagatgttggagtcgttaccctcagaacctcaggtaatcatgttagttaatccattaggttagttcctaattgactatgactgtgtccttagaaaaatgggaaatttggtcacagaggcagatgtacagagggaagacgatgtgaagacacaggaagaacatcttcaagccaaggaacacacggggctaccagaagccgagatagaagcatggaacatatgttctagtaagaagtgtctgggttgttttggttttttttctttggagtttttgtggtattaaattatttttaaattatgttttattgtagacctcacaattctttttttttctttttcactcaaactacagcaaaatattatatttctatcctatatttcatgggcttacctctagccaattgtttttaactgccatgtaatattttacatcatgaagctttcatccttgattcaaatcctctgattatggacatgtatttcctccattttcctgctatgaaatatatcaccaccagcttgattcaaccttaaaaataaggtcatcagtattatgttctaaataaacttatggccatacatgagaaatgtaccttgcagctgaatggctaggtcatatggtgatctagtatgtaactggaattatgttatacattgcccttcctctcccataagatggacaaaagtgtttctgtatcactgtgtcccagacaatatttagaattacccagctttccagtttttactttagaagtttaaagtgatatagaatatatctggtatttctcatattgaaatacatttgaacattagttcatatcctttcattgccttttgtttttcctcttctgtcaatggtctactcatatgttggcctgtctttatttgtatcttgactttttattgtgtattttgtttatggtggggtactttattggtgattaatacgattttcaagtatattatatgggctagtcccttgatactattgacactgtatttatcttcagtctcttgttggtatctaactttggttctgaagtttatggaatggaagtatttaattggaaagattaaacatattgattttaattaaaaaaaagtcgacgcggccgcgaatttagtagtagta

SEQ ID NO: 445052 - DNA, 1970 bp, Homo sapiens
tagagacggggtttcaccatgttggccaggctggtcttgaactcttgacctcatgtagtccacccgcctctgcctcccaaagtgctgcgattacaggcgtgagccaccgtgcccggcagaggtaaaacgttttcatgttcatgtttttgtaactttgttacatttaatgaacaaattagataaaaagcactatgctcttatgctgcttaatctgtgagaaatgattgtgggggtgggactagttatgaccattcacagttggtgcacttcaatcagtaaatgtcacagaggaaatgtggacggtaaattaactcggcaagtcggtcatgcaaagacgaattagaaatcttaatatttgtaagcagacaaaaaatgtgtctggaaggatcctcacccagttaaatggtatttgctccttgggtgtagagggagggaagggatggggtagaggggaatgtcagagttcactttaacttcatgcacatgtggaaatgtttgaaatgttcacagtaaattttataatttcagaaaaactgcttaaggttgaaaagagaaatttaagaaattgctgacggaataaaaacataatagaactacaacaccgaaggaaatgaaagaagcaagaaggaaagcaccagaagtgatttggaagagaaatcctaaaatgaatgtgaacaacagagtgatcagaagagtgtagggaattaatagtttctttaaacaagccatctcacaatggaagcctgtgtgtcttgaaattgctgtggttattattcactctgccctttgaagaactgcagaaattcatagggcaatgttaagtgtttgtgtctccaaaaaagatgttggagtcgttaccctcagaacctcaggtaatcatgttagttaatccattaggttagttcctaattgactatgactgtgtccttagaaaaatgggaaatttggtcacagaggcagatgtacagagggaagacgatgtgaagacacaggaagaacatcttcaagccaaggaacacacggggctaccagaagccgagatagaagcatggaacatatgttctagtaagaagtgtctgggttgttttggttttttttctttggagtttttgtggtattaaattatttttaaattatgttttattgtagacctcacaattctttttttttctttttcactcaaactacagcaaaatattatatttctatcctatatttcatgggcttacctctagccaattgtttttaactgccatgtaatattttacatcatgaagctttcatccttgattcaaatcctctgattatggacatgtatttcctccattttcctgctatgaaatatatcaccaccagcttgattcaaccttaaaaataaggtcatcagtattatgttctaaataaacttatggccatacatgagaaatgtaccttgcagctgaatggctaggtcatatggtgatctagtatgtaactggaattatgttatacattgcccttcctctcccataagatggacaaaagtgtttctgtatcactgtgtcccagacaatatttagaattacccagctttccagtttttactttagaagtttaaagtgatatagaatatatctggtatttctcatattgaaatacatttgaacattagttcatatcctttcattgccttttgtttttcctcttctgtcaatggtctactcatatgttggcctgtctttatggggatcagaactttaaacggcgaaattttttcgagggccgcccctaaaaaggttttaaaaaagggttcaagataaaaattacggactgttcccttgatactattgacactgtatttatcttcagtctcttgttggtatctaactttggttctgaagtttatggaatggaagtatttaattggaaagattaaacatattgattttaattaaaaaaaagtcgacgcggccgcgaatttagtagtagta

SEQ ID NO: 445053 - DNA, 738 bp, Homo sapiens
  misc_feature (443)..(443): n is a, c, g, or t
  misc_feature (445)..(446): n is a, c, g, or t
  misc_feature (453)..(453): n is a, c, g, or t
  misc_feature (464)..(464): n is a, c, g, or t
  misc_feature (495)..(495): n is a, c, g, or t
tagagacggggtttcaccatgttggccaggctggtcttgaactcttgacctcatgtagtccacccgcctctgcctcccaaagtgctgcgattacaggcgtgagccaccgtgcccggcagaggtaaaacgttttcatgttcatgtttttgtaactttgttacatttaatgaacaaattagataaaaagcactatgctcttatgctgcttaatctgtgagaaatgattgtgggggtgggactagttatgaccattcacagttggtgcacttcaatcagtaaatgtcacagaggaaatgtggacggtaaattaactcggcaagtcggtcatgcaaagacgaattagaaatcttaatatttgtaagcagacaaaaaatgtgtctggaaggatcctcacccagttaaatggtatttgctccttgggtgtagagggagggaagggatgntnnaactaanaaaaacagtantgttaaaaatctttgttgtggtttgagcatntttgctgcttttggattgagatggcgaatcaaggcttcacttcctctctcttctgtctttagaaagctgtgatcgtgcgtgcaattatttgaaaggcaacataagccatttaaaaacctgtagttgttaaggaagaaaatggtgggcaagatatcctacctgcccaaatttcgtgggggcaataattaaatggcccaggaaatttctgattggaaccttttttaatttcataaatcctttggg

SEQ ID NO: 445054 - DNA, 1101 bp, Homo sapiens
cctggggatgagctgataacaggaatggatggaaccggtcagctgttttgctattactgcagacccgttgtattaatttttgtgcattaatacatgaacgtagaatattataaatgaaaactgagaagctacaggaagaagaaatcacaatcctatcaacccagaagaaagcattgttaatatttctgtttattttccacttctgtcttccctgttttgtctctttctctcatttaaaaaaaaaaatacatgagttgattgttgatttttgaaaaaatcaggctgggcacagtggctcatgcctgtaatctcaacactttgggaggctgaggcaggcagattgcctgagctcaagagttcaagaccagcctgagcaacatggcaaaaccccatctccactaaaaatataaatagctgggcatgatggtgcccaccggtaatcccagctacttgggaagctgagacatgagaatggcttgaacctgggaggcagaggttgcagtgagccaagatcacaccagttcactccagcctgggtgacaaagtgagactgtcttaaaaaaaaaaaaaaaattgcaacattgcaggtgcgacttaagaccccatcagttaccacccttcctcagtcatcatttgccttatttttatttttccagacccttctctgtgcagttgcatttcatacatgtgccagagctgatgaacagaacagagccaccaccccttctctgcaattctgaaacccaaacagctctgaaaatcaaaatatttttcctaactcgtatgatggcaaaaccaaaacctgccttcaggtatttatgggcgggtttattagagtcattgatgccagtaattgtgagtttatgttttcgtttctgcaaaaattcagtgtttggttttagctgctcacgacccagctgacagtgtaacgtaatacctatgtgtgccctacatggccttttacctcctaaagattctaaattccaagacatatctggccacagaggtttaggataaggagttaagtatggatctgtaattgtgttaaggtttgggcttcccttaaataaaatcataattctgtataccctgctgcacctt

SEQ ID NO: 445055 - DNA, 532 bp, Homo sapiens
ctgagagaggtagaggggccccaacaatttgagctcctactaaaggctaaaggcccctttctggactttggcaaaaaaaggaagtctttttttttttctccttaagttaggggtaggaaaatacatccatcatgaatgtttgaaaccacaccgtagccctcacattcaagttgacctcaataggccatctgtcagagcccagtccaacaagtgactggactggactcttttgtaggcctggtaagtcacttgggttaagacagctaaccttgagcttttcctcccccgcagagaggcactgcccctggtaaagagaccccagaggccccatttttctacaatggaatgtctttgcttgctaatttacagacggttttcaaggatagtgtttaaaatctgagaggatttatccatggataaagagctataggctaaaagactctgcaagttcccagctatttttgtatgttggacatgttatccgttgaaaagcaatcagaaataaaaagtatttaagcgttgtgaggtgcag

SEQ ID NO: 445056 - DNA, 6115 bp, Homo sapiens
tgttttttgcttttccttcaatgacgattcctgtgttccttattccagtgtcatgtggataaccaggccatgctgcactacatccgagataaaactgctgttccttacttctccaatttggtctggttcattgggagccatgtgatcgaactcgatgactgcgtgcagactgatgaggagcatcggaatcggggtaaactgagtgatctggtggcagagcacctagaccacctgcactatctcaatgacatcctgatcatcaactgtgagttcctcaacgatgtgctcactgaccacctgctcaacaggctcttcctgcccctctacgtgtactcactggagaaccaggacaagggaggagaacggccgaaaattagcctgccggtgtctctttatcttctgtcacaggtcttcttaattatacatcatgcaccgctggtgaactcgttagctgaagtcattctgaatggtgatctgtctgagatgtacgctaagactgaacaggatattcagagaagttctgccaagcccagcattcggtgcttcattaaacccaccgagacactcgagcggtcccttgagatgaacaagcacaagggcaagaggcgggtgcaaaagagacccaactacaaaaacgttggggaagaagaagatgaggagaaagggcccaccgaggatgcccaagaagacgccgagaaggctaaaggtacagagggtggttcaaaaggcatcaagacgagtggggagagtgaagagatcgagatggtgatcatggagcgtagcaagctctcagagctggccgccagcacctccgtgcaggagcagaacaccacggacgaggagaaaagcgccgccgccacctgctctgagagcacgcaatggagcagacccttcctggatatggtgtaccacgcgctggacagcccggatgatgattaccatgccctgttcgtgctctgcctcctctatgccatgtctcataataaaggcatggatcctgaaaaattagagcgaatccagctccccgtgccaaatgcggccgagaagaccacctacaaccacccgctagctgaaagactcatcaggatcatgaacaacgctgcccagccagatgggaagatccggctggcgacgctggagctgagctgcctgcttctgaagcagcaagtcctgatgagtgctggctgcatcatgaaggacgtgcacctggcctgcctggagggtgcgagagaagaaagtgttcaccttgtacgacatttttataagggagaagacatttttttggacatgtttgaagatgagtataggagcatgacaatgaagcccatgaacgtggaatatctcatgatggacgcctccatcctgctgcccccaacaggcacgccactgacgggcattgacttcgtgaagcggctgccgtgtggcgatgtggagaagacccggcgggccatccgggtgttcttcatgctgcgttccctgtcactgcaattgcgaggggagcctgagacacagttgccgctgactcgggaggaggacctgatcaagactgatgatgtcctggatctgaataacagcgacttgattgcatgtacagtgatcaccaaggatggcggcatggtccagcgattcctggctgtggatatttaccagatgagtttggtggagcctgatgtgtccaggcttggctggggagtggtcaagtttgcaggcctattgcaggacatgcaggtgactggcgtggaggacgacagccgtgccctgaacatcaccatccacaagcctgcgtccagcccccattccaagcccttccccatcctccaggccaccttcatcttctcagaccacatccgctgcatcatcgccaagcagcgcctggccaaaggccgcatccaggcaaggcgcatgaagatgcagagaatagctgccctcctggacctcccaatccagcccaccactgaagtcctggggtttggactcggctcctccacctccactcagcacctgcctttccgcttctacgaccaggggcgccggggcagcagcgaccccacagtgcagcgctccgtgtttgcatcggtggacaaggtgccaggcttcgccgtggcccagtgcataaaccagcacagctccccgtccctgtcctcacagtcgccaccctccgccagcgggagccccagcggcagcgggagcaccagccactgcgactctggaggcaccagctcgtcctccaccccctccacagcccagagtccagcagatgcccccatgagtccagaactgcctaagcctcaccttcctgaccagttggtaatcgtcaacgaaacggaagcagactctaagcccagcaagaacgtggccaggagcgcagccgtggagacagccagcctgtcccccagcctcgtccctgcccggcagcccaccatttccctgctctgcgaggacacggctgacacgctgagcgtcgaatcgctgacccttgtccccccagttgacccccacagcctccgcagcctcaccggcatgcccccgctgtccacgccggctgccgcctgcacagagcccgtgggcgaagaggctgcatgtgctgagcctgtgggcaccgctgaggactgagtcagtgccggggcctccctttgtgtgtgtggccccgctggtagggaccccagtgccgctgactggcaagacacactgggagcacccaccattctgtgcggcccccagcagccatctcaaccacctatccctgcgctcccttgaatgggaagaagccccacgttgtccttgaattcctttttcactttgcatctcttcacgtgcaggctgggaccagcggagacaccgcggcgaatgcagatgactgcaccggccactcagggagctgcctgggctccgtgtctctgagccccgggtggcaggacccaccggcacctctttcttcctctgtcatatggctcctctgtcaccagccccagtgtgcacagaagaattggaccaggtcactgtacgtagaaatttgtagaaaagcagacttagataaacatctcctttggatatttatttccgcttttggcagcaggtgaacatttatttttaaaacttctatttaaaagaagtccaaaaacatcaacactaaggtttgatgtcatgtgaaaagtgtaataataacagttaagatttcatgatcattttcactggacctttcctgatattttgtttcagagttcttagtgtggctttttccatttatttaagtgattctttgttactcactaactctgcaagcctgtggaataatgaagtaccttcctggaaagtttggattattttttaaacaaaaacaagggagatacatgtattctcaggtacacacagagctgagagggctgaatggttttctgctatagcagccgagaggcctcccatcatggaaagatttctccaggaaaaggaggaatgtagccagctccccactcaggacgcttcctcatttctcttcaccaaaaccaaacagagacagcttccagcaccttcttcagtgttaccatctctaagaaggaaccagttgggaccgtgaagactcccgaccctgtggccatgatggaaatcaaaggaagacaccctctacgtcacctgccctcgactgtgtgtgcccacatgtgccgagagatggcccagagccagttcccctccagctgcaagggcatggtgtccccagagctctgagtctgtcactctccctctgctactgctgctgatctgaatatggaaaccccatggttcccttccccattcggactgggtgtgtacaagcaaggacccagatgcatcagacacagcccccaagatgttcctttctactcggccagctcgggagccagacacagcactcacagcccaggccgtgatccaccctccccaagtccaccagggccagcggcccctcacctctctggtcactggtgagaccttccacaactttcctccagacctgccagcagatgtgcccaccaggggcattaggtatccgccggagcctggccatagggtagtctcgggagccgcgctgagatcttttgccacctgcattttagaagaacatggtctctgtctcctcggcccagccagctgtcccggcaaggcctgccgagggcagttttcaacctcatgaaggaaacacagtcctgccaaggagggggagtggcgcccatggggacaggcctcagtccttagaagccctctgggtagctgtgcccacccagccttcatggctgcaggtacaaggacctttgcttccatagagaaaacgcacagctcagaaagggggccacatgggcagaaacccaaaggaaggacaaaccacgaccaccgtggccatctgcagaatccctggaagagaaggaaggcagggtggagcggggggaagaccatcatggagagaaggaccacagcatcaggagacgggacacgccacacccagcaggcagcctgtgtgttgcttaattttttaagagcaagaggggtagagaggatcaagctggccctggctggagatggctagcccctgagacatgcacttctggttttgaaatgactctgtctgtggggcagcagaaactagagaaggcaagtggctgccccaccccaaggcgtgaccaggaggaacagcctgcagctcactccatgccacacgggtgggccaccagcctgctgtcagaagtctctgggctccaactggtcttgtaaccactgagcactgaaggagagaggtcttggtcagggctggacagcatgcccgggaggaccagcagaggattaaaggtgactgggaggaccagcggaggataaaagacactgctcagggcagggcttctaccctgcatccctggccaagaaaagggcagtccccatgtgggcttgcagggtcactctcaggggcctctttcagctggggctggcaacttgcgtctgggggacacctccaggtgtgtggggtgaggatttcctataaccagggctcccagaagctttgcttatgtaaggaggtctgggagccagcccattggaggccaccagccattttggcttcaaaggaccccacctcacccaggtctcagcggcagtgggcacagctatgtcttcaggagctcccgtcaaacctcatagctggggcgctcccagacaggccagtccagacaggacacgctgggcccctggcatccagaggaagagccaggagtgtgggaaggcccacagtgggggctgtggcttctgacactcaggtcatagcctcagaggtctgaggtcagcccccacagacccatccggcccgccccccaagtccctgcagagagcacttagagttatggcccaggccctggtccacccttcccctgtgcacctccggctgggtttgccaagtcagggagcagggctggccgcaggaactcccaaaccttggctttgaatattgttgtggaggtgtgctcgtccctttctggacgtgcaaggtacctgtcccagcaggtcagatggggccagctgaggcgctcccccaggcaggaagggccagccttcaccatcgcgtgggattgggaggaggggcctccgtgagcagcccctcctctgccgctgtcccagcccagtccctctcccggagccttggcagcctcccacaacccagacacttgcgttcacaagcaacctaaggggcaggtgaagaagcgcagccctgccagacgcgctagattcctctaaggtctctgagatgcaccgttttttaaaaaggcgtggggtgaactgattttgatcttcttgtctagatgcaataaataaatctgaagcatttaatgtagtcatcttgacattgggcctacactgtacgagttccttatgtttccttgagctaaaaatatgtaaataatttttgtcccagtgagaaccgagggttagaaaacctcgatgcctctgagcctcgggaccgctctagggaagtacctgctttcgccagcatgactcatgcttcgtgggtactgaacacgagggtggaaatgaaaactggaacttccttgtaaatttaaacttggcaataaaagagaaaaaaagttaaaaaaaaata

SEQ ID NO: 445057 - DNA, 5583 bp, Homo sapiens
gaacacgtttcttggtgttgctgtgatgaatggaaagagaggctctggcctctgtcttatttccaccccagtgtgtctctggtgttcaggtcgctgctgtcggacatgtgcttgatgtgtttggagtcatttatgcatatttattctccaacatgagcatgtgtataaatctagggctgaaaagctgtctggactcatcccagtctccattttggcttccagagatcgagatggtgatcatggagcgtagcaagctctcagagctggccgccagcacctccgtgcaggagcagaacaccacggacgaggagaaaagcgccgccgccacctgctctgagagcacgcaatggagcagacccttcctggatatggtgtaccacgcgctggacagcccggatgatgattaccatgccctgttcgtgctctgcctcctctatgccatgtctcataataaaggcatggatcctgaaaaattagagcgaatccagctccccgtgccaaatgcggccgagaagaccacctacaaccacccgctagctgaaagactcatcaggatcatgaacaacgctgcccagccagatgggaagatccggctggcgacgctggagctgagctgcctgcttctgaagcagcaagtcctgatgagtgctggctgcatcatgaaggacgtgcacctggcctgcctggagggtgcgagagaagaaagtgttcaccttgtacgacatttttataagggagaagacatttttttggacatgtttgaagatgagtataggagcatgacaatgaagcccatgaacgtggaatatctcatgatggacgcctccatcctgctgcccccaacaggcacgccactgacgggcattgacttcgtgaagcggctgccgtgtggcgatgtggagaagacccggcgggccatccgggtgttcttcatgctgcgttccctgtcactgcaattgcgaggggagcctgagacacagttgccgctgactcgggaggaggacctgatcaagactgatgatgtcctggatctgaataacagcgacttgattgcatgtacagtgatcaccaaggatggcggcatggtccagcgattcctggctgtggatatttaccagatgagtttggtggagcctgatgtgtccaggcttggctggggagtggtcaagtttgcaggcctattgcaggacatgcaggtgactggcgtggaggacgacagccgtgccctgaacatcaccatccacaagcctgcgtccagcccccattccaagcccttccccatcctccaggccaccttcatcttctcagaccacatccgctgcatcatcgccaagcagcgcctggccaaaggccgcatccaggcaaggcgcatgaagatgcagagaatagctgccctcctggacctcccaatccagcccaccactgaagtcctggggtttggactcggctcctccacctccactcagcacctgcctttccgcttctacgaccaggggcgccggggcagcagcgaccccacagtgcagcgctccgtgtttgcatcggtggacaaggtgccaggcttcgccgtggcccagtgcataaaccagcacagctccccgtccctgtcctcacagtcgccaccctccgccagcgggagccccagcggcagcgggagcaccagccactgcgactctggaggcaccagctcgtcctccaccccctccacagcccagagtccagcagatgcccccatgagtccagaactgcctaagcctcaccttcctgaccagttggtaatcgtcaacgaaacggaagcagactctaagcccagcaagaacgtggccaggagcgcagccgtggagacagccagcctgtcccccagcctcgtccctgcccggcagcccaccatttccctgctctgcgaggacacggctgacacgctgagcgtcgaatcgctgacccttgtccccccagttgacccccacagcctccgcagcctcaccggcatgcccccgctgtccacgccggctgccgcctgcacagagcccgtgggcgaagaggctgcatgtgctgagcctgtgggcaccgctgaggactgagtcagtgccggggcctccctttgtgtgtgtggccccgctggtagggaccccagtgccgctgactggcaagacacactgggagcacccaccattctgtgcggcccccagcagccatctcaaccacctatccctgcgctcccttgaatgggaagaagccccacgttgtccttgaattcctttttcactttgcatctcttcacgtgcaggctgggaccagcggagacaccgcggcgaatgcagatgactgcaccggccactcagggagctgcctgggctccgtgtctctgagccccgggtggcaggacccaccggcacctctttcttcctctgtcatatggctcctctgtcaccagccccagtgtgcacagaagaattggaccaggtcactgtacgtagaaatttgtagaaaagcagacttagataaacatctcctttggatatttatttccgcttttggcagcaggtgaacatttatttttaaaacttctatttaaaagaagtccaaaaacatcaacactaaggtttgatgtcatgtgaaaagtgtaataataacagttaagatttcatgatcattttcactggacctttcctgatattttgtttcagagttcttagtgtggctttttccatttatttaagtgattctttgttactcactaactctgcaagcctgtggaataatgaagtaccttcctggaaagtttggattattttttaaacaaaaacaagggagatacatgtattctcaggtacacacagagctgagagggctgaatggttttctgctatagcagccgagaggcctcccatcatggaaagatttctccaggaaaaggaggaatgtagccagctccccactcaggacgcttcctcatttctcttcaccaaaaccaaacagagacagcttccagcaccttcttcagtgttaccatctctaagaaggaaccagttgggaccgtgaagactcccgaccctgtggccatgatggaaatcaaaggaagacaccctctacgtcacctgccctcgactgtgtgtgcccacatgtgccgagagatggcccagagccagttcccctccagctgcaagggcatggtgtccccagagctctgagtctgtcactctccctctgctactgctgctgatctgaatatggaaaccccatggttcccttccccattcggactgggtgtgtacaagcaaggacccagatgcatcagacacagcccccaagatgttcctttctactcggccagctcgggagccagacacagcactcacagcccaggccgtgatccaccctccccaagtccaccagggccagcggcccctcacctctctggtcactggtgagaccttccacaactttcctccagacctgccagcagatgtgcccaccaggggcattaggtatccgccggagcctggccatagggtagtctcgggagccgcgctgagatcttttgccacctgcattttagaagaacatggtctctgtctcctcggcccagccagctgtcccggcaaggcctgccgagggcagttttcaacctcatgaaggaaacacagtcctgccaaggagggggagtggcgcccatggggacaggcctcagtccttagaagccctctgggtagctgtgcccacccagccttcatggctgcaggtacaaggacctttgcttccatagagaaaacgcacagctcagaaagggggccacatgggcagaaacccaaaggaaggacaaaccacgaccaccgtggccatctgcagaatccctggaagagaaggaaggcagggtggagcggggggaagaccatcatggagagaaggaccacagcatcaggagacgggacacgccacacccagcaggcagcctgtgtgttgcttaattttttaagagcaagaggggtagagaggatcaagctggccctggctggagatggctagcccctgagacatgcacttctggttttgaaatgactctgtctgtggggcagcagaaactagagaaggcaagtggctgccccaccccaaggcgtgaccaggaggaacagcctgcagctcactccatgccacacgggtgggccaccagcctgctgtcagaagtctctgggctccaactggtcttgtaaccactgagcactgaaggagagaggtcttggtcagggctggacagcatgcccgggaggaccagcagaggattaaaggtgactgggaggaccagcggaggataaaagacactgctcagggcagggcttctaccctgcatccctggccaagaaaagggcagtccccatgtgggcttgcagggtcactctcaggggcctctttcagctggggctggcaacttgcgtctgggggacacctccaggtgtgtggggtgaggatttcctataaccagggctcccagaagctttgcttatgtaaggaggtctgggagccagcccattggaggccaccagccattttggcttcaaaggaccccacctcacccaggtctcagcggcagtgggcacagctatgtcttcaggagctcccgtcaaacctcatagctggggcgctcccagacaggccagtccagacaggacacgctgggcccctggcatccagaggaagagccaggagtgtgggaaggcccacagtgggggctgtggcttctgacactcaggtcatagcctcagaggtctgaggtcagcccccacagacccatccggcccgccccccaagtccctgcagagagcacttagagttatggcccaggccctggtccacccttcccctgtgcacctccggctgggtttgccaagtcagggagcagggctggccgcaggaactcccaaaccttggctttgaatattgttgtggaggtgtgctcgtccctttctggacgtgcaaggtacctgtcccagcaggtcagatggggccagctgaggcgctcccccaggcaggaagggccagccttcaccatcgcgtgggattgggaggaggggcctccgtgagcagcccctcctctgccgctgtcccagcccagtccctctcccggagccttggcagcctcccacaacccagacacttgcgttcacaagcaacctaaggggcaggtgaagaagcgcagccctgccagacgcgctagattcctctaaggtctctgagatgcaccgttttttaaaaaggcgtggggtgaactgattttgatcttcttgtctagatgcaataaataaatctgaagcatttaatgtagtcatcttgacattgggcctacactgtacgagttccttatgtttccttgagctaaaaatatgtaaataatttttgtcccagtgagaaccgagggttagaaaacctcgatgcctctgagcctcgggaccgctctagggaagtacctgctttcgccagcatgactcatgcttcgtgggtactgaacacgagggtggaaatgaaaactggaacttccttgtaaatttaaacttggcaataaaagagaaaaaaagttaaaaaaaaata

SEQ ID NO: 445058 - DNA, 3983 bp, Homo sapiens
gtcaggagtggcaggaaaggacgccgacgagtgttcagcctgtcggaggccgacagtcatggcggccactgggtttagtgctccgaacggcagctgccacggcacctcacgcacagtcaattcagatgcccccatgagtccagaactgcctaagcctcaccttcctgaccagttggtaatcgtcaacgaaacggaagcagactctaagcccagcaagaacgtggccaggagcgcagccgtggagacagccagcctgtcccccagcctcgtccctgcccggcagcccaccatttccctgctctgcgaggacacggctgacacgctgagcgtcgaatcgctgacccttgtccccccagttgacccccacagcctccgcagcctcaccggcatgcccccgctgtccacgccggctgccgcctgcacagagcccgtgggcgaagaggctgcatgtgctgagcctgtgggcaccgctgaggactgagtcagtgccggggcctccctttgtgtgtgtggccccgctggtagggaccccagtgccgctgactggcaagacacactgggagcacccaccattctgtgcggcccccagcagccatctcaaccacctatccctgcgctcccttgaatgggaagaagccccacgttgtccttgaattcctttttcactttgcatctcttcacgtgcaggctgggaccagcggagacaccgcggcgaatgcagatgactgcaccggccactcagggagctgcctgggctccgtgtctctgagccccgggtggcaggacccaccggcacctctttcttcctctgtcatatggctcctctgtcaccagccccagtgtgcacagaagaattggaccaggtcactgtacgtagaaatttgtagaaaagcagacttagataaacatctcctttggatatttatttccgcttttggcagcaggtgaacatttatttttaaaacttctatttaaaagaagtccaaaaacatcaacactaaggtttgatgtcatgtgaaaagtgtaataataacagttaagatttcatgatcattttcactggacctttcctgatattttgtttcagagttcttagtgtggctttttccatttatttaagtgattctttgttactcactaactctgcaagcctgtggaataatgaagtaccttcctggaaagtttggattattttttaaacaaaaacaagggagatacatgtattctcaggtacacacagagctgagagggctgaatggttttctgctatagcagccgagaggcctcccatcatggaaagatttctccaggaaaaggaggaatgtagccagctccccactcaggacgcttcctcatttctcttcaccaaaaccaaacagagacagcttccagcaccttcttcagtgttaccatctctaagaaggaaccagttgggaccgtgaagactcccgaccctgtggccatgatggaaatcaaaggaagacaccctctacgtcacctgccctcgactgtgtgtgcccacatgtgccgagagatggcccagagccagttcccctccagctgcaagggcatggtgtccccagagctctgagtctgtcactctccctctgctactgctgctgatctgaatatggaaaccccatggttcccttccccattcggactgggtgtgtacaagcaaggacccagatgcatcagacacagcccccaagatgttcctttctactcggccagctcgggagccagacacagcactcacagcccaggccgtgatccaccctccccaagtccaccagggccagcggcccctcacctctctggtcactggtgagaccttccacaactttcctccagacctgccagcagatgtgcccaccaggggcattaggtatccgccggagcctggccatagggtagtctcgggagccgcgctgagatcttttgccacctgcattttagaagaacatggtctctgtctcctcggcccagccagctgtcccggcaaggcctgccgagggcagttttcaacctcatgaaggaaacacagtcctgccaaggagggggagtggcgcccatggggacaggcctcagtccttagaagccctctgggtagctgtgcccacccagccttcatggctgcaggtacaaggacctttgcttccatagagaaaacgcacagctcagaaagggggccacatgggcagaaacccaaaggaaggacaaaccacgaccaccgtggccatctgcagaatccctggaagagaaggaaggcagggtggagcggggggaagaccatcatggagagaaggaccacagcatcaggagacgggacacgccacacccagcaggcagcctgtgtgttgcttaattttttaagagcaagaggggtagagaggatcaagctggccctggctggagatggctagcccctgagacatgcacttctggttttgaaatgactctgtctgtggggcagcagaaactagagaaggcaagtggctgccccaccccaaggcgtgaccaggaggaacagcctgcagctcactccatgccacacgggtgggccaccagcctgctgtcagaagtctctgggctccaactggtcttgtaaccactgagcactgaaggagagaggtcttggtcagggctggacagcatgcccgggaggaccagcagaggattaaaggtgactgggaggaccagcggaggataaaagacactgctcagggcagggcttctaccctgcatccctggccaagaaaagggcagtccccatgtgggcttgcagggtcactctcaggggcctctttcagctggggctggcaacttgcgtctgggggacacctccaggtgtgtggggtgaggatttcctataaccagggctcccagaagctttgcttatgtaaggaggtctgggagccagcccattggaggccaccagccattttggcttcaaaggaccccacctcacccaggtctcagcggcagtgggcacagctatgtcttcaggagctcccgtcaaacctcatagctggggcgctcccagacaggccagtccagacaggacacgctgggcccctggcatccagaggaagagccaggagtgtgggaaggcccacagtgggggctgtggcttctgacactcaggtcatagcctcagaggtctgaggtcagcccccacagacccatccggcccgccccccaagtccctgcagagagcacttagagttatggcccaggccctggtccacccttcccctgtgcacctccggctgggtttgccaagtcagggagcagggctggccgcaggaactcccaaaccttggctttgaatattgttgtggaggtgtgctcgtccctttctggacgtgcaaggtacctgtcccagcaggtcagatggggccagctgaggcgctcccccaggcaggaagggccagccttcaccatcgcgtgggattgggaggaggggcctccgtgagcagcccctcctctgccgctgtcccagcccagtccctctcccggagccttggcagcctcccacaacccagacacttgcgttcacaagcaacctaaggggcaggtgaagaagcgcagccctgccagacgcgctagattcctctaaggtctctgagatgcaccgttttttaaaaaggcgtggggtgaactgattttgatcttcttgtctagatgcaataaataaatctgaagcatttaatgtagtcatcttgacattgggcctacactgtacgagttccttatgtttccttgagctaaaaatatgtaaataatttttgtcccagtgagaaccgagggttagaaaacctcgatgcctctgagcctcgggaccgctctagggaagtacctgctttcgccagcatgactcatgcttcgtgggtactgaacacgagggtggaaatgaaaactggaacttccttgtaaatttaaacttggcaataaaagagaaaaaaagttaaaaaaaaata

SEQ ID NO: 445059 - DNA, 6544 bp, Homo sapiens
tgtcagtgctgggctgtgggccggggaggaaggcggctcgcggttcctccaccgcctccgccgccgcatcctccgcttgtgctaccgccgcgggcgctgggccgctctgctggtccggcatgagaccgtgagacgagagacgggtcggggccgccgacatgtttggccgctcgcggagctgggtgggcgggggccatggcaagacttcccgcaacatccactccttggaccacctcaagtatctgtaccacgttttgaccaaaaacaccacagtcacagaacagaaccggaacctgctagtggagaccatccgttccatcactgagatcctgatctggggagatcaaaatgacagctctgtatttgacttcttcctggagaagaatatgtttgttttcttcttgaacatcttgcggcaaaagtcgggccgttacgtgtgcgttcagctgctgcagaccttgaacatcctctttgagaacatcagtcacgagacctcactttattatttgctctcaaataactacgtaaattctatcatcgttcataaatttgacttttctgatgaggagattatggcctattatatatcgttcctgaaaacactttcgttaaaactcaacaaccacactgtccatttcttttataatgagcacaccaatgactttgccctgtacacagaagccatcaagtttttcaaccaccctgaaagcatggttagaattgctgtaagaaccataactttgaatgtctataaaggtggataaccaggccatgctgcactacatccgagataaaactgctgttccttacttctccaatttggtctggttcattgggagccatgtgatcgaactcgatgactgcgtgcagactgatgaggagcatcggaatcggggtaaactgagtgatctggtggcagagcacctagaccacctgcactatctcaatgacatcctgatcatcaactgtgagttcctcaacgatgtgctcactgaccacctgctcaacaggctcttcctgcccctctacgtgtactcactggagaaccaggacaagggaggagaacggccgaaaattagcctgccggtgtctctttatcttctgtcacaggtcttcttaattatacatcatgcaccgctggtgaactcgttagctgaagtcattctgaatggtgatctgtctgagatgtacgctaagactgaacaggatattcagagaagttctgccaagcccagcattcggtgcttcattaaacccaccgagacactcgagcggtcccttgagatgaacaagcacaagggcaagaggcgggtgcaaaagagacccaactacaaaaacgttggggaagaagaagatgaggagaaagggcccaccgaggatgcccaagaagacgccgagaaggctaaaggtacagagggtggttcaaaaggcatcaagacgagtggggagagtgaagagatcgagatggtgatcatggagcgtagcaagctctcagagctggccgccagcacctccgtgcaggagcagaacaccacggacgaggagaaaagcgccgccgccacctgctctgagagcacgcaatggagcagacccttcctggatatggtgtaccacgcgctggacagcccggatgatgattaccatgccctgttcgtgctctgcctcctctatgccatgtctcataataaaggcatggatcctgaaaaattagagcgaatccagctccccgtgccaaatgcggccgagaagaccacctacaaccacccgctagctgaaagactcatcaggatcatgaacaacgctgcccagccagatgggaagatccggctggcgacgctggagctgagctgcctgcttctgaagcagcaagtcctgatgagtgctggctgcatcatgaaggacgtgcacctggcctgcctggagggtgcgagagaagaaagtgttcaccttgtacgacatttttataagggagaagacatttttttggacatgtttgaagatgagtataggagcatgacaatgaagcccatgaacgtggaatatctcatgatggacgcctccatcctgctgcccccaacaggcacgccactgacgggcattgacttcgtgaagcggctgccgtgtggcgatgtggagaagacccggcgggccatccgggtgttcttcatgctgcgttccctgtcactgcaattgcgaggggagcctgagacacagttgccgctgactcgggaggaggacctgatcaagactgatgatgtcctggatctgaataacagcgacttgattgcatgtacagtgatcaccaaggatggcggcatggtccagcgattcctggctgtggatatttaccagatgagtttggtggagcctgatgtgtccaggcttggctggggagtggtcaagtttgcaggcctattgcaggacatgcaggtgactggcgtggaggacgacagccgtgccctgaacatcaccatccacaagcctgcgtccagcccccattccaagcccttccccatcctccaggccaccttcatcttctcagaccacatccgctgcatcatcgccaagcagcgcctggccaaaggccgcatccaggcaaggcgcatgaagatgcagagaatagctgccctcctggacctcccaatccagcccaccactgaagtcctggggtttggactcggctcctccacctccactcagcacctgcctttccgcttctacgaccaggggcgccggggcagcagcgaccccacagtgcagcgctccgtgtttgcatcggtggacaaggtgccaggcttcgccgtggcccagtgcataaaccagcacagctccccgtccctgtcctcacagtcgccaccctccgccagcgggagccccagcggcagcgggagcaccagccactgcgactctggaggcaccagctcgtcctccaccccctccacagcccagagtccagcagatgcccccatgagtccagaactgcctaagcctcaccttcctgaccagttggtaatcgtcaacgaaacggaagcagactctaagcccagcaagaacgtggccaggagcgcagccgtggagacagccagcctgtcccccagcctcgtccctgcccggcagcccaccatttccctgctctgcgaggacacggctgacacgctgagcgtcgaatcgctgacccttgtccccccagttgacccccacagcctccgcagcctcaccggcatgcccccgctgtccacgccggctgccgcctgcacagagcccgtgggcgaagaggctgcatgtgctgagcctgtgggcaccgctgaggactgagtcagtgccggggcctccctttgtgtgtgtggccccgctggtagggaccccagtgccgctgactggcaagacacactgggagcacccaccattctgtgcggcccccagcagccatctcaaccacctatccctgcgctcccttgaatgggaagaagccccacgttgtccttgaattcctttttcactttgcatctcttcacgtgcaggctgggaccagcggagacaccgcggcgaatgcagatgactgcaccggccactcagggagctgcctgggctccgtgtctctgagccccgggtggcaggacccaccggcacctctttcttcctctgtcatatggctcctctgtcaccagccccagtgtgcacagaagaattggaccaggtcactgtacgtagaaatttgtagaaaagcagacttagataaacatctcctttggatatttatttccgcttttggcagcaggtgaacatttatttttaaaacttctatttaaaagaagtccaaaaacatcaacactaaggtttgatgtcatgtgaaaagtgtaataataacagttaagatttcatgatcattttcactggacctttcctgatattttgtttcagagttcttagtgtggctttttccatttatttaagtgattctttgttactcactaactctgcaagcctgtggaataatgaagtaccttcctggaaagtttggattattttttaaacaaaaacaagggagatacatgtattctcaggtacacacagagctgagagggctgaatggttttctgctatagcagccgagaggcctcccatcatggaaagatttctccaggaaaaggaggaatgtagccagctccccactcaggacgcttcctcatttctcttcaccaaaaccaaacagagacagcttccagcaccttcttcagtgttaccatctctaagaaggaaccagttgggaccgtgaagactcccgaccctgtggccatgatggaaatcaaaggaagacaccctctacgtcacctgccctcgactgtgtgtgcccacatgtgccgagagatggcccagagccagttcccctccagctgcaagggcatggtgtccccagagctctgagtctgtcactctccctctgctactgctgctgatctgaatatggaaaccccatggttcccttccccattcggactgggtgtgtacaagcaaggacccagatgcatcagacacagcccccaagatgttcctttctactcggccagctcgggagccagacacagcactcacagcccaggccgtgatccaccctccccaagtccaccagggccagcggcccctcacctctctggtcactggtgagaccttccacaactttcctccagacctgccagcagatgtgcccaccaggggcattaggtatccgccggagcctggccatagggtagtctcgggagccgcgctgagatcttttgccacctgcattttagaagaacatggtctctgtctcctcggcccagccagctgtcccggcaaggcctgccgagggcagttttcaacctcatgaaggaaacacagtcctgccaaggagggggagtggcgcccatggggacaggcctcagtccttagaagccctctgggtagctgtgcccacccagccttcatggctgcaggtacaaggacctttgcttccatagagaaaacgcacagctcagaaagggggccacatgggcagaaacccaaaggaaggacaaaccacgaccaccgtggccatctgcagaatccctggaagagaaggaaggcagggtggagcggggggaagaccatcatggagagaaggaccacagcatcaggagacgggacacgccacacccagcaggcagcctgtgtgttgcttaattttttaagagcaagaggggtagagaggatcaagctggccctggctggagatggctagcccctgagacatgcacttctggttttgaaatgactctgtctgtggggcagcagaaactagagaaggcaagtggctgccccaccccaaggcgtgaccaggaggaacagcctgcagctcactccatgccacacgggtgggccaccagcctgctgtcagaagtctctgggctccaactggtcttgtaaccactgagcactgaaggagagaggtcttggtcagggctggacagcatgcccgggaggaccagcagaggattaaaggtgactgggaggaccagcggaggataaaagacactgctcagggcagggcttctaccctgcatccctggccaagaaaagggcagtccccatgtgggcttgcagggtcactctcaggggcctctttcagctggggctggcaacttgcgtctgggggacacctccaggtgtgtggggtgaggatttcctataaccagggctcccagaagctttgcttatgtaaggaggtctgggagccagcccattggaggccaccagccattttggcttcaaaggaccccacctcacccaggtctcagcggcagtgggcacagctatgtcttcaggagctcccgtcaaacctcatagctggggcgctcccagacaggccagtccagacaggacacgctgggcccctggcatccagaggaagagccaggagtgtgggaaggcccacagtgggggctgtggcttctgacactcaggtcatagcctcagaggtctgaggtcagcccccacagacccatccggcccgccccccaagtccctgcagagagcacttagagttatggcccaggccctggtccacccttcccctgtgcacctccggctgggtttgccaagtcagggagcagggctggccgcaggaactcccaaaccttggctttgaatattgttgtggaggtgtgctcgtccctttctggacgtgcaaggtacctgtcccagcaggtcagatggggccagctgaggcgctcccccaggcaggaagggccagccttcaccatcgcgtgggattgggaggaggggcctccgtgagcagcccctcctctgccgctgtcccagcccagtccctctcccggagccttggcagcctcccacaacccagacacttgcgttcacaagcaacctaaggggcaggtgaagaagcgcagccctgccagacgcgctagattcctctaaggtctctgagatgcaccgttttttaaaaaggcgtggggtgaactgattttgatcttcttgtctagatgcaataaataaatctgaagca

SEQ ID NO: 445060 - DNA, 3436 bp, Homo sapiens
tgtcagtgctgggctgtgggccggggaggaaggcggctcgcggttcctccaccgcctccgccgccgcatcctccgcttgtgctaccgccgcgggcgctgggccgctctgctggtccggcatgagaccgtgagacgagagacgggtcggggccgccgacatgtttggccgctcgcggagctgggtgggcgggggccatggcaagacttcccgcaacatccactccttggaccacctcaagtatctgtaccacgttttgaccaaaaacaccacagtcacagaacagaaccggaacctgctagtggagaccatccgttccatcactgagatcctgatctggggagatcaaaatgacagctctgtatttgacttcttcctggagaagaatatgtttgttttcttcttgaacatcttgcggcaaaagtcgggccgttacgtgtgcgttcagctgctgcagaccttgaacatcctctttgagaacatcagtcacgagacctcactttattatttgctctcaaataactacgtaaattctatcatcgttcataaatttgacttttctgatgaggagattatggcctattatatatcgttcctgaaaacactttcgttaaaactcaacaaccacactgtccatttcttttataatgagcacaccaatgactttgccctgtacacagaagccatcaagtttttcaaccaccctgaaagcatggttagaattgctgtaagaaccataactttgaatgtctataaaggtggataaccaggccatgctgcactacatccgagataaaactgctgttccttacttctccaatttggtctggttcattgggagccatgtgatcgaactcgatgactgcgtgcagactgatgaggagcatcggaatcggggtaaactgagtgatctggtggcagagcacctagaccacctgcactatctcaatgacatcctgatcatcaactgtgagttcctcaacgatgtgctcactgaccacctgctcaacaggctcttcctgcccctctacgtgtactcactggagaaccaggacaagggaggagaacggccgaaaattagcctgccggtgtctctttatcttctgtcacaggtcttcttaattatacatcatgcaccgctggtgaactcgttagctgaagtcattctgaatggtgatctgtctgagatgtacgctaagactgaacaggatattcagagaagttctgccaagcccagcattcggtgcttcattaaacccaccgagacactcgagcggtcccttgagatgaacaagcacaagggcaagaggcgggtgcaaaagagacccaactacaaaaacgttggggaagaagaagatgaggagaaagggcccaccgaggatgcccaagaagacgccgagaaggctaaaggtacagagggtggttcaaaaggcatcaagacgagtggggagagtgaagagatcgagatggtgatcatggagcgtagcaagctctcagagctggccgccagcacctccgtgcaggagcagaacaccacggacgaggagaaaagcgccgccgccacctgctctgagagcacgcaatggagcagacccttcctggatatggtgtaccacgcgctggacagcccggatgatgattaccatgccctgttcgtgctctgcctcctctatgccatgtctcataataaaggcatggatcctgaaaaattagagcgaatccagctccccgtgccaaatgcggccgagaagaccacctacaaccacccgctagctgaaagactcatcaggatcatgaacaacgctgcccagccagatgggaagatccggctggcgacgctggagctgagctgcctgcttctgaagcagcaagtcctgatgagtgctggctgcatcatgaaggacgtgcacctggcctgcctggagggtgcgagagaagaaagtgttcaccttgtacgacatttttataagggagaagacatttttttggacatgtttgaagatgagtataggagcatgacaatgaagcccatgaacgtggaatatctcatgatggacgcctccatcctgctgcccccaacaggcacgccactgacgggcattgacttcgtgaagcggctgccgtgtggcgatgtggagaagacccggcgggccatccgggtgttcttcatgctgcgttccctgtcactgcaattgcgaggggagcctgagacacagttgccgctgactcgggaggaggacctgatcaagactgatgatgtcctggatctgaataacagcgacttgattgcatgtacagtgatcaccaaggatggcggcatggtccagcgattcctggctgtggatatttaccagatgagtttggtggagcctgatgtgtccaggcttggctggggagtggtcaagtttgcaggcctattgcaggacatgcaggtgactggcgtggaggacgacagccgtgccctgaacatcaccatccacaagcctgcgtccagcccccattccaagcccttccccatcctccaggccaccttcatcttctcagaccacatccgctgcatcatcgccaagcagcgcctggccaaaggccgcatccaggcaaggcgcatgaagatgcagagaatagctgccctcctggacctcccaatccagcccaccactgaagtcctggggtttggactcggctcctccacctccactcagcacctgcctttccgcttctacgaccaggggcgccggggcagcagcgaccccacagtgcagcgctccgtgtttgcatcggtggacaaggtgccaggcttcgccgtggcccagtgcataaaccagcacagctccccgtccctgtcctcacagtcgccaccctccgccagcgggagccccagcggcagcgggagcaccagccactgcgactctggaggcaccagctcgtcctccaccccctccacagcccagagtccagcaggtattggccacgtgactcagtgatatggggacatttggagaaccccgtgatccctcaccattaccaaaacccctgacctccaggtcctccttgtcacagcacttgaaggatgctgccgctcaggtgatctgcacatgaagcctctagagattcctctaacttgatgttccctcccaggctgggtcagctcccagatggggaagaattgctcctttttcaggccggtccccaccgaagctgtcactgactgcagagctgatgggcagcaggcgggctgcacctaaacccaccctatcatcacctccacagtcttaggtgtcacaaggaggggtctcccaaggggattgtttgcagtctaggaaaagaatcgcgttcctgctgattttttttttcctctgtaacataccagttttgtccttaaatgtggtgcggtccagttgttcgagtaggcacgcactttgccactctttggtagga

SEQ ID NO: 445061 - DNA, 2954 bp, Homo sapiens
tgtcagtgctgggctgtgggccggggaggaaggcggctcgcggttcctccaccgcctccgccgccgcatcctccgcttgtgctaccgccgcgggcgctgggccgctctgctggtccggcatgagaccgtgagacgagagacgggtcggggccgccgacatgtttggccgctcgcggagctgggtgggcgggggccatggcaagacttcccgcaacatccactccttggaccacctcaagtatctgtaccacgttttgaccaaaaacaccacagtcacagaacagaaccggaacctgctagtggagaccatccgttccatcactgagatcctgatctggggagatcaaaatgacagctctgtatttgacttcttcctggagaagaatatgtttgttttcttcttgaacatcttgcggcaaaagtcgggccgttacgtgtgcgttcagctgctgcagaccttgaacatcctctttgagaacatcagtcacgagacctcactttattatttgctctcaaataactacgtaaattctatcatcgttcataaatttgacttttctgatgaggagattatggcctattatatatcgttcctgaaaacactttcgttaaaactcaacaaccacactgtccatttcttttataatgagcacaccaatgactttgccctgtacacagaagccatcaagtttttcaaccaccctgaaagcatggttagaattgctgtaagaaccataactttgaatgtctataaaggtggataaccaggccatgctgcactacatccgagataaaactgctgttccttacttctccaatttggtctggttcattgggagccatgtgatcgaactcgatgactgcgtgcagactgatgaggagcatcggaatcggggtaaactgagtgatctggtggcagagcacctagaccacctgcactatctcaatgacatcctgatcatcaactgtgagttcctcaacgatgtgctcactgaccacctgctcaacaggctcttcctgcccctctacgtgtactcactggagaaccaggacaagggaggagaacggccgaaaattagcctgccggtgtctctttatcttctgtcacaggtcttcttaattatacatcatgcaccgctggtgaactcgttagctgaagtcattctgaatggtgatctgtctgagatgtacgctaagactgaacaggatattcagagaagttctgccaagcccagcattcggtgcttcattaaacccaccgagacactcgagcggtcccttgagatgaacaagcacaagggcaagaggcgggtgcaaaagagacccaactacaaaaacgttggggaagaagaagatgaggagaaagggcccaccgaggatgcccaagaagacgccgagaaggctaaaggtacagagggtggttcaaaaggcatcaagacgagtggggagagtgaagagatcgagatggtgatcatggagcgtagcaagctctcagagctggccgccagcacctccgtgcaggagcagaacaccacggacgaggagaaaagcgccgccgccacctgctctgagagcacgcaatggagcagacccttcctggatatggtgtaccacgcgctggacagcccggatgatgattaccatgccctgttcgtgctctgcctcctctatgccatgtctcataataaaggcatggatcctgaaaaattagagcgaatccagctccccgtgccaaatgcggccgagaagaccacctacaaccacccgctagctgaaagactcatcaggatcatgaacaacgctgcccagccagatgggaagatccggctggcgacgctggagctgagctgcctgcttctgaagcagcaagtcctgatgagtgctggctgcatcatgaaggacgtgcacctggcctgcctggagggtgcgagagaagaaagtgttcaccttgtacgacatttttataagggagaagacatttttttggacatgtttgaagatgagtataggagcatgacaatgaagcccatgaacgtggaatatctcatgatggacgcctccatcctgctgcccccaacaggcacgccactgacgggcattgacttcgtgaagcggctgccgtgtggcgatgtggagaagacccggcgggccatccgggtgttcttcatgctgcgttccctgtcactgcaattgcgaggggagcctgagacacagttgccgctgactcgggaggaggacctgatcaagactgatgatgtcctggatctgaataacagcgacttgattgcatgtacagtgatcaccaaggatggcggcatggtccagcgattcctggctgtggatatttaccagatgagtttggtggagcctgatgtgtccaggcttggctggggagtggtcaagtttgcaggcctattgcaggacatgcaggtgactggcgtggaggacgacagccgtgccctgaacatcaccatccacaagcctgcgtccagcccccattccaagcccttccccatcctccaggccaccttcatcttctcagaccacatccgctgcatcatcgccaagcagcgcctggccaaaggccgcatccaggcaaggcgcatgaagatgcagagaatagctgccctcctggacctcccaatccagcccaccactgaagtcctggggtttggactcggctcctccacctccactcagcacctgcctttccgcttctacgaccaggggcgccggggcagcagcgaccccacagtgcagcgctccgtgtttgcatcggtggacaaggtgccaggttttcaaggatagtgtttaaaatctgagaggatttatccatggataaagagctataggctaaaagactctgcaagttcccagctatttttgtatgttggacatgttatccgttgaaaagcaatcagaaataaaaagtatttaagcgttgtgaggtgcag

SEQ ID NO: 445062 - DNA, 3744 bp, Homo sapiens
tgtcagtgctgggctgtgggccggggaggaaggcggctcgcggttcctccaccgcctccgccgccgcatcctccgcttgtgctaccgccgcgggcgctgggccgctctgctggtccggcatgagaccgtgagacgagagacgggtcggggccgccgacatgtttggccgctcgcggagctgggtgggcgggggccatggcaagacttcccgcaacatccactccttggaccacctcaagtatctgtaccacgttttgaccaaaaacaccacagtcacagaacagaaccggaacctgctagtggagaccatccgttccatcactgagatcctgatctggggagatcaaaatgacagctctgtatttgacttcttcctggagaagaatatgtttgttttcttcttgaacatcttgcggcaaaagtcgggccgttacgtgtgcgttcagctgctgcagaccttgaacatcctctttgagaacatcagtcacgagacctcactttattatttgctctcaaataactacgtaaattctatcatcgttcataaatttgacttttctgatgaggagattatggcctattatatatcgttcctgaaaacactttcgttaaaactcaacaaccacactgtccatttcttttataatgagcacaccaatgactttgccctgtacacagaagccatcaagtttttcaaccaccctgaaagcatggttagaattgctgtaagaaccataactttgaatgtctataaaggtggataaccaggccatgctgcactacatccgagataaaactgctgttccttacttctccaatttggtctggttcattgggagccatgtgatcgaactcgatgactgcgtgcagactgatgaggagcatcggaatcggggtaaactgagtgatctggtggcagagcacctagaccacctgcactatctcaatgacatcctgatcatcaactgtgagttcctcaacgatgtgctcactgaccacctgctcaacaggctcttcctgcccctctacgtgtactcactggagaaccaggacaagggaggagaacggccgaaaattagcctgccggtgtctctttatcttctgtcacaggtcttcttaattatacatcatgcaccgctggtgaactcgttagctgaagtcattctgaatggtgatctgtctgagatgtacgctaagactgaacaggatattcagagaagttctgccaagcccagcattcggtgcttcattaaacccaccgagacactcgagcggtcccttgagatgaacaagcacaagggcaagaggcgggtgcaaaagagacccaactacaaaaacgttggggaagaagaagatgaggagaaagggcccaccgaggatgcccaagaagacgccgagaaggctaaaggtacagagggtggttcaaaaggcatcaagacgagtggggagagtgaagagatcgagatggtgatcatggagcgtagcaagctctcagagctggccgccagcacctccgtgcaggagcagaacaccacggacgaggagaaaagcgccgccgccacctgctctgagagcacgcaatggagcagacccttcctggatatggtgtaccacgcgctggacagcccggatgatgattaccatgccctgttcgtgctctgcctcctctatgccatgtctcataataaaggcatggatcctgaaaaattagagcgaatccagctccccgtgccaaatgcggccgagaagaccacctacaaccacccgctagctgaaagactcatcaggatcatgaacaacgctgcccagccagatgggaagatccggctggcgacgctggagctgagctgcctgcttctgaagcagcaagtcctgatgagtgctggctgcatcatgaaggacgtgcacctggcctgcctggagggtgcgagagaagaaagtgttcaccttgtacgacatttttataagggagaagacatttttttggacatgtttgaagatgagtataggagcatgacaatgaagcccatgaacgtggaatatctcatgatggacgcctccatcctgctgcccccaacaggcacgccactgacgggcattgacttcgtgaagcggctgccgtgtggcgatgtggagaagacccggcgggccatccgggtgttcttcatgctgcgttccctgtcactgcaattgcgaggggagcctgagacacagttgccgctgactcgggaggaggacctgatcaagactgatgatgtcctggatctgaataacagcgacttgattgcatgtacagtgatcaccaaggatggcggcatggtccagcgattcctggctgtggatatttaccagatgagtttggtggagcctgatgtgtccaggcttggctggggagtggtcaagtttgcaggcctattgcaggacatgcaggtgactggcgtggaggacgacagccgtgccctgaacatcaccatccacaagcctgcgtccagcccccattccaagcccttccccatcctccaggccaccttcatcttctcagaccacatccgctgcatcatcgccaagcagcgcctggccaaaggccgcatccaggcaaggcgcatgaagatgcagagaatagctgccctcctggacctcccaatccagcccaccactgaagtcctggggtttggactcggctcctccacctccactcagcacctgcctttccgcttctacgaccaggggcgccggggcagcagcgaccccacagtgcagcgctccgtgtttgcatcggtggacaaggtgccaggcttcgccgtggcccagtgcataaaccagcacagctccccgtccctgtcctcacagtcgccaccctccgccagcgggagccccagcggcagcgggagcaccagccactgcgactctggaggcaccagctcgtcctccaccccctccacagcccagagtccagcagatgcccccatgagtccagaactgcctaagcctcaccttcctgaccagttggtaatcgtcaacgaaacggaagcagactctaagcccagcaagaacgtggccaggagcgcagccgtggagacagccagcctgtcccccagcctcgtccctgcccggcagcccaccatttccctgctctgcgaggacacggctgacacgctgagcgtcgaatcgctgacccttgtccccccagttgacccccacagcctccgcagcctcaccggcatgcccccgctgtccacgccggctgccgcctgcacagagcccgtgggcgaagaggctgcatgtgctgagcctgtgggcaccgctgaggactgagtcagtgccggggcctccctttgtgtgtgtggccccgctggtagggaccccagtgccgctgactggcaagacacactgggagcacccaccattctgtgcggcccccagcagccatctcaaccacctatccctgcgctcccttgaatgggaagaagccccacgttgtccttgaattcctttttcactttgcatctcttcacgtgcaggctgggaccagcggagacaccgcggcgaatgcagatgactgcaccgcctcccacaacccagacacttgcgttcacaagcaacctaaggggcaggtgaagaagcgcagccctgccagacgcgctagattcctctaaggtctctgagatgcaccgttttttaaaaaggcgtggggtgaactgattttgatcttcttgtctagatgcaataaataaatctgaagca

SEQ ID NO: 445063 - DNA, 2131 bp, Homo sapiens
tgtcagtgctgggctgtgggccggggaggaaggcggctcgcggttcctccaccgcctccgccgccgcatcctccgcttgtgctaccgccgcgggcgctgggccgctctgctggtccggcatgagaccgtgagacgagagacgggtcggggccgccgacatgtttggccgctcgcggagctgggtgggcgggggccatggcaagacttcccgcaacatccactccttggaccacctcaagtatctgtaccacgttttgaccaaaaacaccacagtcacagaacagaaccggaacctgctagtggagaccatccgttccatcactgagatcctgatctggggagatcaaaatgacagctctgtatttgacttcttcctggagaagaatatgtttgttttcttcttgaacatcttgcggcaaaagtcgggccgttacgtgtgcgttcagctgctgcagaccttgaacatcctctttgagaacatcagtcacgagacctcactttattatttgctctcaaataactacgtaaattctatcatcgttcataaatttgacttttctgatgaggagattatggcctattatatatcgttcctgaaaacactttcgttaaaactcaacaaccacactgtccatttcttttataatgagcacaccaatgactttgccctgtacacagaagccatcaagtttttcaaccaccctgaaagcatggttagaattgctgtaagaaccataactttgaatgtctataaaggtggataaccaggccatgctgcactacatccgagataaaactgctgttccttacttctccaatttggtctggttcattgggagccatgtgatcgaactcgatgactgcgtgcagactgatgaggagcatcggaatcggggtaaactgagtgatctggtggcagagcacctagaccacctgcactatctcaatgacatcctgatcatcaactgtgagttcctcaacgatgtgctcactgaccacctgctcaacaggctcttcctgcccctctacgtgtactcactggagaaccaggacaagggaggagaacggccgaaaattagcctgccggtgtctctttatcttctgtcacaggtcttcttaattatacatcatgcaccgctggtgaactcgttagctgaagtcattctgaatggtgatctgtctgagatgtacgctaagactgaacaggatattcagagaagttctgccaagcccagcattcggtgcttcattaaacccaccgagacactcgagcggtcccttgagatgaacaagcacaagggcaagaggcgggtgcaaaagagacccaactacaaaaacgttggggaagaagaagatgaggagaaagggcccaccgaggatgcccaagaagacgccgagaaggctaaaggtacagagggtggttcaaaaggcatcaagacgagtggggagagtgaagagatcgagatggtgatcatggagcgtagcaagctctcagagctggccgccagcacctccgtgcaggagcagaacaccacggacgaggagaaaagcgccgccgccacctgctctgagagcacgcaatggagcagacccttcctggatatggtgtaccacgcgctggacagcccggatgatgattaccatgccctgttcgtgctctgcctcctctatgccatgtctcataataaaggcatggatcctgaaaaattagagcgaatccagctccccgtgccaaatgcggccgagaagaccacctacaaccacccgctagctgaaagactcatcaggatcatgaacaacgctgcccagccagatgggaagatccggctggcgacgctggagctgagctgcctgcttctgaagcagcaagtcctgatgagtgctggctgcatcatgaaggacgtgcacctggcctgcctggagggtgcgagagaagaaagtgttcaccttgtacgacatttttataaggtaattggcagagcacagatggacagcagcatggtgtgtattgtagaaacagaagtgtggtgtctggttctatgcagataaacgttatatgtcttcagttattttttatgcctataattactgaataaaaatgctcaatttcatagtccctagagtagcaata

SEQ ID NO: 445064 - DNA, 432 bp, Homo sapiens
gagctgaccccagtcctcatggaaaacaggcaccagccaccaccaccagcatccgctcctttggggtactctgtgcctcctcccacactgtcctctcccactgggcctggtctgccttgtgcccatccatgactctgttggacttgggaggctgtcgatcttagatcaaaagcagagatgaatttggagacctctttctagatgcctcatgatgccacagctcctagccaccctcctcccaaacccaacgaatgccttttcctttgcttctcactgtgcaggacatgcaggtgactggcgtggaggacgacagccgtgccctgaacatcaccatccacaagcctgcgtccagcccccattccaagcccttccccatcctccaggccaccttcatcttctcagaccacatccgctgcatcatcgccaagcagc

SEQ ID NO: 445065 - DNA, 350 bp, Homo sapiens
aagatgcacgcattcctcatattcacacagcccaaatgcccgcccccccccccacccaccccctgccggtagcaaaaggggcattagacttggcagccctcacaggcagaccttcacccgacagcaaaaacatttctaagggcacaattaggacacagagagaaagcaagatactgaaagaccattttttcttttctgcaggttttcaaggatagtgtttaaaatctgagaggatttatccatggataaagagctataggctaaaagactctgcaagttcccagctatttttgtatgttggacatgttatccgttgaaaagcaatcagaaataaaaagtatttaagcgtt

SEQ ID NO: 445066 - DNA, 6817 bp, Homo sapiens
tgtcagtgctgggctgtgggccggggaggaaggcggctcgcggttcctccaccgcctccgccgccgcatcctccgcttgtgctaccgccgcgggcgctgggccgctctgctggtccggcatgagaccgtgagacgagagacgggtcggggccgccgacatgtttggccgctcgcggagctgggtgggcgggggccatggcaagacttcccgcaacatccactccttggaccacctcaagtatctgtaccacgttttgaccaaaaacaccacagtcacagaacagaaccggaacctgctagtggagaccatccgttccatcactgagatcctgatctggggagatcaaaatgacagctctgtatttgacttcttcctggagaagaatatgtttgttttcttcttgaacatcttgcggcaaaagtcgggccgttacgtgtgcgttcagctgctgcagaccttgaacatcctctttgagaacatcagtcacgagacctcactttattatttgctctcaaataactacgtaaattctatcatcgttcataaatttgacttttctgatgaggagattatggcctattatatatcgttcctgaaaacactttcgttaaaactcaacaaccacactgtccatttcttttataatgagcacaccaatgactttgccctgtacacagaagccatcaagtttttcaaccaccctgaaagcatggttagaattgctgtaagaaccataactttgaatgtctataaaggtggataaccaggccatgctgcactacatccgagataaaactgctgttccttacttctccaatttggtctggttcattgggagccatgtgatcgaactcgatgactgcgtgcagactgatgaggagcatcggaatcggggtaaactgagtgatctggtggcagagcacctagaccacctgcactatctcaatgacatcctgatcatcaactgtgagttcctcaacgatgtgctcactgaccacctgctcaacaggctcttcctgcccctctacgtgtactcactggagaaccaggacaagggaggagaacggccgaaaattagcctgccggtgtctctttatcttctgtcacaggtcttcttaattatacatcatgcaccgctggtgaactcgttagctgaagtcattctgaatggtgatctgtctgagatgtacgctaagactgaacaggatattcagagaagttctgccaagcccagcattcggtgcttcattaaacccaccgagacactcgagcggtcccttgagatgaacaagcacaagggcaagaggcgggtgcaaaagagacccaactacaaaaacgttggggaagaagaagatgaggagaaagggcccaccgaggatgcccaagaagacgccgagaaggctaaaggtacagagggtggttcaaaaggcatcaagacgagtggggagagtgaagagatcgagatggtgatcatggagcgtagcaagctctcagagctggccgccagcacctccgtgcaggagcagaacaccacggacgaggagaaaagcgccgccgccacctgctctgagagcacgcaatggagcagacccttcctggatatggtgtaccacgcgctggacagcccggatgatgattaccatgccctgttcgtgctctgcctcctctatgccatgtctcataataaaggcatggatcctgaaaaattagagcgaatccagctccccgtgccaaatgcggccgagaagaccacctacaaccacccgctagctgaaagactcatcaggatcatgaacaacgctgcccagccagatgggaagatccggctggcgacgctggagctgagctgcctgcttctgaagcagcaagtcctgatgagtgctggctgcatcatgaaggacgtgcacctggcctgcctggagggtgcgagagaagaaagtgttcaccttgtacgacatttttataagggagaagacatttttttggacatgtttgaagatgagtataggagcatgacaatgaagcccatgaacgtggaatatctcatgatggacgcctccatcctgctgcccccaacaggcacgccactgacgggcattgacttcgtgaagcggctgccgtgtggcgatgtggagaagacccggcgggccatccgggtgttcttcatgctgcgttccctgtcactgcaattgcgaggggagcctgagacacagttgccgctgactcgggaggaggacctgatcaagactgatgatgtcctggatctgaataacagcgacttgattgcatgtacagtgatcaccaaggatggcggcatggtccagcgattcctggctgtggatatttaccagatgagtttggtggagcctgatgtgtccaggcttggctggggagtggtcaagtttgcaggcctattgcaggacatgcaggtgactggcgtggaggacgacagccgtgccctgaacatcaccatccacaagcctgcgtccagcccccattccaagcccttccccatcctccaggccaccttcatcttctcagaccacatccgctgcatcatcgccaagcagcgcctggccaaaggccgcatccaggcaaggcgcatgaagatgcagagaatagctgccctcctggacctcccaatccagcccaccactgaagtcctggggtttggactcggctcctccacctccactcagcacctgcctttccgcttctacgaccaggggcgccggggcagcagcgaccccacagtgcagcgctccgtgtttgcatcggtggacaaggtgccaggcttcgccgtggcccagtgcataaaccagcacagctccccgtccctgtcctcacagtcgccaccctccgccagcgggagccccagcggcagcgggagcaccagccactgcgactctggaggcaccagctcgtcctccaccccctccacagcccagagtccagcagatgcccccatgagtccagaactgcctaagcctcaccttcctgaccagttggtaatcgtcaacgaaacggaagcagactctaagcccagcaagaacgtggccaggagcgcagccgtggagacagccagcctgtcccccagcctcgtccctgcccggcagcccaccatttccctgctctgcgaggacacggctgacacgctgagcgtcgaatcgctgacccttgtccccccagttgacccccacagcctccgcagcctcaccggcatgcccccgctgtccacgccggctgccgcctgcacagagcccgtgggcgaagaggctgcatgtgctgagcctgtgggcaccgctgaggactgagtcagtgccggggcctccctttgtgtgtgtggccccgctggtagggaccccagtgccgctgactggcaagacacactgggagcacccaccattctgtgcggcccccagcagccatctcaaccacctatccctgcgctcccttgaatgggaagaagccccacgttgtccttgaattcctttttcactttgcatctcttcacgtgcaggctgggaccagcggagacaccgcggcgaatgcagatgactgcaccggccactcagggagctgcctgggctccgtgtctctgagccccgggtggcaggacccaccggcacctctttcttcctctgtcatatggctcctctgtcaccagccccagtgtgcacagaagaattggaccaggtcactgtacgtagaaatttgtagaaaagcagacttagataaacatctcctttggatatttatttccgcttttggcagcaggtgaacatttatttttaaaacttctatttaaaagaagtccaaaaacatcaacactaaggtttgatgtcatgtgaaaagtgtaataataacagttaagatttcatgatcattttcactggacctttcctgatattttgtttcagagttcttagtgtggctttttccatttatttaagtgattctttgttactcactaactctgcaagcctgtggaataatgaagtaccttcctggaaagtttggattattttttaaacaaaaacaagggagatacatgtattctcaggtacacacagagctgagagggctgaatggttttctgctatagcagccgagaggcctcccatcatggaaagatttctccaggaaaaggaggaatgtagccagctccccactcaggacgcttcctcatttctcttcaccaaaaccaaacagagacagcttccagcaccttcttcagtgttaccatctctaagaaggaaccagttgggaccgtgaagactcccgaccctgtggccatgatggaaatcaaaggaagacaccctctacgtcacctgccctcgactgtgtgtgcccacatgtgccgagagatggcccagagccagttcccctccagctgcaagggcatggtgtccccagagctctgagtctgtcactctccctctgctactgctgctgatctgaatatggaaaccccatggttcccttccccattcggactgggtgtgtacaagcaaggacccagatgcatcagacacagcccccaagatgttcctttctactcggccagctcgggagccagacacagcactcacagcccaggccgtgatccaccctccccaagtccaccagggccagcggcccctcacctctctggtcactggtgagaccttccacaactttcctccagacctgccagcagatgtgcccaccaggggcattaggtatccgccggagcctggccatagggtagtctcgggagccgcgctgagatcttttgccacctgcattttagaagaacatggtctctgtctcctcggcccagccagctgtcccggcaaggcctgccgagggcagttttcaacctcatgaaggaaacacagtcctgccaaggagggggagtggcgcccatggggacaggcctcagtccttagaagccctctgggtagctgtgcccacccagccttcatggctgcaggtacaaggacctttgcttccatagagaaaacgcacagctcagaaagggggccacatgggcagaaacccaaaggaaggacaaaccacgaccaccgtggccatctgcagaatccctggaagagaaggaaggcagggtggagcggggggaagaccatcatggagagaaggaccacagcatcaggagacgggacacgccacacccagcaggcagcctgtgtgttgcttaattttttaagagcaagaggggtagagaggatcaagctggccctggctggagatggctagcccctgagacatgcacttctggttttgaaatgactctgtctgtggggcagcagaaactagagaaggcaagtggctgccccaccccaaggcgtgaccaggaggaacagcctgcagctcactccatgccacacgggtgggccaccagcctgctgtcagaagtctctgggctccaactggtcttgtaaccactgagcactgaaggagagaggtcttggtcagggctggacagcatgcccgggaggaccagcagaggattaaaggtgactgggaggaccagcggaggataaaagacactgctcagggcagggcttctaccctgcatccctggccaagaaaagggcagtccccatgtgggcttgcagggtcactctcaggggcctctttcagctggggctggcaacttgcgtctgggggacacctccaggtgtgtggggtgaggatttcctataaccagggctcccagaagctttgcttatgtaaggaggtctgggagccagcccattggaggccaccagccattttggcttcaaaggaccccacctcacccaggtctcagcggcagtgggcacagctatgtcttcaggagctcccgtcaaacctcatagctggggcgctcccagacaggccagtccagacaggacacgctgggcccctggcatccagaggaagagccaggagtgtgggaaggcccacagtgggggctgtggcttctgacactcaggtcatagcctcagaggtctgaggtcagcccccacagacccatccggcccgccccccaagtccctgcagagagcacttagagttatggcccaggccctggtccacccttcccctgtgcacctccggctgggtttgccaagtcagggagcagggctggccgcaggaactcccaaaccttggctttgaatattgttgtggaggtgtgctcgtccctttctggacgtgcaaggtacctgtcccagcaggtcagatggggccagctgaggcgctcccccaggcaggaagggccagccttcaccatcgcgtgggattgggaggaggggcctccgtgagcagcccctcctctgccgctgtcccagcccagtccctctcccggagccttggcagcctcccacaacccagacacttgcgttcacaagcaacctaaggggcaggtgaagaagcgcagccctgccagacgcgctagattcctctaaggtctctgagatgcaccgttttttaaaaaggcgtggggtgaactgattttgatcttcttgtctagatgcaataaataaatctgaagcatttaatgtagtcatcttgacattgggcctacactgtacgagttccttatgtttccttgagctaaaaatatgtaaataatttttgtcccagtgagaaccgagggttagaaaacctcgatgcctctgagcctcgggaccgctctagggaagtacctgctttcgccagcatgactcatgcttcgtgggtactgaacacgagggtggaaatgaaaactggaacttccttgtaaatttaaacttggcaataaaagagaaaaaaagttaaaaaaaaata

SEQ ID NO: 445067 - DNA, 5772 bp, Homo sapiens
ctagaggatcctgcaggagagagaatgcgaaaattagctgcggtgctctttatcttctgtcacaggtcttcttaattatacatcatgcaccgctggtgaactcgttagctgaagtcattctgaatggtgatctgtctgagatgtacgctaagactgaacaggatattcagagaagttctgccaagcccagcattcggtgcttcattaaacccaccgagacactcgagcggtcccttgagatgaacaagcacaagggcaagaggcgggtgcaaaagagacccaactacaaaaacgttggggaagaagaagatgaggagaaagggcccaccgaggatgcccaagaagacgccgagaaggctaaaggtacagagggtggttcaaaaggcatcaagacgagtggggagagtgaagagatcgagatggtgatcatggagcgtagcaagctctcagagctggccgccagcacctccgtgcaggagcagaacaccacggacgaggagaaaagcgccgccgccacctgctctgagagcacgcaatggagcagacccttcctggatatggtgtaccacgcgctggacagcccggatgatgattaccatgccctgttcgtgctctgcctcctctatgccatgtctcataataaaggcatggatcctgaaaaattagagcgaatccagctccccgtgccaaatgcggccgagaagaccacctacaaccacccgctagctgaaagactcatcaggatcatgaacaacgctgcccagccagatgggaagatccggctggcgacgctggagctgagctgcctgcttctgaagcagcaagtcctgatgagtgctggctgcatcatgaaggacgtgcacctggcctgcctggagggtgcgagagaagaaagtgttcaccttgtacgacatttttataagggagaagacatttttttggacatgtttgaagatgagtataggagcatgacaatgaagcccatgaacgtggaatatctcatgatggacgcctccatcctgctgcccccaacaggcacgccactgacgggcattgacttcgtgaagcggctgccgtgtggcgatgtggagaagacccggcgggccatccgggtgttcttcatgctgcgttccctgtcactgcaattgcgaggggagcctgagacacagttgccgctgactcgggaggaggacctgatcaagactgatgatgtcctggatctgaataacagcgacttgattgcatgtacagtgatcaccaaggatggcggcatggtccagcgattcctggctgtggatatttaccagatgagtttggtggagcctgatgtgtccaggcttggctggggagtggtcaagtttgcaggcctattgcaggacatgcaggtgactggcgtggaggacgacagccgtgccctgaacatcaccatccacaagcctgcgtccagcccccattccaagcccttccccatcctccaggccaccttcatcttctcagaccacatccgctgcatcatcgccaagcagcgcctggccaaaggccgcatccaggcaaggcgcatgaagatgcagagaatagctgccctcctggacctcccaatccagcccaccactgaagtcctggggtttggactcggctcctccacctccactcagcacctgcctttccgcttctacgaccaggggcgccggggcagcagcgaccccacagtgcagcgctccgtgtttgcatcggtggacaaggtgccaggcttcgccgtggcccagtgcataaaccagcacagctccccgtccctgtcctcacagtcgccaccctccgccagcgggagccccagcggcagcgggagcaccagccactgcgactctggaggcaccagctcgtcctccaccccctccacagcccagagtccagcagatgcccccatgagtccagaactgcctaagcctcaccttcctgaccagttggtaatcgtcaacgaaacggaagcagactctaagcccagcaagaacgtggccaggagcgcagccgtggagacagccagcctgtcccccagcctcgtccctgcccggcagcccaccatttccctgctctgcgaggacacggctgacacgctgagcgtcgaatcgctgacccttgtccccccagttgacccccacagcctccgcagcctcaccggcatgcccccgctgtccacgccggctgccgcctgcacagagcccgtgggcgaagaggctgcatgtgctgagcctgtgggcaccgctgaggactgagtcagtgccggggcctccctttgtgtgtgtggccccgctggtagggaccccagtgccgctgactggcaagacacactgggagcacccaccattctgtgcggcccccagcagccatctcaaccacctatccctgcgctcccttgaatgggaagaagccccacgttgtccttgaattcctttttcactttgcatctcttcacgtgcaggctgggaccagcggagacaccgcggcgaatgcagatgactgcaccggccactcagggagctgcctgggctccgtgtctctgagccccgggtggcaggacccaccggcacctctttcttcctctgtcatatggctcctctgtcaccagccccagtgtgcacagaagaattggaccaggtcactgtacgtagaaatttgtagaaaagcagacttagataaacatctcctttggatatttatttccgcttttggcagcaggtgaacatttatttttaaaacttctatttaaaagaagtccaaaaacatcaacactaaggtttgatgtcatgtgaaaagtgtaataataacagttaagatttcatgatcattttcactggacctttcctgatattttgtttcagagttcttagtgtggctttttccatttatttaagtgattctttgttactcactaactctgcaagcctgtggaataatgaagtaccttcctggaaagtttggattattttttaaacaaaaacaagggagatacatgtattctcaggtacacacagagctgagagggctgaatggttttctgctatagcagccgagaggcctcccatcatggaaagatttctccaggaaaaggaggaatgtagccagctccccactcaggacgcttcctcatttctcttcaccaaaaccaaacagagacagcttccagcaccttcttcagtgttaccatctctaagaaggaaccagttgggaccgtgaagactcccgaccctgtggccatgatggaaatcaaaggaagacaccctctacgtcacctgccctcgactgtgtgtgcccacatgtgccgagagatggcccagagccagttcccctccagctgcaagggcatggtgtccccagagctctgagtctgtcactctccctctgctactgctgctgatctgaatatggaaaccccatggttcccttccccattcggactgggtgtgtacaagcaaggacccagatgcatcagacacagcccccaagatgttcctttctactcggccagctcgggagccagacacagcactcacagcccaggccgtgatccaccctccccaagtccaccagggccagcggcccctcacctctctggtcactggtgagaccttccacaactttcctccagacctgccagcagatgtgcccaccaggggcattaggtatccgccggagcctggccatagggtagtctcgggagccgcgctgagatcttttgccacctgcattttagaagaacatggtctctgtctcctcggcccagccagctgtcccggcaaggcctgccgagggcagttttcaacctcatgaaggaaacacagtcctgccaaggagggggagtggcgcccatggggacaggcctcagtccttagaagccctctgggtagctgtgcccacccagccttcatggctgcaggtacaaggacctttgcttccatagagaaaacgcacagctcagaaagggggccacatgggcagaaacccaaaggaaggacaaaccacgaccaccgtggccatctgcagaatccctggaagagaaggaaggcagggtggagcggggggaagaccatcatggagagaaggaccacagcatcaggagacgggacacgccacacccagcaggcagcctgtgtgttgcttaattttttaagagcaagaggggtagagaggatcaagctggccctggctggagatggctagcccctgagacatgcacttctggttttgaaatgactctgtctgtggggcagcagaaactagagaaggcaagtggctgccccaccccaaggcgtgaccaggaggaacagcctgcagctcactccatgccacacgggtgggccaccagcctgctgtcagaagtctctgggctccaactggtcttgtaaccactgagcactgaaggagagaggtcttggtcagggctggacagcatgcccgggaggaccagcagaggattaaaggtgactgggaggaccagcggaggataaaagacactgctcagggcagggcttctaccctgcatccctggccaagaaaagggcagtccccatgtgggcttgcagggtcactctcaggggcctctttcagctggggctggcaacttgcgtctgggggacacctccaggtgtgtggggtgaggatttcctataaccagggctcccagaagctttgcttatgtaaggaggtctgggagccagcccattggaggccaccagccattttggcttcaaaggaccccacctcacccaggtctcagcggcagtgggcacagctatgtcttcaggagctcccgtcaaacctcatagctggggcgctcccagacaggccagtccagacaggacacgctgggcccctggcatccagaggaagagccaggagtgtgggaaggcccacagtgggggctgtggcttctgacactcaggtcatagcctcagaggtctgaggtcagcccccacagacccatccggcccgccccccaagtccctgcagagagcacttagagttatggcccaggccctggtccacccttcccctgtgcacctccggctgggtttgccaagtcagggagcagggctggccgcaggaactcccaaaccttggctttgaatattgttgtggaggtgtgctcgtccctttctggacgtgcaaggtacctgtcccagcaggtcagatggggccagctgaggcgctcccccaggcaggaagggccagccttcaccatcgcgtgggattgggaggaggggcctccgtgagcagcccctcctctgccgctgtcccagcccagtccctctcccggagccttggcagcctcccacaacccagacacttgcgttcacaagcaacctaaggggcaggtgaagaagcgcagccctgccagacgcgctagattcctctaaggtctctgagatgcaccgttttttaaaaaggcgtggggtgaactgattttgatcttcttgtctagatgcaataaataaatctgaagcatttaatgtagtcatcttgacattgggcctacactgtacgagttccttatgtttccttgagctaaaaatatgtaaataatttttgtcccagtgagaaccgagggttagaaaacctcgatgcctctgagcctcgggaccgctctagggaagtacctgctttcgccagcatgactcatgcttcgtgggtactgaacacgagggtggaaatgaaaactggaacttccttgtaaatttaaacttggcaataaaagagaaaaaaagttaaaaaaaaata

SEQ ID NO: 445068 - DNA, 5323 bp, Homo sapiens
tgcattgatgtctgtttgttctgtgtctaccagctgacacgggagctttggtgtggggagtttgtataattgattccctgtgtctggaatacctgacccttcctggatatggtgtaccacgcgctggacagcccggatgatgattaccatgccctgttcgtgctctgcctcctctatgccatgtctcataataaaggcatggatcctgaaaaattagagcgaatccagctccccgtgccaaatgcggccgagaagaccacctacaaccacccgctagctgaaagactcatcaggatcatgaacaacgctgcccagccagatgggaagatccggctggcgacgctggagctgagctgcctgcttctgaagcagcaagtcctgatgagtgctggctgcatcatgaaggacgtgcacctggcctgcctggagggtgcgagagaagaaagtgttcaccttgtacgacatttttataagggagaagacatttttttggacatgtttgaagatgagtataggagcatgacaatgaagcccatgaacgtggaatatctcatgatggacgcctccatcctgctgcccccaacaggcacgccactgacgggcattgacttcgtgaagcggctgccgtgtggcgatgtggagaagacccggcgggccatccgggtgttcttcatgctgcgttccctgtcactgcaattgcgaggggagcctgagacacagttgccgctgactcgggaggaggacctgatcaagactgatgatgtcctggatctgaataacagcgacttgattgcatgtacagtgatcaccaaggatggcggcatggtccagcgattcctggctgtggatatttaccagatgagtttggtggagcctgatgtgtccaggcttggctggggagtggtcaagtttgcaggcctattgcaggacatgcaggtgactggcgtggaggacgacagccgtgccctgaacatcaccatccacaagcctgcgtccagcccccattccaagcccttccccatcctccaggccaccttcatcttctcagaccacatccgctgcatcatcgccaagcagcgcctggccaaaggccgcatccaggcaaggcgcatgaagatgcagagaatagctgccctcctggacctcccaatccagcccaccactgaagtcctggggtttggactcggctcctccacctccactcagcacctgcctttccgcttctacgaccaggggcgccggggcagcagcgaccccacagtgcagcgctccgtgtttgcatcggtggacaaggtgccaggcttcgccgtggcccagtgcataaaccagcacagctccccgtccctgtcctcacagtcgccaccctccgccagcgggagccccagcggcagcgggagcaccagccactgcgactctggaggcaccagctcgtcctccaccccctccacagcccagagtccagcagatgcccccatgagtccagaactgcctaagcctcaccttcctgaccagttggtaatcgtcaacgaaacggaagcagactctaagcccagcaagaacgtggccaggagcgcagccgtggagacagccagcctgtcccccagcctcgtccctgcccggcagcccaccatttccctgctctgcgaggacacggctgacacgctgagcgtcgaatcgctgacccttgtccccccagttgacccccacagcctccgcagcctcaccggcatgcccccgctgtccacgccggctgccgcctgcacagagcccgtgggcgaagaggctgcatgtgctgagcctgtgggcaccgctgaggactgagtcagtgccggggcctccctttgtgtgtgtggccccgctggtagggaccccagtgccgctgactggcaagacacactgggagcacccaccattctgtgcggcccccagcagccatctcaaccacctatccctgcgctcccttgaatgggaagaagccccacgttgtccttgaattcctttttcactttgcatctcttcacgtgcaggctgggaccagcggagacaccgcggcgaatgcagatgactgcaccggccactcagggagctgcctgggctccgtgtctctgagccccgggtggcaggacccaccggcacctctttcttcctctgtcatatggctcctctgtcaccagccccagtgtgcacagaagaattggaccaggtcactgtacgtagaaatttgtagaaaagcagacttagataaacatctcctttggatatttatttccgcttttggcagcaggtgaacatttatttttaaaacttctatttaaaagaagtccaaaaacatcaacactaaggtttgatgtcatgtgaaaagtgtaataataacagttaagatttcatgatcattttcactggacctttcctgatattttgtttcagagttcttagtgtggctttttccatttatttaagtgattctttgttactcactaactctgcaagcctgtggaataatgaagtaccttcctggaaagtttggattattttttaaacaaaaacaagggagatacatgtattctcaggtacacacagagctgagagggctgaatggttttctgctatagcagccgagaggcctcccatcatggaaagatttctccaggaaaaggaggaatgtagccagctccccactcaggacgcttcctcatttctcttcaccaaaaccaaacagagacagcttccagcaccttcttcagtgttaccatctctaagaaggaaccagttgggaccgtgaagactcccgaccctgtggccatgatggaaatcaaaggaagacaccctctacgtcacctgccctcgactgtgtgtgcccacatgtgccgagagatggcccagagccagttcccctccagctgcaagggcatggtgtccccagagctctgagtctgtcactctccctctgctactgctgctgatctgaatatggaaaccccatggttcccttccccattcggactgggtgtgtacaagcaaggacccagatgcatcagacacagcccccaagatgttcctttctactcggccagctcgggagccagacacagcactcacagcccaggccgtgatccaccctccccaagtccaccagggccagcggcccctcacctctctggtcactggtgagaccttccacaactttcctccagacctgccagcagatgtgcccaccaggggcattaggtatccgccggagcctggccatagggtagtctcgggagccgcgctgagatcttttgccacctgcattttagaagaacatggtctctgtctcctcggcccagccagctgtcccggcaaggcctgccgagggcagttttcaacctcatgaaggaaacacagtcctgccaaggagggggagtggcgcccatggggacaggcctcagtccttagaagccctctgggtagctgtgcccacccagccttcatggctgcaggtacaaggacctttgcttccatagagaaaacgcacagctcagaaagggggccacatgggcagaaacccaaaggaaggacaaaccacgaccaccgtggccatctgcagaatccctggaagagaaggaaggcagggtggagcggggggaagaccatcatggagagaaggaccacagcatcaggagacgggacacgccacacccagcaggcagcctgtgtgttgcttaattttttaagagcaagaggggtagagaggatcaagctggccctggctggagatggctagcccctgagacatgcacttctggttttgaaatgactctgtctgtggggcagcagaaactagagaaggcaagtggctgccccaccccaaggcgtgaccaggaggaacagcctgcagctcactccatgccacacgggtgggccaccagcctgctgtcagaagtctctgggctccaactggtcttgtaaccactgagcactgaaggagagaggtcttggtcagggctggacagcatgcccgggaggaccagcagaggattaaaggtgactgggaggaccagcggaggataaaagacactgctcagggcagggcttctaccctgcatccctggccaagaaaagggcagtccccatgtgggcttgcagggtcactctcaggggcctctttcagctggggctggcaacttgcgtctgggggacacctccaggtgtgtggggtgaggatttcctataaccagggctcccagaagctttgcttatgtaaggaggtctgggagccagcccattggaggccaccagccattttggcttcaaaggaccccacctcacccaggtctcagcggcagtgggcacagctatgtcttcaggagctcccgtcaaacctcatagctggggcgctcccagacaggccagtccagacaggacacgctgggcccctggcatccagaggaagagccaggagtgtgggaaggcccacagtgggggctgtggcttctgacactcaggtcatagcctcagaggtctgaggtcagcccccacagacccatccggcccgccccccaagtccctgcagagagcacttagagttatggcccaggccctggtccacccttcccctgtgcacctccggctgggtttgccaagtcagggagcagggctggccgcaggaactcccaaaccttggctttgaatattgttgtggaggtgtgctcgtccctttctggacgtgcaaggtacctgtcccagcaggtcagatggggccagctgaggcgctcccccaggcaggaagggccagccttcaccatcgcgtgggattgggaggaggggcctccgtgagcagcccctcctctgccgctgtcccagcccagtccctctcccggagccttggcagcctcccacaacccagacacttgcgttcacaagcaacctaaggggcaggtgaagaagcgcagccctgccagacgcgctagattcctctaaggtctctgagatgcaccgttttttaaaaaggcgtggggtgaactgattttgatcttcttgtctagatgcaataaataaatctgaagcatttaatgtagtcatcttgacattgggcctacactgtacgagttccttatgtttccttgagctaaaaatatgtaaataatttttgtcccagtgagaaccgagggttagaaaacctcgatgcctctgagcctcgggaccgctctagggaagtacctgctttcgccagcatgactcatgcttcgtgggtactgaacacgagggtggaaatgaaaactggaacttccttgtaaatttaaacttggcaataaaagagaaaaaaagttaaaaaaaaata

SEQ ID NO: 445069 - DNA, 2997 bp, Homo sapiens
tgtcagtgctgggctgtgggccggggaggaaggcggctcgcggttcctccaccgcctccgccgccgcatcctccgcttgtgctaccgccgcgggcgctgggccgctctgctggtccggcatgagaccgtgagacgagagacgggtcggggccgccgacatgtttggccgctcgcggagctgggtgggcgggggccatggcaagacttcccgcaacatccactccttggaccacctcaagtatctgtaccacgttttgaccaaaaacaccacagtcacagaacagaaccggaacctgctagtggagaccatccgttccatcactgagatcctgatctggggagatcaaaatgacagctctgtatttgacttcttcctggagaagaatatgtttgttttcttcttgaacatcttgcggcaaaagtcgggccgttacgtgtgcgttcagctgctgcagaccttgaacatcctctttgagaacatcagtcacgagacctcactttattatttgctctcaaataactacgtaaattctatcatcgttcataaatttgacttttctgatgaggagattatggcctattatatatcgttcctgaaaacactttcgttaaaactcaacaaccacactgtccatttcttttataatgagcacaccaatgactttgccctgtacacagaagccatcaagtttttcaaccaccctgaaagcatggttagaattgctgtaagaaccataactttgaatgtctataaaggtggataaccaggccatgctgcactacatccgagataaaactgctgttccttacttctccaatttggtctggttcattgggagccatgtgatcgaactcgatgactgcgtgcagactgatgaggagcatcggaatcggggtaaactgagtgatctggtggcagagcacctagaccacctgcactatctcaatgacatcctgatcatcaactgtgagttcctcaacgatgtgctcactgaccacctgctcaacaggctcttcctgcccctctacgtgtactcactggagaaccaggacaagggaggagaacggccgaaaattagcctgccggtgtctctttatcttctgtcacaggtcttcttaattatacatcatgcaccgctggtgaactcgttagctgaagtcattctgaatggtgatctgtctgagatgtacgctaagactgaacaggatattcagagaagttctgccaagcccagcattcggtgcttcattaaacccaccgagacactcgagcggtcccttgagatgaacaagcacaagggcaagaggcgggtgcaaaagagacccaactacaaaaacgttggggaagaagaagatgaggagaaagggcccaccgaggatgcccaagaagacgccgagaaggctaaaggtacagagggtggttcaaaaggcatcaagacgagtggggagagtgaagagatcgagatggtgatcatggagcgtagcaagctctcagagctggccgccagcacctccgtgcaggagcagaacaccacggacgaggagaaaagcgccgccgccacctgctctgagagcacgcaatggagcagacccttcctggatatggtgtaccacgcgctggacagcccggatgatgattaccatgccctgttcgtgctctgcctcctctatgccatgtctcataataaaggcatggatcctgaaaaattagagcgaatccagctccccgtgccaaatgcggccgagaagaccacctacaaccacccgctagctgaaagactcatcaggatcatgaacaacgctgcccagccagatgggaagatccggctggcgacgctggagctgagctgcctgcttctgaagcagcaagtcctgatgagtgctggctgcatcatgaaggacgtgcacctggcctgcctggagggtgcgagagaagaaagtgttcaccttgtacgacatttttataagggagaagacatttttttggacatgtttgaagatgagtataggagcatgacaatgaagcccatgaacgtggaatatctcatgatggacgcctccatcctgctgcccccaacaggcacgccactgacgggcattgacttcgtgaagcggctgccgtgtggcgatgtggagaagacccggcgggccatccgggtgttcttcatgctgcgttccctgtcactgcaattgcgaggggagcctgagacacagttgccgctgactcgggaggaggacctgatcaagactgatgatgtcctggatctgaataacagcgacttgattgcatgtacagtgatcaccaaggatggcggcatggtccagcgattcctggctgtggatatttaccagatgagtttggtggagcctgatgtgtccaggcttggctggggagtggtcaagtttgcaggcctattgcaggacatgcaggtgactggcgtggaggacgacagccgtgccctgaacatcaccatccacaagcctgcgtccagcccccattccaagcccttccccatcctccaggccaccttcatcttctcagaccacatccgctgcatcatcgccaagcagcgcctggccaaaggccgcatccaggcaaggcgcatgaagatgcagagaatagctgccctcctggacctcccaatccagcccaccactgaagtcctggggtttggactcggctcctccacctccactcagcacctgcctttccgcttctacgaccaggggcgccggggcagcagcgaccccacagtgcagcgctccgtgtttgcatcggtggacaaggtgccaggtgagccagccccccgccctgcgccacagctcgttcatcatggtgggcgttcaaggtctttctctctgtggagcctgtgtgagctgcccttcctctctcagaagccccgtcggctggcagcaccagcttcttagaatttgtcaaagcacagcgcaagattaaacacagcccccaaaataaattttggctttccctttaaaaaa

SEQ ID NO: 445070 - DNA, 3063 bp, Homo sapiens
tgtcagtgctgggctgtgggccggggaggaaggcggctcgcggttcctccaccgcctccgccgccgcatcctccgcttgtgctaccgccgcgggcgctgggccgctctgctggtccggcatgagaccgtgagacgagagacgggtcggggccgccgacatgtttggccgctcgcggagctgggtgggcgggggccatggcaagacttcccgcaacatccactccttggaccacctcaagtatctgtaccacgttttgaccaaaaacaccacagtcacagaacagaaccggaacctgctagtggagaccatccgttccatcactgagatcctgatctggggagatcaaaatgacagctctgtatttgacttcttcctggagaagaatatgtttgttttcttcttgaacatcttgcggcaaaagtcgggccgttacgtgtgcgttcagctgctgcagaccttgaacatcctctttgagaacatcagtcacgagacctcactttattatttgctctcaaataactacgtaaattctatcatcgttcataaatttgacttttctgatgaggagattatggcctattatatatcgttcctgaaaacactttcgttaaaactcaacaaccacactgtccatttcttttataatgagcacaccaatgactttgccctgtacacagaagccatcaagtttttcaaccaccctgaaagcatggttagaattgctgtaagaaccataactttgaatgtctataaaggtggataaccaggccatgctgcactacatccgagataaaactgctgttccttacttctccaatttggtctggttcattgggagccatgtgatcgaactcgatgactgcgtgcagactgatgaggagcatcggaatcggggtaaactgagtgatctggtggcagagcacctagaccacctgcactatctcaatgacatcctgatcatcaactgtgagttcctcaacgatgtgctcactgaccacctgctcaacaggctcttcctgcccctctacgtgtactcactggagaaccaggacaagggaggagaacggccgaaaattagcctgccggtgtctctttatcttctgtcacaggtcttcttaattatacatcatgcaccgctggtgaactcgttagctgaagtcattctgaatggtgatctgtctgagatgtacgctaagactgaacaggatattcagagaagttctgccaagcccagcattcggtgcttcattaaacccaccgagacactcgagcggtcccttgagatgaacaagcacaagggcaagaggcgggtgcaaaagagacccaactacaaaaacgttggggaagaagaagatgaggagaaagggcccaccgaggatgcccaagaagacgccgagaaggctaaaggtacagagggtggttcaaaaggcatcaagacgagtggggagagtgaagagatcgagatggtgatcatggagcgtagcaagctctcagagctggccgccagcacctccgtgcaggagcagaacaccacggacgaggagaaaagcgccgccgccacctgctctgagagcacgcaatggagcagacccttcctggatatggtgtaccacgcgctggacagcccggatgatgattaccatgccctgttcgtgctctgcctcctctatgccatgtctcataataaaggcatggatcctgaaaaattagagcgaatccagctccccgtgccaaatgcggccgagaagaccacctacaaccacccgctagctgaaagactcatcaggatcatgaacaacgctgcccagccagatgggaagatccggctggcgacgctggagctgagctgcctgcttctgaagcagcaagtcctgatgagtgctggctgcatcatgaaggacgtgcacctggcctgcctggagggtgcgagagaagaaagtgttcaccttgtacgacatttttataagggagaagacatttttttggacatgtttgaagatgagtataggagcatgacaatgaagcccatgaacgtggaatatctcatgatggacgcctccatcctgctgcccccaacaggcacgccactgacgggcattgacttcgtgaagcggctgccgtgtggcgatgtggagaagacccggcgggccatccgggtgttcttcatgctgcgttccctgtcactgcaattgcgaggggagcctgagacacagttgccgctgactcgggaggaggacctgatcaagactgatgatgtcctggatctgaataacagcgacttgattgcatgtacagtgatcaccaaggatggcggcatggtccagcgattcctggctgtggatatttaccagatgagtttggtggagcctgatgtgtccaggcttggctggggagtggtcaagtttgcaggcctattgcaggacatgcaggtgactggcgtggaggacgacagccgtgccctgaacatcaccatccacaagcctgcgtccagcccccattccaagcccttccccatcctccaggccaccttcatcttctcagaccacatccgctgcatcatcgccaagcagcgcctggccaaaggccgcatccaggcaaggcgcatgaagatgcagagaatagctgccctcctggacctcccaatccagcccaccactgaagtcctggggtttggactcggctcctccacctccactcagcacctgcctttccgcttctacgaccaggggcgccggggcagcagcgaccccacagtgcagcgctccgtgtttgcatcggtggacaaggtgccagccctgctgactgccgcagtagagaggcagcccagatggccgctcccaagcttgctagtgccttggctgacagactgttgtggaggtctttgcttgctaatttacagacggttttcaaggatagtgtttaaaatctgagaggatttatccatggataaagagctataggctaaaagactctgcaagttcccagctatttttgtatgttggacatgttatccgttgaaaagcaatcagaaataaaaagtatttaagcgttgtgaggtgcag

SEQ ID NO: 445071 - DNA, 3239 bp, Homo sapiens
tgtcagtgctgggctgtgggccggggaggaaggcggctcgcggttcctccaccgcctccgccgccgcatcctccgcttgtgctaccgccgcgggcgctgggccgctctgctggtccggcatgagaccgtgagacgagagacgggtcggggccgccgacatgtttggccgctcgcggagctgggtgggcgggggccatggcaagacttcccgcaacatccactccttggaccacctcaagtatctgtaccacgttttgaccaaaaacaccacagtcacagaacagaaccggaacctgctagtggagaccatccgttccatcactgagatcctgatctggggagatcaaaatgacagctctgtatttgacttcttcctggagaagaatatgtttgttttcttcttgaacatcttgcggcaaaagtcgggccgttacgtgtgcgttcagctgctgcagaccttgaacatcctctttgagaacatcagtcacgagacctcactttattatttgctctcaaataactacgtaaattctatcatcgttcataaatttgacttttctgatgaggagattatggcctattatatatcgttcctgaaaacactttcgttaaaactcaacaaccacactgtccatttcttttataatgagcacaccaatgactttgccctgtacacagaagccatcaagtttttcaaccaccctgaaagcatggttagaattgctgtaagaaccataactttgaatgtctataaaggtggataaccaggccatgctgcactacatccgagataaaactgctgttccttacttctccaatttggtctggttcattgggagccatgtgatcgaactcgatgactgcgtgcagactgatgaggagcatcggaatcggggtaaactgagtgatctggtggcagagcacctagaccacctgcactatctcaatgacatcctgatcatcaactgtgagttcctcaacgatgtgctcactgaccacctgctcaacaggctcttcctgcccctctacgtgtactcactggagaaccaggacaagggaggagaacggccgaaaattagcctgccggtgtctctttatcttctgtcacaggtcttcttaattatacatcatgcaccgctggtgaactcgttagctgaagtcattctgaatggtgatctgtctgagatgtacgctaagactgaacaggatattcagagaagttctgccaagcccagcattcggtgcttcattaaacccaccgagacactcgagcggtcccttgagatgaacaagcacaagggcaagaggcgggtgcaaaagagacccaactacaaaaacgttggggaagaagaagatgaggagaaagggcccaccgaggatgcccaagaagacgccgagaaggctaaaggtacagagggtggttcaaaaggcatcaagacgagtggggagagtgaagagatcgagatggtgatcatggagcgtagcaagctctcagagctggccgccagcacctccgtgcaggagcagaacaccacggacgaggagaaaagcgccgccgccacctgctctgagagcacgcaatggagcagacccttcctggatatggtgtaccacgcgctggacagcccggatgatgattaccatgccctgttcgtgctctgcctcctctatgccatgtctcataataaaggcatggatcctgaaaaattagagcgaatccagctccccgtgccaaatgcggccgagaagaccacctacaaccacccgctagctgaaagactcatcaggatcatgaacaacgctgcccagccagatgggaagatccggctggcgacgctggagctgagctgcctgcttctgaagcagcaagtcctgatgagtgctggctgcatcatgaaggacgtgcacctggcctgcctggagggtgcgagagaagaaagtgttcaccttgtacgacatttttataagggagaagacatttttttggacatgtttgaagatgagtataggagcatgacaatgaagcccatgaacgtggaatatctcatgatggacgcctccatcctgctgcccccaacaggcacgccactgacgggcattgacttcgtgaagcggctgccgtgtggcgatgtggagaagacccggcgggccatccgggtgttcttcatgctgcgttccctgtcactgcaattgcgaggggagcctgagacacagttgccgctgactcgggaggaggacctgatcaagactgatgatgtcctggatctgaataacagcgacttgattgcatgtacagtgatcaccaaggatggcggcatggtccagcgattcctggctgtggatatttaccagatgagtttggtggagcctgatgtgtccaggcttggctggggagtggtcaagtttgcaggcctattgcaggacatgcaggtgactggcgtggaggacgacagccgtgccctgaacatcaccatccacaagcctgcgtccagcccccattccaagcccttccccatcctccaggccaccttcatcttctcagaccacatccgctgcatcatcgccaagcagcgcctggccaaaggccgcatccaggcaaggcgcatgaagatgcagagaatagctgccctcctggacctcccaatccagcccaccactgaagtcctggggtttggactcggctcctccacctccactcagcacctgcctttccgcttctacgaccaggggcgccggggcagcagcgaccccacagtgcagcgctccgtgtttgcatcggtggacaaggtgccagacccttctctgtgcagttgcatttcatacatgtgccagagctgatgaacagaacagagccaccaccccttctctgcaattctgaaacccaaacagctctgaaaatcaaaatatttttcctaactcgtatgatggcaaaaccaaaacctgccttcaggtatttatgggcgggtttattagagtcattgatgccagtaattgtgagtttatgttttcgtttctgcaaaaattcagtgtttggttttagctgctcacgacccagctgacagtgtaacgtaatacctatgtgtgccctacatggccttttacctcctaaagattctaaattccaagacatatctggccacagaggtttaggataaggagttaagtatggatctgtaattgtgttaaggtttgggcttcccttaaataaaatcataattctgtataccctgctgcacctt

SEQ ID NO: 445072 - DNA, 795 bp, Homo sapiens
tgtcagtgctgggctgtgggccggggaggaaggcggctcgcggttcctccaccgcctccgccgccgcatcctccgcttgtgctaccgccgcgggcgctgggccgctctgctggtccggcatgagaccgtgagacgagagacgggtcggggccgccgacatgtttggccgctcgcggagctgggtgggcgggggccatggcaagacttcccgcaacatccactccttggaccacctcaagtatctgtaccacgttttgaccaaaaacaccacagtcacagaacagaaccggaacctgctagtggagaccatccgttccatcactgagatcctgatctggggagatcaaaatgacagctctgtatttgacttcttcctggagaagaatatgtttgttttcttcttgaacatcttgcggcaaaagtcgggccgttacgtgtgcgttcagctgctgcagaccttgaacatcctctttgagaacatcagtcacgagacctcactttattatttgctctcaaataactacgtaaattctatcatcgttcataaatttgacttttctgatgaggagattatggcctattatatatcgttcctgaaaacactttcgttaaaactcaacaaccacactgtccatttcttttataatgagcacaccaatgactttgccctgtacacagaagccatcaagtttttcaaccaccctgaaagcatggttagaattgctgtaagaaccataactttgaatgtctataaagtggataacacgtcgcgagggggtcctcatagagtcagcc

SEQ ID NO: 445073 - DNA, 524 bp, Homo sapiens
ctcagtgtgtttccggtttttctcccccaatccagatgcccccatgagtccagaactgcctaagcctcaccttcctgaccagttggtaatcgtcaacgaaacggaagcagactctaagcccagcaagaacgtggccaggagcgcagccgtggagacagccagcctgtcccccagcctcgtccctgcccggcagcccaccatttccctgctctgcgaggacacggctgacacgctgagcgtcgaatcgctgacccttgtccccccagttgacccccacagcctccgcagcctcaccggcatgcccccgctgtccacgccggctgccgcctgcacagagcccgtgggcgaagaggctgcatgtgctgagcctgtgggcaccgctgaggactgagtcagtgccggggcctccctttgtgtgtgtggccccgctggtagggaccccagtgccgctgactggcaagacacactgggagcacccaccattctgtgcggcccccagcagccatctcaaccacctatccctg

SEQ ID NO: 445074 - DNA, 2280 bp, Homo sapiens
agaggctgagctctcagccctatctgtctcgtccctgcagcctgtgccaagggcacattcgggcctcactgtgaggggcgctgtgcctgccggtggggaggcccctgccaccttgccaccggggcctgcctctgccctccggggtggcggggggctccaggtgtgagaatggtgagcacagcccccagttcagccagcattgggtgggtcgtacccacagcacctgctcccggcctgtcctggcccacagatccccacgggcccctcctagaagcctccgcagccctcatctttctgcagcctgcctgcggggctggtttggagaggcctgtgcccagcgctgcagctgcccgcctggcgctgcctgccaccacgtcactggggcctgccgctgtccccctggcttcactggctccggctgcgagcagggatgtccgcccgggcggtatgggccaggctgtgaacagctgtgtgggtgtctcaacgggggctcctgtgatgcggccacgggggcctgccgctgccccactgggttcctcgggacggactgcaacctcacctgtccgcagggccgcttcggccccaactgcacccacgtgtgtgggtgtgggcagggggcggcctgcgaccctgtgaccggcacctgcctctgccccccggggagagccggcgtccgctgtgagcgaggctgcccccagaaccggtttggcgtgggctgcgagcacacctgctcctgcagaaatgggggcctgtgccacgccagcaacggcagctgctcctgtggcctgggctggacggggcggcactgcgagctggcctgtccccctgggcgctacggagccgcctgccatctggagtgctcctgccacaacaacagcacgtgtgagcctgccacgggcacctgccgctgcggccccggcttctatggccaggcctgcgagcacccctgtccccctggcttccacggggctggctgccaggggttgtgctggtgtcaacatggagccccctgcgaccccatcagtggccgatgcctctgccctgccggcttccacggccacttctgtgagagggggtgtgagccaggttcatttggagagggctgccaccagcgctgtgactgtgacgggggggcaccctgtgaccctgtcaccggtctctgcctttgcccaccagggcgctcaggagccacctgtaacctggattgcagaaggggccagtttgggcccagctgcaccctgcactgtgactgcgggggtggggctgactgcgaccctgtcagtgggcagtgtcactgtgtggatggctacatggggcccacgtgccgggaaggtgggcccctccggctccccgagaacccgtccttagcccagggctcagcgggcacactgcccgcctccagcagacccacatcccggagcggtggaccagcgaggcactagtagaggcagtcccgtggagcccgcctctccagtcccagccagaggggaccctggcctttggtgaccactgagaaggacacttcacgggcccagagctcctggtactgcccttcctttgagggccgtggagggctgtggacagcccagcaacctgtcgctcttggaggctggtgtggccttgaggagggaagcctcgcatggccgctggaagagaggcgcctcctggcctggctctgcagaacccaggggcacgctctgggcctgggctgaggaagtcccgctctccccgcggctctgagttggactgaggacaggtgtgggcgccagtgtgggtgcaggcgcaggtgcaggcacagggccactgtcctccaggcaggctttttggtgctaggccctgggactggaagtcgcccagcccgtatttatgtaaaggtatttatgggccactgcacatgcccgctgcagccctgggatcagctggaagctgcctgtcatctcctgcccaatccccagaaaccctgattcaggtctgcaggctcctgcgggctcaccaggctgctggctccggtaccatgtaaacctaggaaggtaaaggagcaggcaacctcctcgtggcctgtgtgtttgctgtgttacgtggactctgtgtgggctcctccctggggcccggccagcataacggtgcacccagggacctcccagtgcacccggggccctttgcaggggtgggggtgccacacaagtgaagaagttgggactcatctcagttcccagtgctattgaggagaacgctggggctgcattcattaccgctgagacccagagactggctgttccc

SEQ ID NO: 445075 - DNA, 1452 bp, Homo sapiens
gacgggcaggagggggcttttctcgggcccctggattggcgggttttactcactctgggcaaactggacatttctgccaccgtgtgcccttgtctcgtggtaaccggcgtccttcagcctgtccccctggcttccacggggctggctgccaggggttgtgctggtgtcaacatggagccccctgcgaccccatcagtggccgatgcctctgccctgccggcttccacggccacttctgtgagagggggtgtgagccaggttcatttggagagggctgccaccagcgctgtgactgtgacgggggggcaccctgtgaccctgtcaccggtctctgcctttgcccaccagggcgctcaggagccacctgtaacctggattgcagaaggggccagtttgggcccagctgcaccctgcactgtgactgcgggggtggggctgactgcgaccctgtcagtgggcagtgtcactgtgtggatggctacatggggcccacgtgccgggaaggtgggcccctccggctccccgagaacccgtccttagcccagggctcagcgggcacactgcccgcctccagcagacccacatcccggagcggtggaccagcgaggcactagtagaggcagtcccgtggagcccgcctctccagtcccagccagaggggaccctggcctttggtgaccactgagaaggacacttcacgggcccagagctcctggtactgcccttcctttgagggccgtggagggctgtggacagcccagcaacctgtcgctcttggaggctggtgtggccttgaggagggaagcctcgcatggccgctggaagagaggcgcctcctggcctggctctgcagaacccaggggcacgctctgggcctgggctgaggaagtcccgctctccccgcggctctgagttggactgaggacaggtgtgggcgccagtgtgggtgcaggcgcaggtgcaggcacagggccactgtcctccaggcaggctttttggtgctaggccctgggactggaagtcgcccagcccgtatttatgtaaaggtatttatgggccactgcacatgcccgctgcagccctgggatcagctggaagctgcctgtcatctcctgcccaatccccagaaaccctgattcaggtctgcaggctcctgcgggctcaccaggctgctggctccggtaccatgtaaacctaggaaggtaaaggagcaggcaacctcctcgtggcctgtgtgtttgctgtgttacgtggactctgtgtgggctcctccctggggcccggccagcataacggtgcacccagggacctcccagtgcacccggggccctttgcaggggtgggggtgccacacaagtgaagaagttgggactcatctcagttcccagtgctattgaggagaacgctggggctgcattcattaccgctgagacccagagactggctgttccc

SEQ ID NO: 445076 - DNA, 692 bp, Homo sapiens
caaatcttggttgaaatggagaagaacagttgttcttcatggttgaggagttgggatatggttgccatttggtatcctctctttgcctatcactgttcccattatttcagttctgtgtcacctgtcattatgatttaattatttaagtaattttttaaagaaatttccattttaatgtggaaacccaggtttcaattttgtttttcttaaaaggtatttcacaaaagaaattagtcttgttgtagtgtaacatcaaaggaacattctgtaaaagactaaagttagattagaaaatagcttcactatttacccttgtatattaactgtgtttacagatattttttggcttgtttttcagtgataactcagtaaatgtttagcatcagttgtcttaattgatacttgaggttgtataaatattttgatgagtgagtgatcactaaaatttatctcactaaaatttaattctgatttgtaggccaaagaatgcgaagcaaccagagcgtgaagaaaagcgggttttgggtctggtgttgctgcgtggggagaacttggtatccatgactgtggaggggccaccccccaaagatgtaaggaagatgtagggcaggacagaactttaatttgcagggacatcatattatgtgagatgtctgaaatcagggtagagcagacacagttcaacatggatt

SEQ ID NO: 445077 - DNA, 771 bp, Homo sapiens
  misc_feature (34)..(34): n is a, c, g, or t
gggactttattacacggcacggcactcgtgacancgaaaggggtggccagaaatgcaggccgggaacattccacagtccagggacggttggtcattcagaagggggttgcagacatggagaaacagttcttctagctcttccactttcagtatcatctgtgtgggtcactggaatcctttttcacaatgcctgcttgcccatgagttttaagaactagtacagtgtagaaatgattagtaggaaaaacttggctgggttaatttgctttgctgagccgattcaacttaaaaagcgaggtccatactaagtgcccaagaatcaagaaggaggctcacatttgaacttgatgtttagttaatgtgaatcattttctgttgaactaatgagaatacagtgaccttgagggttaggttgtacatctgaattgttcgggctgtttcctgtcttttggatgttttgtttgtatagatattttcattttatgttacatcatttgttctttggtagcaaaaattgagttgaaatgatacagttcctgaaatctatgatttcatgtttcggagatatgtatcaggaataatagtgtgggttctcatgagaaaatctggattgcattactgtgctactttggtttcttgtcagagaagttagtagtttagacctccttcagaatcctttctttggactttgtgtttcttacgttgtgccagccttgattttatttgtctgtcctctgtctttctataccatttgtttacacttaactctag

SEQ ID NO: 445078 - DNA, 1632 bp, Homo sapiens
caccaagggctggccgcagccactgtagctgagctcagagccttctgtggggtctgcagtggcaaggccagccgccccctgtcttccctctggagctgtttgaggaatgcagttcttttgcataagaaaggcttttctctccagtcattctgcttgctgatcaagaacacttaacagcttcaggctttcctgatactttgacgaaggtaattgggactcccatcaagtctccacacagctagcagccacgtggggcacttctccagcatatgtaagtggaactcagaaggcaacattccctgaacatactcttccaccagaatctcctctacagatttttgctgccccttttaccagtggctgaatctactttctcttatggatcgcttacacctgagacgaactacagaacagcacgtaccagaggtggaagtccaagtcaaacgcagaaggactgcctcactgagcaaccaagagtgtcagttgtacccgaggcgttctcagcagcagcaagtacctgtggtggatttccaggctgaactgaggcaggcattcttagctgagacaccaagaggtggttaaagccatattggagtagcgaggaatctgattccaagcaaaaaccaggctccatctactctttgaagcttctgcccagcttgcattgtttctaggagaacccgcgtcatacctttatctatagccttcccctaggtcttcagaagcatcaagttttaactgtggacattggatttggtggaacagcaatcatgactgttggcaagagtagcaagatgctgcagcacattgactatagaatgagatgtatcctgcaagatggccgaatcttcattggcacctttaaggcttttgacaagcatatgaatttgatcctctgtgattgtgatgagttcagaaagatcaagccaaagaatgcgaagcaaccagagcgtgaagaaaagcgggttttgggtctggtgttgctgcgtggggagaacttggtatccatgactgtggaggggccaccccccaaagatactggcattgctcgggtaccacttgctggagctgctggaggccctggggttggtagggcagctggtagaggagtaccagctggtgtgccaattccccaggcccctgctggattggcaggccctgtccgaggagttgggggaccatcccagcaggtaatgactccacagggaagaggcactgtagcagctgctgctgttgctgcgactgccagtattgctggagccccaacacagtacccaccaggacggggcactccgcccccacccgtcggcagagcaaccccacctccaggcattatggctcctccacctggtatgagaccacccatgggcccaccaattgggcttccccctgctcgagggacgccaataggcatgccgcctccgggaatgagaccccctccaccaggcattagaggtccacctcccccaggaatgcgtccaccaagaccttagcatactgttgatccatctcagtcactttttcccctgcaatgcgtcttgtgaaattgtgtagagtgtttgtgagctttttgttccctcattctgcattaataatagctaataataaatgcatagagcaattaaactgtga

SEQ ID NO: 445079 - DNA, 911 bp, Homo sapiens
agcggaggtggcgcgcatgctcaggcggggatgtgtgcgaagcctgccgctgctgcagcgagtctggcgcagagtggagcggccgccggagatgcctgacgcatctgtctgaggagcggtcagtgacgcgatggagcgggcaagggatcgcttacacctgagacgaactacagaacagcacgtaccagaggtggaagtccaagtcaaacgcagaaggactgcctcactgagcaaccaagagtgtcagttgtacccgaggcgttctcagcagcagcaagtacctgtggtggatttccaggctgaactgaggcaggcattcttagctgagacaccaagaggtggttaaagccatattggagtagcgaggaatctgattccaagcaaaaaccagggttagagctaatgcagcaatgatcaagaataaagaatcattaaagaatggggtgttgggggttctcttaattatcagtgacacattaatttttttccttagagcttcatacaataaacacattgcagaaagtttaagaaagttttgcaggaccttaaattttctgccctgacactttcgtcatgtttctgtattccagttattgtagcgcatgcttttcaggtagttttcttttgcgttttttttaattatataaaaatatttcactataaatggctcttgaataccctgttactgaatgtttataatttccttttgtgggaggtgtcatttttttctgccagtagtttgaacaaagctttagtagatagctttgtataaaacttagaataattttttcaaatatgcagatgtgaaaataaattgaatcaaggaatatgaacttaaggtacatttttctaaattatattgcaaagtattaaattagtattcattgctttcgaaaaataaagggccagtt

SEQ ID NO: 445080 - DNA, 1396 bp, Homo sapiens
agcggaggtggcgcgcatgctcaggcggggatgtgtgcgaagcctgccgctgctgcagcgagtctggcgcagagtggagcggccgccggagatgcctgacgcatctgtctgaggagcggtcagtgacgcgatggagcgggcaagggatcgcttacacctgagacgaactacagaacagcacgtaccagaggtggaagtccaagtcaaacgcagaaggactgcctcactgagcaaccaagagtgtcagttgtacccgaggcgttctcagcagcagcaagtacctgtggtggatttccaggctgaactgaggcaggcattcttagctgagacaccaagaggtggttaaagccatattggagtagcgaggaatctgattccaagcaaaaaccaggctccatctactctttgaagcttctgcccagcttgcattgtttctaggagaacccgcgtcatacctttatctatagccttcccctaggtcttcagaagcatcaagttttaactgtggacattggatttggtggaacagcaatcatgactgttggcaagagtagcaagatgctgcagcacattgactatagaatgagatgtatcctgcaagatggccgaatcttcattggcacctttaaggcttttgacaagcatatgaatttgatcctctgtgattgtgatgagttcagaaagatcaagccaaagaatgcgaagcaaccagagcgtgaagaaaagcgggttttgggtctggtgttgctgcgtggggagaacttggtatccatgactgtggaggggccaccccccaaagatactggcattgctcgggtaccacttgctggagctgctggaggccctggggttggtagggcagctggtagaggagtaccagctggtgtgccaattccccaggcccctgctggattggcaggccctgtccgaggagttgggggaccatcccagcaggtaatgactccacagggaagaggcactgtagcagctgctgctgttgctgcgactgccagtattgctggagccccaacacagtacccaccaggacggggcactccgcccccacccgtcggcagagcaaccccacctccaggcattatggctcctccacctggtatgagaccacccatgggcccaccaattgggcttccccctgctcgagggacgccaataggcatgccgcctccgggaatgagaccccctccaccaggcattagaggtccacctcccccaggaatgcgtccaccaagaccttagcatactgttgatccatctcagtcactttttcccctgcaatgcgtcttgtgaaattgtgtagagtgtttgtgagctttttgttccctcattctgcattaataatagctaataataaatgcatagagcaattaaactgtga

SEQ ID NO: 445081 - DNA, 977 bp, Homo sapiens
aatataggctaggtacgaggcatgggtggttgagcggccgccggagatgcctgacgcatctgtctgaggagcggtcagtgacgcgatggagcgggcaagggatcgcttacacctgagacgaactacagaacagcacgtaccagaggtggaagtccaagtcaaacgcagaaggactgcctcactgagcaaccaagagtgtcagttgtacccgaggcgttctcagcagcagcaagtacctgtggtggatttccaggctgaactgaggcaggcattcttagctgagacaccaagaggtggttaaagccatattggagtagcgaggaatctgattccaagcaaaaaccaggctccatctactctttgaagcttctgcccagcttgcattgtttctaggagaacccgcgtcatacctttatctatagccttcccctaggtcttcagaagcatcaagttttaactgtggacattggatttggtggaacagcaatcatgactgttggcaagagtagcaagatgctgcagcacattgactatagaatgagatgtatcctgcaagatggccgaatcttcattggcacctttaaggcttttgacaagcatatgaatttgatcctctgtgattgtgatgagttcagaaagatcaagccaaagaatgcgaagcaaccagagcgtgaagaaaagcgggttttgggtctggtgttgctgcgtggggagaacttggtatccatgactgtggaggggccaccccccaaagatactggcattgctcgggtaccacttgctggagctgctggaggccctggggttggtagggcagctggtagaggagtccgttggtttcaacttcccggccctgtttgatggggccgtccggtggggccccgcggtagcgcccaggaagccgtcttggtttcgcgtttggccacgccgaggccccccggggccccgtttcccgtaccgcccggcgggtagccgcc

SEQ ID NO: 445082 - DNA, 701 bp, Homo sapiens
ccacgcgtcgcccacgcgtcgcccacgcgtagagcggccgccggagatgcctgacgcatctgtctgaggagcggtcagtgacgcgatggagcgggcaagggatcgcttacacctgagacgaactacagaacagcacgtaccagaggtggaagtccaagtcaaacgcagaaggactgcctcactgagcaaccaagagtgtcagttgtacccgaggcgttctcagcagcagcaagtacctgtggtggatttccaggctgaactgaggcaggcattcttagctgagacaccaagaggtggttaaagccatattggagtagcgaggaatctgattccaagcaaaaaccaggctccatctactctttgaagcttctgcccagcttgcattgtttctaggagaacccgcgtcatacctttatctatagccttcccctaggtcttcagaagcatcaagttttaactgtggacattggatttggtggaacagcaatcatgactgttggcaagagtagcaagatgctgcagcacattgactatagaatgagatgtatcctgcaagatggccgaatcttcattggcacctttaaggcttttgacaagcatatgaatttgatcctctgtgattgtgatgagttcagaaagatcaacaaagaatgcgaagcacccagagcgtgaaggttgagggccaccccccaagatactgt

SEQ ID NO: 445083 - DNA, 415 bp, Homo sapiens
agcggccgcatactactactactaaattcgcggccgatcgacaccccaacacagtacccaccaggacggggcactccgcccccacccgtcggcagagcaaccccacctccaggcattatggctcctccacctggtatgagaccacccatgggcccaccaattgggcttccccctgctcgagggacgccaataggcatgccgcctccgggaatgagaccccctccaccaggcattagaggtccacctcccccaggaatgcgtccaccaagaccttagcatactgttgatccatctcagtcactttttcccctgcaatgcgtcttgtgaaattgtgtagagtgtttgtgagctttttgttccctcattctgcattaataatagctaataataaatgcatagagcaattaaactgtga

SEQ ID NO: 445084 - DNA, 520 bp, Homo sapiens
caccaagggctggccgcagccactgtagctgagctcagagccttctgtggggtctgcagtggcaaggccagccgccccctgtcttccctctggagctgtttgaggaatgcagttcttttgcataagaaaggcttttctctccagtcattctgcttgctgatcaagaacacttaacagcttcaggctttcctgatactttgacgaaggtaattgggactcccatcaagtctccacacagctagcagccacgtggggcacttctccaggttcacagctggagagccattgtctcgggattaattgtaccttgagcatcacctatatctgatttagatgatatttacatgcgactttcgacttacacttgaaagttgatgctggaatgagatgcagcaacaagacatcatcttggaaacagacagcagccccgtttagacctccttctgctgctttgatcttggacctctcatcctccagaaacacgacaaataagtttatgttctttataagttactcatta

SEQ ID NO: 445085 - DNA, 240 bp, Homo sapiens
aattcaagcttctaacgatgtacgggcctccgggaatgagaccccctccaccaggcattagaggtccacctcccccaggaatgcgtccaccaagaccttagcatactgttgatccatctcagtcactttttcccctgcaatgcgtcttgtgaaattgtgtagagtgtttgtgagctttttgttccctcattctgcattaataatagctaataataaatgcatagagcaattaaactgtga

SEQ ID NO: 445086 - DNA, 5355 bp, Homo sapiens
agccggtacctactttccacagggaggagcggccgccggagatgcctgacgcatctgtctgaggagcggtcagtgacgcgatggagcgggcaagggatcgcttacacctgagacgaactacagaacagcacgtaccagaggtggaagtccaagtcaaacgcagaaggactgcctcactgagcaaccaagagtgtcagttgtacccgaggcgttctcagcagcagcaagtacctgtggtggatttccaggctgaactgaggcaggcattcttagctgagacaccaagaggtggttaaagccatattggagtagcgaggaatctgattccaagcaaaaaccaggctccatctactctttgaagcttctgcccagcttgcattgtttctaggagaacccgcgtcatacctttatctatagccttcccctaggtcttcagaagcatcaagttttaactgtggacattggatttggtggaacagcaatcatgactgttggcaagagtagcaagatgctgcagcacattgactatagaatgagatgtatcctgcaagatggccgaatcttcattggcacctttaaggcttttgacaagcatatgaatttgatcctctgtgattgtgatgagttcagaaagatcaagccaaagaatgcgaagcaaccagagcgtgaagaaaagcgggttttgggtctggtgttgctgcgtggggagaacttggtatccatgactgtggaggggccaccccccaaagatactggcattgctcgggtaccacttgctggagctgctggaggccctggggttggtagggcagctggtagaggagtaccagctggtgtgccaattccccaggcccctgctggattggcaggccctgtccgaggagttgggggaccatcccagcaggtaatgactccacagggaagaggcactgtagcagctgctgctgttgctgcgactgccagtattgctggagccccaacacagtacccaccaggacggggcactccgcccccacccgtcggcagagcaaccccacctccaggcattatggctcctccacctggtatgagaccacccatgggcccaccaattgggcttccccctgctcgagggacgccaataggcatgccgcctccgggaatgagaccccctccaccaggcattagaggtccacctcccccaggaatgcgtccaccaagaccttagcatactgttgatccatctcagtcactttttcccctgcaatgcgtcttgtgaaattgtgtagagtgtttgtgagctttttgttccctcattctgcattaataatagctaataataaatgcatagagcaattaaactgtgaggtactgttgtatatatttttttgcctgttgattttgatgagatcttaagttactgtggatgagggtgatgcctattaagcagttgattcaaatcatattctctttaattcttaggataaaaaggttttctgctatctaactttcactttgtgcattgactggtgttggttaataatgttttcatgacccgggggtttaagtggttgtgctgcttcacacatggcctcctgcttctcatgttgctatgtcacattatctgaagggaagtggggatgggatgaaaggccttgtaaggccacctatatactgaaggaagttgtagtgaatcacagtccatgctcattacatatcaaggcatttgaaatagaagttactctttttcttgggatgttgacctcagttgatcaggttttacagtgtcctatgatcagaatagaggatgtgatactggaataatcattttctaccattgagtaagtatttatttataaattactaaatgagtggaagatcctgggtactgggaggcaggaggttgcatatttgagttgataagttgtactactgataataaagataactgacacactaaaacatacttggtacactgaaatacaaattacggttatgtccagtggtatcaccaagtgacaaactgggagctaaatagttcagaaatgccctagtctctaggtccagtttgaattggttatggaacaaagaagccatttataaaagggaagagatttttaggttttgcagctaaggtttatagtaggcagcgagggaatgattcatagtgattgtagcagttggtttaccaagcactaaagagattggtgttaactccataatactgatagactgattggaattacattttttctcttgaatttaccaggagtggttgtgaatgtcaccttttccatcttttaaattacatccttgcaggtggtaatcactcaaggaaaaggaattatcagagtaacaatagttcctgttactgacttgatatggtctctgccagaatagcttctcagattaatggccactctcaggggaagcatttctccttgcattggtttgctggtatggatggcccttagattttggcatgagtgattatgcagcctatttgaagaaaacctgttttcaggacctttttaattaaatatggcctgttacatgagttaaagtgtcatacgataccattttttgaccacttagttgatgcctctgaaaggaagagagaatcagatcgctaaaatttgatgtgtcgtcagtgtggatcctactcagtagtgtcacaacgaggctgaaaatcatattaagtgcttttaggacagaaacgtaaactgctcaggtaaaataaccttataaagagaaataagcatatattgcagaggccttggctaggttcatgatgacacaggaccttgtctgaacataatgatttcaaaatttgagcttaaaaatgacactctgaaatccagtcagtgtgcctcactagacttttcgatttcaagattttctgcagaaaatgttttgaaaactttgaatacttaaaaatggcaggtgtagtattgcactttgctagttgctcagatacccttttttatttgtatagatattctgagttcctttttttttctacatgttgtacgttgtcgaaagctaaaaggaaacttatccttggatcacggaaggcagaggcatttggtgagatggaaacaaggatgtgtaaaaatgagacgaccacctctcggattaaaaaaaaaaagtgccagagttctagggttctaagtgatgtccaggaaggaggaggaataatatttatggagcatatattatggaacacagtgagtatagtacctgcctttaaatgaatactgttggttttttaggacagttgcttttttttcttttttcttcagctgtgtgcagttgattaacttgtacagagcctatcacacaatagatgtttaagaaatattaagtgaatgaatgaggcagcattgctaatttttgtatagtgagacggtatctcacagtccaggctggagttcagtggcattaacataactcactgcagccttgaacacctgagctcaaacgatcctttcaccttatcctccagagtagctgggactgcagtcgcgtgtcaacatgcctggctaattttagttttctaatttttttagagttgggatctcactatgttgcttagactggtcttgaactcctggcctcatgccatcctcttgcctcagctggtattgtaggtgtgagccactgtgccaggtactaattttttttatgttagaaaacaagtttttaggtattttatagttacttccttatgacaatatctcatcagaatctaggcctatctgatatctgactccatacgtttataccgtgtagtcagccattcccagatagaggtcatttgagttacttagtgtttaccagcacttgtttactaccttgcgatgatatttacagtgtatttttgggtatggttttggggttatttggttgttgttaaaatgcctgtaatcccggcactttgggaggttgaggcgggtggatcacctgaggtcaggagttcgagcccagcctggccaacatggcgaaaccctacctctactaaaaatacaaaaattagcctggcgtggtggcaggcacctgtaatcccaactacgcaggaggctaaggcaggagaattgcttgaacccgggaggcggaggttgcagtgagccgagatcgcgccaatggcactccattcagcttgagtgacagaggtgagactcccatctcaaggtaaaaaaaaaaaatagaaatcagcaactgctatttgagtttacaggagtgagaagtcctctcttgcatggtgagatggggaacatttaattcaatagaaatatttgagaccaggtatggtggctcaagcctgtaatcccagcactttgggaggctgagttgggtggatcacctgacatcaggagtttgagactagcctggccaacatagcaataccctgtctcaaagatacaaaaattacccaggcttggtggtgtgtgtctgtggtcccagctactcaggaggctgaggcaggagaatcacttgaacctgggcggcaaaggttgcagtgagccgagaccatgccactgcactccagcctgggtgacagagtgagactccgtctggaaaaaaaaagaaaaaaatgagatataaagttcaaaggatgtatttattaagccaatataaagtaaagaggtggggaatgttgtagaagtatatgttgataaagggatcaggtggttgtacaataagaagggggttgcagacatggagaaacagttcttctagctcttccactttcagtatcatctgtgtgggtcactggaatcctttttcacaatgcctgcttgcccatgagttttaagaactagtacagtgtagaaatgattagtaggaaaaacttggctgggttaatttgctttgctgagccgattcaacttaaaaagcgaggtccatactaagtgcccaagaatcaagaaggaggctcacatttgaacttgatgtttagttaatgtgaatcattttctgttgaactaatgagaatacagtgaccttgagggttaggttgtacatctgaattgttcgggctgtttcctgtcttttggatgttttgtttgtatagatattttcattttatgttacatcatttgttctttggtagcaaaaattgagttgaaatgatacagttcctgaaatctatgatttcatgtttcggagatatgtatcaggaataatagtgtgggttctcatgagaaaatctggattgcattactgtgctactttggtttcttgtcagagaagttagtagtttagacctccttcagaatcctttctttggactttgtgtttcttacgttgtgccagccttgattttatttgtctgtcctctgtctttctataccatttgtttacacttaactctag

SEQ ID NO: 445087 - DNA, 4628 bp, Homo sapiens
agccggtacctactttccacagggaggagcggccgccggagatgcctgacgcatctgtctgaggagcggtcagtgacgcgatggagcgggcaagggatcgcttacacctgagacgaactacagaacagcacgtaccagaggtggaagtccaagtcaaacgcagaaggactgcctcactgagcaaccaagagtgtcagttgtacccgaggcgttctcagcagcagcaagtacctgtggtggatttccaggctgaactgaggcaggcattcttagctgagacaccaagaggtggttaaagccatattggagtagcgaggaatctgattccaagcaaaaaccaggctccatctactctttgaagcttctgcccagcttgcattgtttctaggagaacccgcgtcatacctttatctatagccttcccctaggtcttcagaagcatcaagttttaactgtggacattggatttggtggaacagcaatcatgactgttggcaagagtagcaagatgctgcagcacattgactatagaatgagatgtatcctgcaagatggccgaatcttcattggcacctttaaggcttttgacaagcatatgaatttgatcctctgtgattgtgatgagttcagaaagatcaagccaaagaatgcgaagcaaccagagcgtgaagaaaagcgggttttgggtctggtgttgctgcgtggggagaacttggtatccatgactgtggaggggccaccccccaaagatactggcattgctcgggtaccacttgctggagctgctggaggccctggggttggtagggcagctggtagaggagtaccagctggtgtgccaattccccaggcccctgctggattggcaggccctgtccgaggagttgggggaccatcccagcaggtaatgactccacagggaagaggcactgtagcagctgctgctgttgctgcgactgccagtattgctggagccccaacacagtacccaccaggacggggcactccgcccccacccgtcggcagagcaaccccacctccaggcattatggctcctccacctggtatgagaccacccatgggcccaccaattgggcttccccctgctcgagggacgccaataggcatgccgcctccgggaatgagaccccctccaccaggcattagaggtccacctcccccaggaatgcgtccaccaagaccttagcatactgttgatccatctcagtcactttttcccctgcaatgcgtcttgtgaaattgtgtagagtgtttgtgagctttttgttccctcattctgcattaataatagctaataataaatgcatagagcaattaaactgtgaggtactgttgtatatatttttttgcctgttgattttgatgagatcttaagttactgtggatgagggtgatgcctattaagcagttgattcaaatcatattctctttaattcttaggataaaaaggttttctgctatctaactttcactttgtgcattgactggtgttggttaataatgttttcatgacccgggggtttaagtggttgtgctgcttcacacatggcctcctgcttctcatgttgctatgtcacattatctgaagggaagtggggatgggatgaaaggccttgtaaggccacctatatactgaaggaagttgtagtgaatcacagtccatgctcattacatatcaaggcatttgaaatagaagttactctttttcttgggatgttgacctcagttgatcaggttttacagtgtcctatgatcagaatagaggatgtgatactggaataatcattttctaccattgagtaagtatttatttataaattactaaatgagtggaagatcctgggtactgggaggcaggaggttgcatatttgagttgataagttgtactactgataataaagataactgacacactaaaacatacttggtacactgaaatacaaattacggttatgtccagtggtatcaccaagtgacaaactgggagctaaatagttcagaaatgccctagtctctaggtccagtttgaattggttatggaacaaagaagccatttataaaagggaagagatttttaggttttgcagctaaggtttatagtaggcagcgagggaatgattcatagtgattgtagcagttggtttaccaagcactaaagagattggtgttaactccataatactgatagactgattggaattacattttttctcttgaatttaccaggagtggttgtgaatgtcaccttttccatcttttaaattacatccttgcaggtggtaatcactcaaggaaaaggaattatcagagtaacaatagttcctgttactgacttgatatggtctctgccagaatagcttctcagattaatggccactctcaggggaagcatttctccttgcattggtttgctggtatggatggcccttagattttggcatgagtgattatgcagcctatttgaagaaaacctgttttcaggacctttttaattaaatatggcctgttacatgagttaaagtgtcatacgataccattttttgaccacttagttgatgcctctgaaaggaagagagaatcagatcgctaaaatttgatgtgtcgtcagtgtggatcctactcagtagtgtcacaacgaggctgaaaatcatattaagtgcttttaggacagaaacgtaaactgctcaggtaaaataaccttataaagagaaataagcatatattgcagaggccttggctaggttcatgatgacacaggaccttgtctgaacataatgatttcaaaatttgagcttaaaaatgacactctgaaatccagtcagtgtgcctcactagacttttcgatttcaagattttctgcagaaaatgttttgaaaactttgaatacttaaaaatggcaggtgtagtattgcactttgctagttgctcagatacccttttttatttgtatagatattctgagttcctttttttttctacatgttgtacgttgtcgaaagctaaaaggaaacttatccttggatcacggaaggcagaggcatttggtgagatggaaacaaggatgtgtaaaaatgagacgaccacctctcggattaaaaaaaaaaagtgccagagttctagggttctaagtgatgtccaggaaggaggaggaataatatttatggagcatatattatggaacacaccattatgaatggtttttgattgatctcacaaagagcatgtgctttagacattaatgcagcgactaccatgaaacagagtattggattacctaaggaaagaagcagaggatggaatttgaggcaatcaggatgagtgaaaaattgatttgcagctgacctgcaaatggaatcatcaggaacatccctttctcatggagtcccttaatttacaagttaactgcaaacataggagatgatagttccaagaaggaacattttatcgtctttgtttttaatctcaagaatggtacctaccatcagtgaatgacctgttgcagtgctttcattgaagtgttcttcgttccctcagcaatatgattgtgatgactgaaaaagggaaactgtgccactatttgtaccatcattttcaccaaaatctaaaaatgctttttatgacgtatggagacattcttcatgtttgtttcagtggacactccttgcagatgtaaaaaactgagaaaactcacttttggaaagtgacctaaagagtgtcattgaagtgaattttaagtaggcacgatgattgttttcatggttgctgttggatcatatctcaggagctggaatgacagacattattgaacaaagaaatcaggatagtggaacttaaagggcttcatctcagtgctttcataagtatgaagtgcatatatttataattttcactaatcacagggtaaatataaaattgattcattaaaaatgtttcataagaattcaaaggacatagaattttgtgaaatgtagtatttttacttaagtgccttttctctgcttctaccccacagccaattttttataaaccagttgataacataagtagttttgggggatgatacattacttatacattttctatgtagtaaacatgtatgtgtatgtgtgtgggtgtgtgtctaattactttgttggacagattcctgtggtttggaactgctggggccaagtttatacaaaaatctacatttttgagtaaactccccatgactctagtaagtttccacagtatttgagtattctttatttcctaaagctgtacaaacatcagataatcaatatttgtaaggatcgataatataatttataatgaaattgctttatcagctattaatgttaactacatcatcttcatatagccttataactcatttgtgctattccattttcctctgttccttttattttcacttcccttgtaatgttagtctctttgtactgatttctgaagagttcatttatgattaaacatgttaacattttgtctagaattgcaaatatgttttttctcattcattttactatggtgttttattttttggttatacagaagttgtatattgaaatataatcttgttctgttttatgactttggagttttgtgg

SEQ ID NO: 445088 - DNA, 5912 bp, Homo sapiens
agccggtacctactttccacagggaggagcggccgccggagatgcctgacgcatctgtctgaggagcggtcagtgacgcgatggagcgggcaagggatcgcttacacctgagacgaactacagaacagcacgtaccagaggtggaagtccaagtcaaacgcagaaggactgcctcactgagcaaccaagagtgtcagttgtacccgaggcgttctcagcagcagcaagtacctgtggtggatttccaggctgaactgaggcaggcattcttagctgagacaccaagaggtggttaaagccatattggagtagcgaggaatctgattccaagcaaaaaccaggctccatctactctttgaagcttctgcccagcttgcattgtttctaggagaacccgcgtcatacctttatctatagccttcccctaggtcttcagaagcatcaagttttaactgtggacattggatttggtggaacagcaatcatgactgttggcaagagtagcaagatgctgcagcacattgactatagaatgagatgtatcctgcaagatggccgaatcttcattggcacctttaaggcttttgacaagcatatgaatttgatcctctgtgattgtgatgagttcagaaagatcaagccaaagaatgcgaagcaaccagagcgtgaagaaaagcgggttttgggtctggtgttgctgcgtggggagaacttggtatccatgactgtggaggggccaccccccaaagatactggcattgctcgggtaccacttgctggagctgctggaggccctggggttggtagggcagctggtagaggagtaccagctggtgtgccaattccccaggcccctgctggattggcaggccctgtccgaggagttgggggaccatcccagcaggtaatgactccacagggaagaggcactgtagcagctgctgctgttgctgcgactgccagtattgctggagccccaacacagtacccaccaggacggggcactccgcccccacccgtcggcagagcaaccccacctccaggcattatggctcctccacctggtatgagaccacccatgggcccaccaattgggcttccccctgctcgagggacgccaataggcatgccgcctccgggaatgagaccccctccaccaggcattagaggtccacctcccccaggaatgcgtccaccaagaccttagcatactgttgatccatctcagtcactttttcccctgcaatgcgtcttgtgaaattgtgtagagtgtttgtgagctttttgttccctcattctgcattaataatagctaataataaatgcatagagcaattaaactgtgaggtactgttgtatatatttttttgcctgttgattttgatgagatcttaagttactgtggatgagggtgatgcctattaagcagttgattcaaatcatattctctttaattcttaggataaaaaggttttctgctatctaactttcactttgtgcattgactggtgttggttaataatgttttcatgacccgggggtttaagtggttgtgctgcttcacacatggcctcctgcttctcatgttgctatgtcacattatctgaagggaagtggggatgggatgaaaggccttgtaaggccacctatatactgaaggaagttgtagtgaatcacagtccatgctcattacatatcaaggcatttgaaatagaagttactctttttcttgggatgttgacctcagttgatcaggttttacagtgtcctatgatcagaatagaggatgtgatactggaataatcattttctaccattgagtaagtatttatttataaattactaaatgagtggaagatcctgggtactgggaggcaggaggttgcatatttgagttgataagttgtactactgataataaagataactgacacactaaaacatacttggtacactgaaatacaaattacggttatgtccagtggtatcaccaagtgacaaactgggagctaaatagttcagaaatgccctagtctctaggtccagtttgaattggttatggaacaaagaagccatttataaaagggaagagatttttaggttttgcagctaaggtttatagtaggcagcgagggaatgattcatagtgattgtagcagttggtttaccaagcactaaagagattggtgttaactccataatactgatagactgattggaattacattttttctcttgaatttaccaggagtggttgtgaatgtcaccttttccatcttttaaattacatccttgcaggtggtaatcactcaaggaaaaggaattatcagagtaacaatagttcctgttactgacttgatatggtctctgccagaatagcttctcagattaatggccactctcaggggaagcatttctccttgcattggtttgctggtatggatggcccttagattttggcatgagtgattatgcagcctatttgaagaaaacctgttttcaggacctttttaattaaatatggcctgttacatgagttaaagtgtcatacgataccattttttgaccacttagttgatgcctctgaaaggaagagagaatcagatcgctaaaatttgatgtgtcgtcagtgtggatcctactcagtagtgtcacaacgaggctgaaaatcatattaagtgcttttaggacagaaacgtaaactgctcaggtaaaataaccttataaagagaaataagcatatattgcagaggccttggctaggttcatgatgacacaggaccttgtctgaacataatgatttcaaaatttgagcttaaaaatgacactctgaaatccagtcagtgtgcctcactagacttttcgatttcaagattttctgcagaaaatgttttgaaaactttgaatacttaaaaatggcaggtgtagtattgcactttgctagttgctcagatacccttttttatttgtatagatattctgagttcctttttttttctacatgttgtacgttgtcgaaagctaaaaggaaacttatccttggatcacggaaggcagaggcatttggtgagatggaaacaaggatgtgtaaaaatgagacgaccacctctcggattaaaaaaaaaaagtgccagagttctagggttctaagtgatgtccaggaaggaggaggaataatatttatggagcatatattatggaacacaccattatgaatggtttttgattgatctcacaaagagcatgtgctttagacattaatgcagcgactaccatgaaacagagtattggattacctaaggaaagaagcagaggatggaatttgaggcaatcaggatgagtgaaaaattgatttgcagctgacctgcaaatggaatcatcaggaacatccctttctcatggagtcccttaatttacaagttaactgcaaacataggagatgatagttccaagaaggaacattttatcgtctttgtttttaatctcaagaatggtacctaccatcagtgaatgacctgttgcagtgctttcattgaagtgttcttcgttccctcagcaatatgattgtgatgactgaaaaagggaaactgtgccactatttgtaccatcattttcaccaaaatctaaaaatgctttttatgacgtatggagacattcttcatgtttgtttcagtggacactccttgcagatgtaaaaaactgagaaaactcacttttggaaagtgacctaaagagtgtcattgaagtgaattttaagtaggcacgatgattgttttcatggttgctgttggatcatatctcaggagctggaatgacagacattattgaacaaagaaatcaggatagtggaacttaaagggcttcatctcagtgctttcataagtatgaagtgcatatatttataattttcactaatcacaggaatattccctctgtatacttgcatttttttctatcaattgacgcttacaattatttttgcaagttggaaaaaaatgcagtattaatttcatttgcaacaaatttaatagattaattaggagagaatagatatctttaaaattgagtcttctgtccaactgcaagttatagctgaggtggtaccagtttaagaagtgagaacttcttcactgactgaaatttgcatatcaatccaaatcattgtgcttatttactatttttgtagacgtcattcttcaaaagtgctgcatcttcaatagtcaaggaggacaaagacatctttcctgcaggtggtgaccatgtggataataggatcatagacaaatggtggttccatctacagcatcaccgaaatgctgttgttactgcttctttctgggatcttcttgcatctttgcttctaaaggggcacaccttttatagaagtacgtccaggaatagaagtgacctgctttttcgcaagtaattgcctggaatgtttttatgtacttctctgcactctcaatacatttcatgcttccctctatttttgtatattaactcattgtatttcttaaatttatattttactttatgaatggaagtgagatttgtgtatggtaaatataattaattcaaccccatggatacgttagtcactgtccagatgatggcaagtctttctcagaagcagagggccttggtgtgccagtgattttttttccccatgtgtaagatactttttttcctcatttgaatcaggagcccacagtttttagacaagtcccaaatgaaatcttaagcatttgtgttatctggactagaccttctgtagtatcctttttgttagacctagtatatctcattgcagatcaggatctgagattgactatagttcacctctttccaagtacacaaacttggatgacatgacaactgagtgtgtaagggagagcgagacccttgcactgccatttgagcccttgtgatctcatcttgtagaacatgttgtacaatcattttattggtatcattagtgttatttggggctggaataaaaatctcagtgcaccaaagagatttcccctttatccacgttaccctggttttcctttgttttctgtttaacctaaacgggcttaatataaaatagtgcttatttggtgttttaattgtctgcttctataacataagctgcactgtccattggggaactgctcaccatattgcccaacctgtcttgataggtttatacatgggaggcattcagtaatattaattacctctctagaccagtgttagcaataacaaacacttgctagaattttaagactatataatcaatcactttgatgtcagttaatcctaccaacacaagattaaaggtttaaaaatctcatacgtgtacagccattagtgtctcctttcatactatattattttgttcattggcagctagatttttaggtagaacttgtgttcctttttgcaatgctcatttattttacctggacagaaggtgctcttctgtctcttctccaaagttaatttatctcatactatttcttgtgttaatattttccaagttcagtatgctgttctggttataagaagatcagtgtcctaatcacacacttttacattatatgaaacatcatacagagttttgtagtctgtataacaatacacagaggtagcaaaatttgtaaaagagcagactatatagtccatactgtagtaactactcaacattgccattatacgtgaaatcggctataaccaattcataaacaaatgaatttggccgtgttctagtaaaacttatttacaaaaacatgtgttaggccagatttggaccacaggctgtagatttctgacctctggcttacagcagaagtttattatgatcctggggaaggtggatatacatggaaggcagaagcgagaagatgtattccatcccatgtcatttt

SEQ ID NO: 445089 - DNA, 5864 bp, Homo sapiens
agccggtacctactttccacagggaggagcggccgccggagatgcctgacgcatctgtctgaggagcggtcagtgacgcgatggagcgggcaagggatcgcttacacctgagacgaactacagaacagcacgtaccagaggtggaagtccaagtcaaacgcagaaggactgcctcactgagcaaccaagagtgtcagttgtacccgaggcgttctcagcagcagcaagtacctgtggtggatttccaggctgaactgaggcaggcattcttagctgagacaccaagaggtggttaaagccatattggagtagcgaggaatctgattccaagcaaaaaccaggctccatctactctttgaagcttctgcccagcttgcattgtttctaggagaacccgcgtcatacctttatctatagccttcccctaggtcttcagaagcatcaagttttaactgtggacattggatttggtggaacagcaatcatgactgttggcaagagtagcaagatgctgcagcacattgactatagaatgagatgtatcctgcaagatggccgaatcttcattggcacctttaaggcttttgacaagcatatgaatttgatcctctgtgattgtgatgagttcagaaagatcaagccaaagaatgcgaagcaaccagagcgtgaagaaaagcgggttttgggtctggtgttgctgcgtggggagaacttggtatccatgactgtggaggggccaccccccaaagatactggcattgctcgggtaccacttgctggagctgctggaggccctggggttggtagggcagctggtagaggagtaccagctggtgtgccaattccccaggcccctgctggattggcaggccctgtccgaggagttgggggaccatcccagcaggtaatgactccacagggaagaggcactgtagcagctgctgctgttgctgcgactgccagtattgctggagccccaacacagtacccaccaggacggggcactccgcccccacccgtcggcagagcaaccccacctccaggcattatggctcctccacctggtatgagaccacccatgggcccaccaattgggcttccccctgctcgagggacgccaataggcatgccgcctccgggaatgagaccccctccaccaggcattagaggtccacctcccccaggaatgcgtccaccaagaccttagcatactgttgatccatctcagtcactttttcccctgcaatgcgtcttgtgaaattgtgtagagtgtttgtgagctttttgttccctcattctgcattaataatagctaataataaatgcatagagcaattaaactgtgaggtactgttgtatatatttttttgcctgttgattttgatgagatcttaagttactgtggatgagggtgatgcctattaagcagttgattcaaatcatattctctttaattcttaggataaaaaggttttctgctatctaactttcactttgtgcattgactggtgttggttaataatgttttcatgacccgggggtttaagtggttgtgctgcttcacacatggcctcctgcttctcatgttgctatgtcacattatctgaagggaagtggggatgggatgaaaggccttgtaaggccacctatatactgaaggaagttgtagtgaatcacagtccatgctcattacatatcaaggcatttgaaatagaagttactctttttcttgggatgttgacctcagttgatcaggttttacagtgtcctatgatcagaatagaggatgtgatactggaataatcattttctaccattgagtaagtatttatttataaattactaaatgagtggaagatcctgggtactgggaggcaggaggttgcatatttgagttgataagttgtactactgataataaagataactgacacactaaaacatacttggtacactgaaatacaaattacggttatgtccagtggtatcaccaagtgacaaactgggagctaaatagttcagaaatgccctagtctctaggtccagtttgaattggttatggaacaaagaagccatttataaaagggaagagatttttaggttttgcagctaaggtttatagtaggcagcgagggaatgattcatagtgattgtagcagttggtttaccaagcactaaagagattggtgttaactccataatactgatagactgattggaattacattttttctcttgaatttaccaggagtggttgtgaatgtcaccttttccatcttttaaattacatccttgcaggtggtaatcactcaaggaaaaggaattatcagagtaacaatagttcctgttactgacttgatatggtctctgccagaatagcttctcagattaatggccactctcaggggaagcatttctccttgcattggtttgctggtatggatggcccttagattttggcatgagtgattatgcagcctatttgaagaaaacctgttttcaggacctttttaattaaatatggcctgttacatgagttaaagtgtcatacgataccattttttgaccacttagttgatgcctctgaaaggaagagagaatcagatcgctaaaatttgatgtgtcgtcagtgtggatcctactcagtagtgtcacaacgaggctgaaaatcatattaagtgcttttaggacagaaacgtaaactgctcaggtaaaataaccttataaagagaaataagcatatattgcagaggccttggctaggttcatgatgacacaggaccttgtctgaacataatgatttcaaaatttgagcttaaaaatgacactctgaaatccagtcagtgtgcctcactagacttttcgatttcaagattttctgcagaaaatgttttgaaaactttgaatacttaaaaatggcaggtgtagtattgcactttgctagttgctcagatacccttttttatttgtatagatattctgagttcctttttttttctacatgttgtacgttgtcgaaagctaaaaggaaacttatccttggatcacggaaggcagaggcatttggtgagatggaaacaaggatgtgtaaaaatgagacgaccacctctcggattaaaaaaaaaaagtgccagagttctagggttctaagtgatgtccaggaaggaggaggaataatatttatggagcatatattatggaacacaccattatgaatggtttttgattgatctcacaaagagcatgtgctttagacattaatgcagcgactaccatgaaacagagtattggattacctaaggaaagaagcagaggatggaatttgaggcaatcaggatgagtgaaaaattgatttgcagctgacctgcaaatggaatcatcaggaacatccctttctcatggagtcccttaatttacaagttaactgcaaacataggagatgatagttccaagaaggaacattttatcgtctttgtttttaatctcaagaatggtacctaccatcagtgaatgacctgttgcagtgctttcattgaagtgttcttcgttccctcagcaatatgattgtgatgactgaaaaagggaaactgtgccactatttgtaccatcattttcaccaaaatctaaaaatgctttttatgacgtatggagacattcttcatgtttgtttcagtggacactccttgcagatgtaaaaaactgagaaaactcacttttggaaagtgacctaaagagtgtcattgaagtgaattttaagtaggcacgatgattgttttcatggttgctgttggatcatatctcaggagctggaatgacagacattattgaacaaagaaatcaggatagtggaacttaaagggcttcatctcagtgctttcataagtatgaagtgcatatatttataattttcactaatcacaggaatattccctctgtatacttgcatttttttctatcaattgacgcttacaattatttttgcaagttggaaaaaaatgcagtattaatttcatttgcaacaaatttaatagattaattaggagagaatagatatctttaaaattgagtcttctgtccaactgcaagttatagctgaggtggtaccagtttaagaagtgagaacttcttcactgactgaaatttgcatatcaatccaaatcattgtgcttatttactatttttgtagacgtcattcttcaaaagtgctgcatcttcaatagtcaaggaggacaaagacatctttcctgcaggtggtgaccatgtggataataggatcatagacaaatggtggttccatctacagcatcaccgaaatgctgttgttactgcttctttctgggatcttcttgcatctttgcttctaaaggggcacaccttttatagaagtacgtccaggaatagaagtgacctgctttttcgcaagtaattgcctggaatgtttttatgtacttctctgcactctcaatacatttcatgcttccctctatttttgtatattaactcattgtatttcttaaatttatattttactttatgaatggaagtgagatttgtgtatggtaaatataattaattcaaccccatggatacgttagtcactgtccagatgatggcaagtctttctcagaagcagagggccttggtgtgccagtgattttttttccccatgtgtaagatactttttttcctcatttgaatcaggagcccacagtttttagacaagtcccaaatgaaatcttaagcatttgtgttatctggactagaccttctgtagtatcctttttgttagacctagtatatctcattgcagatcaggatctgagattgactatagttcacctctttccaagtacacaaacttggatgacatgacaactgagtgtgtaagggagagcgagacccttgcactgccatttgagcccttgtgatctcatcttgtagaacatgttgtacaatcattttattggtatcattagtgttatttggggctggaataaaaatctcagtgcaccaaagagatttcccctttatccacgttaccctggttttcctttgttttctgtttaacctaaacgggcttaatataaaatagtgcttatttggtgttttaattgtctgcttctataacataagctgcactgtccattggggaactgctcaccatattgcccaacctgtcttgataggtttatacatgggaggcattcagtaatattaattacctctctagaccagtgttagcaataacaaacacttgctagaattttaagactatataatcaatcactttgatgtcagttaatcctaccaacacaagattaaaggtttaaaaatctcatacgtgtacagccattagtgtctcctttcatactatattattttgttcattggcagctagatttttaggtagaacttgtgttcctttttgcaatgctcatttattttacctggacagaaggtgctcttctgtctcttctccaaagttaatttatctcatactatttcttgtgttaatattttccaagttcagtatgctgttctggttataagaagatcagtgtcctaatcacacacttttacattatatgaaacatcatacagagttttgtagtctgtataacaatacacagaggtagcaaaatttgtaaaagagcagactatatagtccatactgtagtaactactcaacattgccattatacgtgaaatcggctataaccaattcataaacaaatgaatttggccgtgttctagtaaaacttatttacaaaaacatgtgttagtttagcttctggaaaacagcgatgtagcattaatacctctctccctaaagtagttttttcctcaagaatcagctatggcca

SEQ ID NO: 445090 - DNA, 1443 bp, Homo sapiens
  misc_feature (1382)..(1382): n is a, c, g, or t
agccggtacctactttccacagggaggagcggccgccggagatgcctgacgcatctgtctgaggagcggtcagtgacgcgatggagcgggcaagggatcgcttacacctgagacgaactacagaacagcacgtaccagaggtggaagtccaagtcaaacgcagaaggactgcctcactgagcaaccaagagtgtcagttgtacccgaggcgttctcagcagcagcaagtacctgtggtggatttccaggctgaactgaggcaggcattcttagctgagacaccaagaggtggttaaagccatattggagtagcgaggaatctgattccaagcaaaaaccaggctccatctactctttgaagcttctgcccagcttgcattgtttctaggagaacccgcgtcatacctttatctatagccttcccctaggtcttcagaagcatcaagttttaactgtggacattggatttggtggaacagcaatcatgactgttggcaagagtagcaagatgctgcagcacattgactatagaatgagatgtatcctgcaagatggccgaatcttcattggcacctttaaggcttttgacaagcatatgaatttgatcctctgtgattgtgatgagttcagaaagatcaagccaaagaatgcgaagcaaccagagcgtgaagaaaagcgggttttgggtctggtgttgctgcgtggggagaacttggtatccatgactgtggaggggccaccccccaaagatactggcattgctcgggtaccacttgctggagctgctggaggccctggggttggtagggcagctggtagaggagtaccagctggtgtgccaattccccaggcccctgctggattggcaggccctgtccgaggagttgggggaccatcccagcaggtaatgactccacagggaagaggcactgtagcagctgctgctgttgctgcgactgccagtattgctggagccccaacacagtacccaccaggacggggcactccgcccccacccgtcggcagagcaaccccacctccaggcattatggctcctccacctggtatgagaccacccatgggcccaccaattgggcttccccctgctcgagggacgccaataggcatgccgcctccgggaatgagaccccctccaccaggcattagaggtccacctcccccaggaatgcgtccaccaagaccttagcatactgttgatccatctcagtcactttttcccctgcaatgcgtcttgtgaaattgtgtagagtgtttgtgagctttttgttccctcattctgcattaataatagctaataataaatgcatagagcaattaaactgtgaaaaaaaaaaaaaaaaaaaaaaaaaaaaaaaaaaaanaaaaaaaaaaaacaaaaaaaacaaaaaaaaaaaaaacaaaagaaaagaaaaaaaaacaaaa

SEQ ID NO: 445091 - DNA, 1395 bp, Homo sapiens
agccggtacctactttccacagggaggagcggccgccggagatgcctgacgcatctgtctgaggagcggtcagtgacgcgatggagcgggcaagggatcgcttacacctgagacgaactacagaacagcacgtaccagaggtggaagtccaagtcaaacgcagaaggactgcctcactgagcaaccaagagtgtcagttgtacccgaggcgttctcagcagcagcaagtacctgtggtggatttccaggctgaactgaggcaggcattcttagctgagacaccaagaggtggttaaagccatattggagtagcgaggaatctgattccaagcaaaaaccaggctccatctactctttgaagcttctgcccagcttgcattgtttctaggagaacccgcgtcatacctttatctatagccttcccctaggtcttcagaagcatcaagttttaactgtggacattggatttggtggaacagcaatcatgactgttggcaagagtagcaagatgctgcagcacattgactatagaatgagatgtatcctgcaagatggccgaatcttcattggcacctttaaggcttttgacaagcatatgaatttgatcctctgtgattgtgatgagttcagaaagatcaagccaaagaatgcgaagcaaccagagcgtgaagaaaagcgggttttgggtctggtgttgctgcgtggggagaacttggtatccatgactgtggaggggccaccccccaaagatactggcattgctcgggtaccacttgctggagctgctggaggccctggggttggtagggcagctggtagaggagtaccagctggtgtgccaattccccaggcccctgctggattggcaggccctgtccgaggagttgggggaccatcccagcaggtaatgactccacagggaagaggcactgtagcagctgctgctgttgctgcgactgccagtattgctggagccccaacacagtacccaccaggacggggcactccgcccccacccgtcggcagagcaaccccacctccaggcattatggctcctccacctggtatgagaccacccatgggcccaccaattgggcttccccctgctcgagggacgccaataggcatgccgcctccgggaatgagaccccctccaccaggcattagaggtccacctcccccaggaatgcgtccaccaagaccttagcatactgttgatccatctcagtcactttttcccctgcaatgcgtcttgtgaaattgtgtagagtgtttgtgagctttttgttccctcattctgcattaataatagctaataataaatgcatagagcaattaaactgtgacaaaaaaaacaaaaaaaaaaaaaacaaaagaaaagaaaaaaaaacaaaa

SEQ ID NO: 445092 - DNA, 1063 bp, Homo sapiens
agccggtacctactttccacagggaggagcggccgccggagatgcctgacgcatctgtctgaggagcggtcagtgacgcgatggagcgggcaagggatcgcttacacctgagacgaactacagaacagcacgtaccagaggtggaagtccaagtcaaacgcagaaggactgcctcactgagcaaccaagagtgtcagttgtacccgaggcgttctcagcagcagcaagtacctgtggtggatttccaggctgaactgaggcaggcattcttagctgagacaccaagaggtggttaaagccatattggagtagcgaggaatctgattccaagcaaaaaccaggctccatctactctttgaagcttctgcccagcttgcattgtttctaggagaacccgcgtcatacctttatctatagccttcccctaggtcttcagaagcatcaagttttaactgtggacattggatttggtggaacagcaatcatgactgttggcaagagtagcaagatgctgcagcacattgactatagaatgagatgtatcctgcaagatggccgaatcttcattggcacctttaaggcttttgacaagcatatgaatttgatcctctgtgattgtgatgagttcagaaagatcaagccaaagaatgcgaagcaaccagagcgtgaagaaaagcgggttttgggtctggtgttgctgcgtggggagaacttggtatccatgactgtggaggggccaccccccaaagatactggcattgctcgggtaccacttgctggagctgctggaggccctggggttggtagggcagctggtagaggagtaccagctggtgtgccaattccccaggcccctgctggattggcaggccctgtccgaggagttgggggaccatcccagcaggtaatgactccacagggaagaggcactgtagcagctgctgctgttgctgcgactgccagtattgctggagccccaacacagtacccaccaggacggggcactccgcccccacccgtcggcagagcaaccccacctccaggtaagggatccctgagtacg

SEQ ID NO: 445093 - DNA, 1487 bp, Homo sapiens
agccggtacctactttccacagggaggagcggccgccggagatgcctgacgcatctgtctgaggagcggtcagtgacgcgatggagcgggcaagattaaaaataagtagatttaagccaggtgcggtggctcatgtctatagtcccagcacttttggaggccaaggcagaaggatcactggagcctgggagttcaagcttgggtattgagaccccgtctctacatttaaaaaaagggatcgcttacacctgagacgaactacagaacagcacgtaccagaggtggaagtccaagtcaaacgcagaaggactgcctcactgagcaaccaagagtgtcagttgtacccgaggcgttctcagcagcagcaagtacctgtggtggatttccaggctgaactgaggcaggcattcttagctgagacaccaagaggtggttaaagccatattggagtagcgaggaatctgattccaagcaaaaaccaggctccatctactctttgaagcttctgcccagcttgcattgtttctaggagaacccgcgtcatacctttatctatagccttcccctaggtcttcagaagcatcaagttttaactgtggacattggatttggtggaacagcaatcatgactgttggcaagagtagcaagatgctgcagcacattgactatagaatgagatgtatcctgcaagatggccgaatcttcattggcacctttaaggcttttgacaagcatatgaatttgatcctctgtgattgtgatgagttcagaaagatcaagccaaagaatgcgaagcaaccagagcgtgaagaaaagcgggttttgggtctggtgttgctgcgtggggagaacttggtatccatgactgtggaggggccaccccccaaagatactggcattgctcgggtaccacttgctggagctgctggaggccctggggttggtagggcagctggtagaggagtaccagctggtgtgccaattccccaggcccctgctggattggcaggccctgtccgaggagttgggggaccatcccagcaggtaatgactccacagggaagaggcactgtagcagctgctgctgttgctgcgactgccagtattgctggagccccaacacagtacccaccaggacggggcactccgcccccacccgtcggcagagcaaccccacctccaggcattatggctcctccacctggtatgagaccacccatgggcccaccaattgggcttccccctgctcgagggacgccaataggcatgccgcctccgggaatgagaccccctccaccaggcattagaggtccacctcccccaggaatgcgtccaccaagaccttagcatactgttgatccatctcagtcactttttcccctgcaatgcgtcttgtgaaattgtgtagagtgtttgtgagctttttgttccctcattctgcattaataatagctaataataaatgcatagagcaattaaactgtga

SEQ ID NO: 445094 - DNA, 1369 bp, Homo sapiens
agccggtacctactttccacagggaggagcggccgccggagatgcctgacgcatctgtctgaggagcggtcagtgacgcgatggagcgggcaagggatcgcttacacctgagacgaactacagaacagcacgtaccagaggtggaagtccaagtcaaacgcagaaggactgcctcactgagcaaccaagagtgtcagttgtacccgaggcgttctcagcagcagcaagtacctgtggtggatttccaggctgaactgaggcaggcattcttagctgagacaccaagaggtggttaaagccatattggagtagcgaggaatctgattccaagcaaaaaccagctttaacatgctttcctctgcaggctccatctactctttgaagcttctgcccagcttgcattgtttctaggagaacccgcgtcatacctttatctatagccttcccctaggtcttcagaagcatcaagttttaactgtggacattggatttggtggaacagcaatcatgactgttggcaagagtagcaagatgctgcagcacattgactatagaatgagatgtatcctgcaagatggccgaatcttcattggcacctttaaggcttttgacaagcatatgaatttgatcctctgtgattgtgatgagttcagaaagatcaagccaaagaatgcgaagcaaccagagcgtgaagaaaagcgggttttgggtctggtgttgctgcgtggggagaacttggtatccatgactgtggaggggccaccccccaaagatactggcattgctcgggtaccacttgctggagctgctggaggccctggggttggtagggcagctggtagaggagtaccagctggtgtgccaattccccaggcccctgctggattggcaggccctgtccgaggagttgggggaccatcccagcaggtaatgactccacagggaagaggcactgtagcagctgctgctgttgctgcgactgccagtattgctggagccccaacacagtacccaccaggacggggcactccgcccccacccgtcggcagagcaaccccacctccaggcattatggctcctccacctggtatgagaccacccatgggcccaccaattgggcttccccctgctcgagggacgccaataggcatgccgcctccgggaatgagaccccctccaccaggcattagaggtccacctcccccaggaatgcgtccaccaagaccttagcatactgttgatccatctcagtcactttttcccctgcaatgcgtcttgtgaaattgtgtagagtgtttgtgagctttttgttccctcattctgcattaataatagctaataataaatgcatagagcaattaaactgtga

SEQ ID NO: 445095 - DNA, 1299 bp, Homo sapiens
agccggtacctactttccacagggaggagcggccgccggagatgcctgacgcatctgtctgaggagcggtcagtgacgcgatggagcgggcaagggatcgcttacacctgagacgaactacagaacagcacgtaccagaggtggaagtccaagtcaaacgcagaaggactgcctcactgagcaaccaagagtgtcagttgtacccgaggcgttctcagcagcagcaagtacctgtggtggatttccaggctgaactgaggcaggcattcttagctgagacaccaagaggtggttaaagccatattggagtagcgaggaatctgattccaagcaaaaaccaggagaacccgcgtcatacctttatctatagccttcccctaggtcttcagaagcatcaagttttaactgtggacattggatttggtggaacagcaatcatgactgttggcaagagtagcaagatgctgcagcacattgactatagaatgagatgtatcctgcaagatggccgaatcttcattggcacctttaaggcttttgacaagcatatgaatttgatcctctgtgattgtgatgagttcagaaagatcaagccaaagaatgcgaagcaaccagagcgtgaagaaaagcgggttttgggtctggtgttgctgcgtggggagaacttggtatccatgactgtggaggggccaccccccaaagatactggcattgctcgggtaccacttgctggagctgctggaggccctggggttggtagggcagctggtagaggagtaccagctggtgtgccaattccccaggcccctgctggattggcaggccctgtccgaggagttgggggaccatcccagcaggtaatgactccacagggaagaggcactgtagcagctgctgctgttgctgcgactgccagtattgctggagccccaacacagtacccaccaggacggggcactccgcccccacccgtcggcagagcaaccccacctccaggcattatggctcctccacctggtatgagaccacccatgggcccaccaattgggcttccccctgctcgagggacgccaataggcatgccgcctccgggaatgagaccccctccaccaggcattagaggtccacctcccccaggaatgcgtccaccaagaccttagcatactgttgatccatctcagtcactttttcccctgcaatgcgtcttgtgaaattgtgtagagtgtttgtgagctttttgttccctcattctgcattaataatagctaataataaatgcatagagcaattaaactgtga

SEQ ID NO: 445096 - DNA, 2062 bp, Homo sapiens
agccggtacctactttccacagggaggagcggccgccggagatgcctgacgcatctgtctgaggagcggtcagtgacgcgatggagcgggcaagggatcgcttacacctgagacgaactacagaacagcacgtaccagaggtggaagtccaagtcaaacgcagaaggactgcctcactgagcaaccaagagtgtcagttgtacccgaggcgttctcagcagcagcaagtacctgtggtggatttccaggctgaactgaggcaggcattcttagctgagacaccaagaggtggttaaagccatattggagtagcgaggaatctgattccaagcaaaaaccaggctccatctactctttgaagcttctgcccagcttgcattgtttctaggagaacccgcgtcatacctttatctatagccttcccctaggtcttcagaagcatcaagttttaactgtggacattggatttggtggaacagcaatcatgacggggtcttgctctgtctcccagtctggagtgcagtggtgcggtcttggctcactgcaaccctgggttcaagagattctcgtgcctcagcctctttattagaaacagggtttcactgtgttggccaggctggtctcaggctcctgacctctggtgatccacccacctcggcctcccaaagtgctgggattacaggcatgagatgagccactgtgcctggccatgagaaatgtttcatgatgtgagaaaatacaggagtttttggtcatgattccaccagtggtgaaggactgtcctgcagatgatggactctcaggtcagattacaatagaaataaagagggctttgaaaatggaagggttttggcattaacagtacagagaaaagcagtctggagagagagaacaccctacatcattgtggtttggtttacttaggggagtggacagtttagagcatgcatcgtcacagagaaggataatcacctgtaaggaggtgaaaattggttcttgagatgtgaaaaaatacttcataatcctttgtggtcctccaaagagccatactaaatatggaagaatgttggtgaaaaaggagagaatatttgtttagttaaggaaaccaggcttagattatgtaagggtggagaagaaacaggagaagattagaagactagggtgttggcaagctgaacatgactcttgtcttactgcttctagactgttggcaagagtagcaagatgctgcagcacattgactatagaatgagatgtatcctgcaagatggccgaatcttcattggcacctttaaggcttttgacaagcatatgaatttgatcctctgtgattgtgatgagttcagaaagatcaagccaaagaatgcgaagcaaccagagcgtgaagaaaagcgggttttgggtctggtgttgctgcgtggggagaacttggtatccatgactgtggaggggccaccccccaaagatactggcattgctcgggtaccacttgctggagctgctggaggccctggggttggtagggcagctggtagaggagtaccagctggtgtgccaattccccaggcccctgctggattggcaggccctgtccgaggagttgggggaccatcccagcaggtaatgactccacagggaagaggcactgtagcagctgctgctgttgctgcgactgccagtattgctggagccccaacacagtacccaccaggacggggcactccgcccccacccgtcggcagagcaaccccacctccaggcattatggctcctccacctggtatgagaccacccatgggcccaccaattgggcttccccctgctcgagggacgccaataggcatgccgcctccgggaatgagaccccctccaccaggcattagaggtccacctcccccaggaatgcgtccaccaagaccttagcatactgttgatccatctcagtcactttttcccctgcaatgcgtcttgtgaaattgtgtagagtgtttgtgagctttttgttccctcattctgcattaataatagctaataataaatgcatagagcaattaaactgtga

SEQ ID NO: 445097 - DNA, 1200 bp, Homo sapiens
agccggtacctactttccacagggaggagcggccgccggagatgcctgacgcatctgtctgaggagcggtcagtgacgcgatggagcgggcaagggatcgcttacacctgagacgaactacagaacagcacgtaccagaggtggaagtccaagtcaaacgcagaaggactgcctcactgagcaaccaagagtgtcagttgtacccgaggcgttctcagcagcagcaagtacctgtggtggatttccaggctgaactgaggcaggcattcttagctgagacaccaagaggtggttaaagccatattggagtagcgaggaatctgattccaagcaaaaaccagactgttggcaagagtagcaagatgctgcagcacattgactatagaatgagatgtatcctgcaagatggccgaatcttcattggcacctttaaggcttttgacaagcatatgaatttgatcctctgtgattgtgatgagttcagaaagatcaagccaaagaatgcgaagcaaccagagcgtgaagaaaagcgggttttgggtctggtgttgctgcgtggggagaacttggtatccatgactgtggaggggccaccccccaaagatactggcattgctcgggtaccacttgctggagctgctggaggccctggggttggtagggcagctggtagaggagtaccagctggtgtgccaattccccaggcccctgctggattggcaggccctgtccgaggagttgggggaccatcccagcaggtaatgactccacagggaagaggcactgtagcagctgctgctgttgctgcgactgccagtattgctggagccccaacacagtacccaccaggacggggcactccgcccccacccgtcggcagagcaaccccacctccaggcattatggctcctccacctggtatgagaccacccatgggcccaccaattgggcttccccctgctcgagggacgccaataggcatgccgcctccgggaatgagaccccctccaccaggcattagaggtccacctcccccaggaatgcgtccaccaagaccttagcatactgttgatccatctcagtcactttttcccctgcaatgcgtcttgtgaaattgtgtagagtgtttgtgagctttttgttccctcattctgcattaataatagctaataataaatgcatagagcaattaaactgtga

SEQ ID NO: 445098 - DNA, 1194 bp, Homo sapiens
agccggtacctactttccacagggaggagcggccgccggagatgcctgacgcatctgtctgaggagcggtcagtgacgcgatggagcgggcaagggatcgcttacacctgagacgaactacagaacagcacgtaccagaggtggaagtccaagtcaaacgcagaaggactgcctcactgagcaaccaagagtgtcagttgtacccgaggcgttctcagcagcagcaagtacctgtggtggatttccaggctgaactgaggcaggcattcttagctgagacaccaagaggtggttaaagccatattggagtagcgaggaatctgattccaagcaaaaaccaggctccatctactctttgaagcttctgcccagcttgcattgtttctaggagaacccgcgtcatacctttatctatagccttcccctaggtcttcagaagcatcaagttttaactgtggacattggatttggtggaacagcaatcatggccaaagaatgcgaagcaaccagagcgtgaagaaaagcgggttttgggtctggtgttgctgcgtggggagaacttggtatccatgactgtggaggggccaccccccaaagatactggcattgctcgggtaccacttgctggagctgctggaggccctggggttggtagggcagctggtagaggagtaccagctggtgtgccaattccccaggcccctgctggattggcaggccctgtccgaggagttgggggaccatcccagcaggtaatgactccacagggaagaggcactgtagcagctgctgctgttgctgcgactgccagtattgctggagccccaacacagtacccaccaggacggggcactccgcccccacccgtcggcagagcaaccccacctccaggcattatggctcctccacctggtatgagaccacccatgggcccaccaattgggcttccccctgctcgagggacgccaataggcatgccgcctccgggaatgagaccccctccaccaggcattagaggtccacctcccccaggaatgcgtccaccaagaccttagcatactgttgatccatctcagtcactttttcccctgcaatgcgtcttgtgaaattgtgtagagtgtttgtgagctttttgttccctcattctgcattaataatagctaataataaatgcatagagcaattaaactgtga

SEQ ID NO: 445099 - DNA, 925 bp, Homo sapiens
ccttccaacatctcatttctatagtcaatggcaagctgaacatgactcttgtcttactgcttctagactgttggcaagagtagcaagatgctgcagcacattgactatagaatgagatgtatcctgcaagatggccgaatcttcattggcacctttaaggcttttgacaagcatatgaatttgatcctctgtgattgtgatgagttcagaaagatcaagccaaagaatgcgaagcaaccagagcgtgaagaaaagcgggttttgggtctggtgttgctgcgtggggagaacttggtatccatgactgtggaggggccaccccccaaagatactggcattgctcgggtaccacttgctggagctgctggaggccctggggttggtagggcagctggtagaggagtaccagctggtgtgccaattccccaggcccctgctggattggcaggccctgtccgaggagttgggggaccatcccagcaggtaatgactccacagggaagaggcactgtagcagctgctgctgttgctgcgactgccagtattgctggagccccaacacagtacccaccaggacggggcactccgcccccacccgtcggcagagcaaccccacctccaggcattatggctcctccacctggtatgagaccacccatgggcccaccaattgggcttccccctgctcgagggacgccaataggcatgccgcctccgggaatgagaccccctccaccaggcattagaggtccacctcccccaggaatgcgtccaccaagaccttagcatactgttgatccatctcagtcactttttcccctgcaatgcgtcttgtgaaattgtgtagagtgtttgtgagctttttgttccctcattctgcattaataatagctaataataaatgcatagagcaattaaactgtga

SEQ ID NO: 445100 - DNA, 748 bp, Homo sapiens
agccggtacctactttccacagggaggagcggccgccggagatgcctgacgcatctgtctgaggagcggtcagtgacgcgatggagcgggcaagggatcgcttacacctgagacgaactacagaacagcacgtaccagaggtggaagtccaagtcaaacgcagaaggactgcctcactgagcaaccaagagtgtcagttgtacccgaggcgttctcagcagcagcaagtacctgtggtggatttccaggctgaactgaggcaggcattcttagctgagacaccaagaggtggttaaagccatattggagtagcgaggaatctgattccaagcaaaaaccaggctccatctactctttgaagcttctgcccagcttgcattgtttctaggagaacccgcgtcatacctttatctatagccttcccctaggtcttcagaagcatcaagttttaactgtggacattggatttggtggaacagcaatcatgactgttggcaagagtagcaagatgctgcagcacattgactatagaatgagatgtatcctgcaagatggccgaatcttcattggcacctttaaggcttttgacaagcatatgaatttgatcctctgtgattgtgatgagttcagaaagatcaagccaaagaatgcgaagcaaccagagcgtgaagaaaagcgggttttgggtctggcgctgttacggaggcgctgttacggaggcgctcgttacggaggcgctcgttacgga

SEQ ID NO: 445101 - DNA, 871 bp, Homo sapiens
agccggtacctactttccacagggaggagcggccgccggagatgcctgacgcatctgtctgaggagcggtcagtgacgcgatggagcgggcaagggatcgcttacacctgagacgaactacagaacagcacgtaccagaggtggaagtccaagtcaaacgcagaaggactgcctcactgagcaaccaagagtgtcagttgtacccgaggcgttctcagcagcagcaagtacctgtggtggatttccaggctgaactgaggcaggcattcttagctgagacaccaagaggtggttaaagccatattggagtagcgaggaatctgattccaagcaaaaaccaggctccatctactctttgaagcttctgcccagcttgcattgtttctaggagaacccgcgtcatacctttatctatagccttcccctaggtcttcagaagcatcaagttttaactgtggacattggatttggtggaacagcaatcatgactgttggcaagagtagcaagatgctgcagcacattgactatagaatgagatgtatcctgcaagatggccgaatcttcattggcacctttaaggcttttgacaagcatatgaatttgatcctctgtgattgtgatgagttcagaaagatcaagtaaggctgatttgggcaaatgggggttggacacagaggcagtgggaagggaaggccagagctggagtaagggatttccgagggtaactgaagtagttagggaaactatggtagagccagtctattgtttaacctcttgacctgatctctgaattaggtcagagtctgcatctgaactcttttaagtttgtaaaacaatcatggatttattactgggagtaaaagtatatgc

SEQ ID NO: 445102 - DNA, 4739 bp, Homo sapiens
agccggtacctactttccacagggaggagcggccgccggagatgcctgacgcatctgtctgaggagcggtcagtgacgcgatggagcgggcaagggatcgcttacacctgagacgaactacagaacagcacgtaccagaggtggaagtccaagtcaaacgcagaaggactgcctcactgagcaaccaagagtgtcagttgtacccgaggcgttctcagcagcagcaagtacctgtggtggatttccaggctgaactgaggcaggcattcttagctgagacaccaagaggtaatgactccacagggaagaggcactgtagcagctgctgctgttgctgcgactgccagtattgctggagccccaacacagtacccaccaggacggggcactccgcccccacccgtcggcagagcaaccccacctccaggcattatggctcctccacctggtatgagaccacccatgggcccaccaattgggcttccccctgctcgagggacgccaataggcatgccgcctccgggaatgagaccccctccaccaggcattagaggtccacctcccccaggaatgcgtccaccaagaccttagcatactgttgatccatctcagtcactttttcccctgcaatgcgtcttgtgaaattgtgtagagtgtttgtgagctttttgttccctcattctgcattaataatagctaataataaatgcatagagcaattaaactgtgaggtactgttgtatatatttttttgcctgttgattttgatgagatcttaagttactgtggatgagggtgatgcctattaagcagttgattcaaatcatattctctttaattcttaggataaaaaggttttctgctatctaactttcactttgtgcattgactggtgttggttaataatgttttcatgacccgggggtttaagtggttgtgctgcttcacacatggcctcctgcttctcatgttgctatgtcacattatctgaagggaagtggggatgggatgaaaggccttgtaaggccacctatatactgaaggaagttgtagtgaatcacagtccatgctcattacatatcaaggcatttgaaatagaagttactctttttcttgggatgttgacctcagttgatcaggttttacagtgtcctatgatcagaatagaggatgtgatactggaataatcattttctaccattgagtaagtatttatttataaattactaaatgagtggaagatcctgggtactgggaggcaggaggttgcatatttgagttgataagttgtactactgataataaagataactgacacactaaaacatacttggtacactgaaatacaaattacggttatgtccagtggtatcaccaagtgacaaactgggagctaaatagttcagaaatgccctagtctctaggtccagtttgaattggttatggaacaaagaagccatttataaaagggaagagatttttaggttttgcagctaaggtttatagtaggcagcgagggaatgattcatagtgattgtagcagttggtttaccaagcactaaagagattggtgttaactccataatactgatagactgattggaattacattttttctcttgaatttaccaggagtggttgtgaatgtcaccttttccatcttttaaattacatccttgcaggtggtaatcactcaaggaaaaggaattatcagagtaacaatagttcctgttactgacttgatatggtctctgccagaatagcttctcagattaatggccactctcaggggaagcatttctccttgcattggtttgctggtatggatggcccttagattttggcatgagtgattatgcagcctatttgaagaaaacctgttttcaggacctttttaattaaatatggcctgttacatgagttaaagtgtcatacgataccattttttgaccacttagttgatgcctctgaaaggaagagagaatcagatcgctaaaatttgatgtgtcgtcagtgtggatcctactcagtagtgtcacaacgaggctgaaaatcatattaagtgcttttaggacagaaacgtaaactgctcaggtaaaataaccttataaagagaaataagcatatattgcagaggccttggctaggttcatgatgacacaggaccttgtctgaacataatgatttcaaaatttgagcttaaaaatgacactctgaaatccagtcagtgtgcctcactagacttttcgatttcaagattttctgcagaaaatgttttgaaaactttgaatacttaaaaatggcaggtgtagtattgcactttgctagttgctcagatacccttttttatttgtatagatattctgagttcctttttttttctacatgttgtacgttgtcgaaagctaaaaggaaacttatccttggatcacggaaggcagaggcatttggtgagatggaaacaaggatgtgtaaaaatgagacgaccacctctcggattaaaaaaaaaaagtgccagagttctagggttctaagtgatgtccaggaaggaggaggaataatatttatggagcatatattatggaacacagtgagtatagtacctgcctttaaatgaatactgttggttttttaggacagttgcttttttttcttttttcttcagctgtgtgcagttgattaacttgtacagagcctatcacacaatagatgtttaagaaatattaagtgaatgaatgaggcagcattgctaatttttgtatagtgagacggtatctcacagtccaggctggagttcagtggcattaacataactcactgcagccttgaacacctgagctcaaacgatcctttcaccttatcctccagagtagctgggactgcagtcgcgtgtcaacatgcctggctaattttagttttctaatttttttagagttgggatctcactatgttgcttagactggtcttgaactcctggcctcatgccatcctcttgcctcagctggtattgtaggtgtgagccactgtgccaggtactaattttttttatgttagaaaacaagtttttaggtattttatagttacttccttatgacaatatctcatcagaatctaggcctatctgatatctgactccatacgtttataccgtgtagtcagccattcccagatagaggtcatttgagttacttagtgtttaccagcacttgtttactaccttgcgatgatatttacagtgtatttttgggtatggttttggggttatttggttgttgttaaaatgcctgtaatcccggcactttgggaggttgaggcgggtggatcacctgaggtcaggagttcgagcccagcctggccaacatggcgaaaccctacctctactaaaaatacaaaaattagcctggcgtggtggcaggcacctgtaatcccaactacgcaggaggctaaggcaggagaattgcttgaacccgggaggcggaggttgcagtgagccgagatcgcgccaatggcactccattcagcttgagtgacagaggtgagactcccatctcaaggtaaaaaaaaaaaatagaaatcagcaactgctatttgagtttacaggagtgagaagtcctctcttgcatggtgagatggggaacatttaattcaatagaaatatttgagaccaggtatggtggctcaagcctgtaatcccagcactttgggaggctgagttgggtggatcacctgacatcaggagtttgagactagcctggccaacatagcaataccctgtctcaaagatacaaaaattacccaggcttggtggtgtgtgtctgtggtcccagctactcaggaggctgaggcaggagaatcacttgaacctgggcggcaaaggttgcagtgagccgagaccatgccactgcactccagcctgggtgacagagtgagactccgtctggaaaaaaaaagaaaaaaatgagatataaagttcaaaggatgtatttattaagccaatataaagtaaagaggtggggaatgttgtagaagtatatgttgataaagggatcaggtggttgtacaataagaagggggttgcagacatggagaaacagttcttctagctcttccactttcagtatcatctgtgtgggtcactggaatcctttttcacaatgcctgcttgcccatgagttttaagaactagtacagtgtagaaatgattagtaggaaaaacttggctgggttaatttgctttgctgagccgattcaacttaaaaagcgaggtccatactaagtgcccaagaatcaagaaggaggctcacatttgaacttgatgtttagttaatgtgaatcattttctgttgaactaatgagaatacagtgaccttgagggttaggttgtacatctgaattgttcgggctgtttcctgtcttttggatgttttgtttgtatagatattttcattttatgttacatcatttgttctttggtagcaaaaattgagttgaaatgatacagttcctgaaatctatgatttcatgtttcggagatatgtatcaggaataatagtgtgggttctcatgagaaaatctggattgcattactgtgctactttggtttcttgtcagagaagttagtagtttagacctccttcagaatcctttctttggactttgtgtttcttacgttgtgccagccttgattttatttgtctgtcctctgtctttctataccatttgtttacacttaactctag

SEQ ID NO: 445103 - DNA, 2550 bp, Homo sapiens
agccggtacctactttccacagggaggagcggccgccggagatgcctgacgcatctgtctgaggagcggtcagtgacgcgatggagcgggcaagggatcgcttacacctgagacgaactacagaacagcacgtaccagaggtggaagtccaagtcaaacgcagaaggactgcctcactgagcaaccaagagtgtcagttgtacccgaggcgttctcagcagcagcaagtacctgtggtggatttccaggctgaactgaggcaggcattcttagctgagacaccaagaggtggttaaagccatattggagtagcgaggaatctgattccaagcaaaaaccaggtggtaatcactcaaggaaaaggaattatcagagtaacaatagttcctgttactgacttgatatggtctctgccagaatagcttctcagattaatggccactctcaggggaagcatttctccttgcattggtttgctggtatggatggcccttagattttggcatgagtgattatgcagcctatttgaagaaaacctgttttcaggacctttttaattaaatatggcctgttacatgagttaaagtgtcatacgataccattttttgaccacttagttgatgcctctgaaaggaagagagaatcagatcgctaaaatttgatgtgtcgtcagtgtggatcctactcagtagtgtcacaacgaggctgaaaatcatattaagtgcttttaggacagaaacgtaaactgctcaggtaaaataaccttataaagagaaataagcatatattgcagaggccttggctaggttcatgatgacacaggaccttgtctgaacataatgatttcaaaatttgagcttaaaaatgacactctgaaatccagtcagtgtgcctcactagacttttcgatttcaagattttctgcagaaaatgttttgaaaactttgaatacttaaaaatggcaggtgtagtattgcactttgctagttgctcagatacccttttttatttgtatagatattctgagttcctttttttttctacatgttgtacgttgtcgaaagctaaaaggaaacttatccttggatcacggaaggcagaggcatttggtgagatggaaacaaggatgtgtaaaaatgagacgaccacctctcggattaaaaaaaaaaagtgccagagttctagggttctaagtgatgtccaggaaggaggaggaataatatttatggagcatatattatggaacacagcaatcaggatgagtgaaaaattgatttgcagctgacctgcaaatggaatcatcaggaacatccctttctcatggagtcccttaatttacaagttaactgcaaacataggagatgatagttccaagaaggaacattttatcgtctttgtttttaatctcaagaatggtacctaccatcagtgaatgacctgttgcagtgctttcattgaagtgttcttcgttccctcagcaatatgattgtgatgactgaaaaagggaaactgtgccactatttgtaccatcattttcaccaaaatctaaaaatgctttttatgacgtatggagacattcttcatgtttgtttcagtggacactccttgcagatgtaaaaaactgagaaaactcacttttggaaagtgacctaaagagtgtcattgaagtgaattttaagtaggcacgatgattgttttcatggttgctgttggatcatatctcaggagctggaatgacagacattattgaacaaagaaatcaggatagtggaacttaaagggcttcatctcagtgctttcataagtatgaagtgcatatatttataattttcactaatcacagggtaaatataaaattgattcattaaaaatgtttcataagaattcaaaggacatagaattttgtgaaatgtagtatttttacttaagtgccttttctctgcttctaccccacagccaattttttataaaccagttgataacataagtagttttgggggatgatacattacttatacattttctatgtagtaaacatgtatgtgtatgtgtgtgggtgtgtgtctaattactttgttggacagattcctgtggtttggaactgctggggccaagtttatacaaaaatctacatttttgagtaaactccccatgactctagtaagtttccacagtatttgagtattctttatttcctaaagctgtacaaacatcagataatcaatatttgtaaggatcgataatataatttataatgaaattgctttatcagctattaatgttaactacatcatcttcatatagccttataactcatttgtgctattccattttcctctgttccttttattttcacttcccttgtaatgttagtctctttgtactgatttctgaagagttcatttatgattaaacatgttaacattttgtctagaattgcaaatatgttttttctcattcattttactatggtgttttattttttggttatacagaagttgtatattgaaatataatcttgttctgttttatgactttggagttttgtgg

SEQ ID NO: 445104 - DNA, 4308 bp, Homo sapiens
ccaccctaggcgcacttctgcacccaggcgcacttctccaccaattgggcttccccctgctcgagggacgccaataggcatgccgcctccgggaatgagaccccctccaccaggcattagaggtccacctcccccaggaatgcgtccaccaagaccttagcatactgttgatccatctcagtcactttttcccctgcaatgcgtcttgtgaaattgtgtagagtgtttgtgagctttttgttccctcattctgcattaataatagctaataataaatgcatagagcaattaaactgtgaggtactgttgtatatatttttttgcctgttgattttgatgagatcttaagttactgtggatgagggtgatgcctattaagcagttgattcaaatcatattctctttaattcttaggataaaaaggttttctgctatctaactttcactttgtgcattgactggtgttggttaataatgttttcatgacccgggggtttaagtggttgtgctgcttcacacatggcctcctgcttctcatgttgctatgtcacattatctgaagggaagtggggatgggatgaaaggccttgtaaggccacctatatactgaaggaagttgtagtgaatcacagtccatgctcattacatatcaaggcatttgaaatagaagttactctttttcttgggatgttgacctcagttgatcaggttttacagtgtcctatgatcagaatagaggatgtgatactggaataatcattttctaccattgagtaagtatttatttataaattactaaatgagtggaagatcctgggtactgggaggcaggaggttgcatatttgagttgataagttgtactactgataataaagataactgacacactaaaacatacttggtacactgaaatacaaattacggttatgtccagtggtatcaccaagtgacaaactgggagctaaatagttcagaaatgccctagtctctaggtccagtttgaattggttatggaacaaagaagccatttataaaagggaagagatttttaggttttgcagctaaggtttatagtaggcagcgagggaatgattcatagtgattgtagcagttggtttaccaagcactaaagagattggtgttaactccataatactgatagactgattggaattacattttttctcttgaatttaccaggagtggttgtgaatgtcaccttttccatcttttaaattacatccttgcaggtggtaatcactcaaggaaaaggaattatcagagtaacaatagttcctgttactgacttgatatggtctctgccagaatagcttctcagattaatggccactctcaggggaagcatttctccttgcattggtttgctggtatggatggcccttagattttggcatgagtgattatgcagcctatttgaagaaaacctgttttcaggacctttttaattaaatatggcctgttacatgagttaaagtgtcatacgataccattttttgaccacttagttgatgcctctgaaaggaagagagaatcagatcgctaaaatttgatgtgtcgtcagtgtggatcctactcagtagtgtcacaacgaggctgaaaatcatattaagtgcttttaggacagaaacgtaaactgctcaggtaaaataaccttataaagagaaataagcatatattgcagaggccttggctaggttcatgatgacacaggaccttgtctgaacataatgatttcaaaatttgagcttaaaaatgacactctgaaatccagtcagtgtgcctcactagacttttcgatttcaagattttctgcagaaaatgttttgaaaactttgaatacttaaaaatggcaggtgtagtattgcactttgctagttgctcagatacccttttttatttgtatagatattctgagttcctttttttttctacatgttgtacgttgtcgaaagctaaaaggaaacttatccttggatcacggaaggcagaggcatttggtgagatggaaacaaggatgtgtaaaaatgagacgaccacctctcggattaaaaaaaaaaagtgccagagttctagggttctaagtgatgtccaggaaggaggaggaataatatttatggagcatatattatggaacacagtgagtatagtacctgcctttaaatgaatactgttggttttttaggacagttgcttttttttcttttttcttcagctgtgtgcagttgattaacttgtacagagcctatcacacaatagatgtttaagaaatattaagtgaatgaatgaggcagcattgctaatttttgtatagtgagacggtatctcacagtccaggctggagttcagtggcattaacataactcactgcagccttgaacacctgagctcaaacgatcctttcaccttatcctccagagtagctgggactgcagtcgcgtgtcaacatgcctggctaattttagttttctaatttttttagagttgggatctcactatgttgcttagactggtcttgaactcctggcctcatgccatcctcttgcctcagctggtattgtaggtgtgagccactgtgccaggtactaattttttttatgttagaaaacaagtttttaggtattttatagttacttccttatgacaatatctcatcagaatctaggcctatctgatatctgactccatacgtttataccgtgtagtcagccattcccagatagaggtcatttgagttacttagtgtttaccagcacttgtttactaccttgcgatgatatttacagtgtatttttgggtatggttttggggttatttggttgttgttaaaatgcctgtaatcccggcactttgggaggttgaggcgggtggatcacctgaggtcaggagttcgagcccagcctggccaacatggcgaaaccctacctctactaaaaatacaaaaattagcctggcgtggtggcaggcacctgtaatcccaactacgcaggaggctaaggcaggagaattgcttgaacccgggaggcggaggttgcagtgagccgagatcgcgccaatggcactccattcagcttgagtgacagaggtgagactcccatctcaaggtaaaaaaaaaaaatagaaatcagcaactgctatttgagtttacaggagtgagaagtcctctcttgcatggtgagatggggaacatttaattcaatagaaatatttgagaccaggtatggtggctcaagcctgtaatcccagcactttgggaggctgagttgggtggatcacctgacatcaggagtttgagactagcctggccaacatagcaataccctgtctcaaagatacaaaaattacccaggcttggtggtgtgtgtctgtggtcccagctactcaggaggctgaggcaggagaatcacttgaacctgggcggcaaaggttgcagtgagccgagaccatgccactgcactccagcctgggtgacagagtgagactccgtctggaaaaaaaaagaaaaaaatgagatataaagttcaaaggatgtatttattaagccaatataaagtaaagaggtggggaatgttgtagaagtatatgttgataaagggatcaggtggttgtacaataagaagggggttgcagacatggagaaacagttcttctagctcttccactttcagtatcatctgtgtgggtcactggaatcctttttcacaatgcctgcttgcccatgagttttaagaactagtacagtgtagaaatgattagtaggaaaaacttggctgggttaatttgctttgctgagccgattcaacttaaaaagcgaggtccatactaagtgcccaagaatcaagaaggaggctcacatttgaacttgatgtttagttaatgtgaatcattttctgttgaactaatgagaatacagtgaccttgagggttaggttgtacatctgaattgttcgggctgtttcctgtcttttggatgttttgtttgtatagatattttcattttatgttacatcatttgttctttggtagcaaaaattgagttgaaatgatacagttcctgaaatctatgatttcatgtttcggagatatgtatcaggaataatagtgtgggttctcatgagaaaatctggattgcattactgtgctactttggtttcttgtcagagaagttagtagtttagacctccttcagaatcctttctttggactttgtgtttcttacgttgtgccagccttgattttatttgtctgtcctctgtctttctataccatttgtttacacttaactctag

SEQ ID NO: 445105 - DNA, 1132 bp, Homo sapiens
agccggtacctactttccacagggaggagcggccgccggagatgcctgacgcatctgtctgaggagcggtcagtgacgcgatggagcgggcaagggatcgcttacacctgagacgaactacagaacagcacgtaccagaggtggaagtccaagtcaaacgcagaaggactgcctcactgagcaaccaagagtgtcagttgtacccgaggcgttctcagcagcagcaagtacctgtggtggatttccaggctgaactgaggcaggcattcttagctgagacaccaagaggtggttaaagccatattggagtagcgaggaatctgattccaagcaaaaaccaggctccatctactctttgaagcttctgcccagcttgcattgtttctaggagaacccgcgtcatacctttatctatagccttcccctaggtcttcagaagcatcaagttttaactgtggacattggatttggtggaacagcaatcatgacggggtcttgctctgtctcccagtctggagtgcagtggtgcggtcttggctcactgcaaccctgggttcaagagattctcgtgcctcagcctctttattagaaacagggtttcactgtgttggccaggctggtctcaggctcctgacctctggtgatccacccacctcggcctcccaaagtgctgggattacaggcatgagatgagccactgtgcctggccatgagaaatgtttcatgatgtgagaaaatacaggagtttttggtcatgattccaccagtggtgaaggactgtcctgcagatgatggactctcagactgttggcaagagtagcaagatgctgcagcacattgactatagaatgagatgtatcctgcaagatggccgaatcttcattggcacctttaaggcttttgacaagcatatgaatttgatcctctgtgattgtgatgagttcagaaagatcaagtccacctcccccaggaatgcgtccaccaagaccttagcatactgttgatccatctcagtcactttttcccctgcaatgcgtcttgtgaaattgtgtagagtgtttgtgagctttttgttccctcattctgcattaataatagctaataataaatgcatagagcaattaaactgtga

SEQ ID NO: 445106 - DNA, 377 bp, Homo sapiens
agccggtacctactttccacagggaggagcggccgccggagatgcctgacgcatctgtctgaggagcggtcagtgacgcgatggagcgggcaagggatcgcttacacctgagacgaactacagaacagcacgtaccagaggtggaagtccaagtcaaacgcagaaggactgcctcactgagcaaccaagagtgtcagttgtacccgaggcgttctcagcagcagcaagtacctgtggtggatttccaggctgaactgaggcaggcattcttagctgagacaccaagaggtggttaaagccatattggagtagcgaggaatctgattccaagcaaaaaccagacaatgtaataaaaatattattcataatttttcaat

SEQ ID NO: 445107 - DNA, 1048 bp, Homo sapiens
cataagaattcaaagaccatagaatttggtgaaatgtagtatttttacttaagtgccttttctctgcttctaccccacagccaattttttataaaccagttgataacataagtagtttttgggggatgatacattacttatacattttctatgtagtaaacatgtatgtgtatgtgtgtgggtgtgtgtctaattactttgttggacagatccctgtggaaaggagctggaatgacagacattattgaacaaagaaatcaggatagtggaacttaaagggcttcatctcagtgctttcataagtatgaagtgcatatatttataattttcactaatcacagggtaaatataaaattgattcattaaaaatgtttcataagaattcaaaggacatagaattttgtgaaatgtagtatttttacttaagtgccttttctctgcttctaccccacagccaattttttataaaccagttgataacataagtagttttgggggatgatacattacttatacattttctatgtagtaaacatgtatgtgtatgtgtgtgggtgtgtgtctaattactttgttggacagattcctgtggtttggaactgctggggccaagtttatacaaaaatctacatttttgagtaaactccccatgactctagtaagtttccacagtatttgagtattctttatttcctaaagctgtacaaacatcagataatcaatatttgtaaggatcgataatataatttataatgaaattgctttatcagctattaatgttaactacatcatcttcatatagccttataactcatttgtgctattccattttcctctgttccttttattttcacttcccttgtaatgttagtctctttgtactgatttctgaagagttcatttatgattaaacatgttaacattttgtctagaattgcaaatatgttttttctcattcattttactatggtgttttattttttggttatacagaagttgtatattgaaatataatcttgttctgttttatgactttggagttttgtgg

SEQ ID NO: 445108 - DNA, 558 bp, Homo sapiens
agccggtacctactttccacagggaggagcggccgccggagatgcctgacgcatctgtctgaggagcggtcagtgacgcgatggagcgggcaagggatcgcttacacctgagacgaactacagaacagcacgtaccagaggtggaagtccaagtcaaacgcagaaggactgcctcactgagcaaccaagagtgtcagttgtacccgaggcgttctcagcagcagcaagtacctgtggtggatttccaggctgaactgaggcaggcattcttagctgagacaccaagaggtggttaaagccatattggagtagcgaggaatctgattccaagcaaaaaccagccttcccctaggtcttcagaagcatcaagttttaactgtggacattggatttggtggaacagcaatcatgactgttggcaagagtagcaagatgctgcatcactttttcccctgcaatgcgtcttgtgaaattgtgtagagtgtttgtgagctttttgttccctcattctgcattaataatagctaataataaatgcatagagcaattaaactgtga

SEQ ID NO: 445109 - DNA, 590 bp, Homo sapiens
agccggtacctactttccacagggaggagcggccgccggagatgcctgacgcatctgtctgaggagcggtcagtgacgcgatggagcgggcaagggatcgcttacacctgagacgaactacagaacagcacgtaccagaggtggaagtccaagtcaaacgcagaaggactgcctcactgagcaaccaagagtgtcagttgtacccgaggcgttctcagcagcagcaagtacctgtggtggatttccaggctgaactgaggcaggcattcttagctgagacaccaagaggtggttaaagccatattggagtagcgaggaatctgattccaagcaaaaaccagctttaacatgctttcctctgcaggctccatctactctttgaagcttctgcccagcttgcattgtttctaggagaacccgcgtcatacctttatctatagccttcccctaggtcttcagaagcatcaagttttaactgtggacattggatttggtggaacagcaatcatggtaagctgtatgataaggctgagggttgaaatgtgctgtaagggccgaaagaaatagtttgccagcatgtgcagtgatct

SEQ ID NO: 445110 - DNA, 861 bp, Homo sapiens
agccggtacctactttccacagggaggagcggccgccggagatgcctgacgcatctgtctgaggagcggtcagtgacgcgatggagcgggcaagggatcgcttacacctgagacgaactacagaacagcacgtaccagaggtggaagtccaagtcaaacgcagaaggactgcctcactgagcaaccaagagtgtcagttgtacccgaggcgttctcagcagcagcaagtacctgtggtggatttccaggctgaactgaggcaggcattcttagctgagacaccaagaggtggttaaagccatattggagtagcgaggaatctgattccaagcaaaaaccagggttagagctaatgcagcaatgatcaagaataaagaatcattaaagaatggggtgttgggggttctcttaattatcagtgacacattaatttttttccttagagcttcatacaataaacacattgcagaaagtttaagaaagttttgcaggaccttaaattttctgccctgacactttcgtcatgtttctgtattccagttattgtagcgcatgcttttcaggtagttttcttttgcgttttttttaattatataaaaatatttcactataaatggctcttgaataccctgttactgaatgtttataatttccttttgtgggaggtgtcatttttttctgccagtagtttgaacaaagctttagtagatagctttgtataaaacttagaataattttttcaaatatgcagatgtgaaaataaattgaatcaaggaatatgaacttaaggtacatttttctaaattatattgcaaagtattaaattagtattcattgctttcgaaaaataaagggccagtt

SEQ ID NO: 445111 - DNA, 1377 bp, Homo sapiens
agccggtacctactttccacagggaggagcggccgccggagatgcctgacgcatctgtctgaggagcggtcagtgacgcgatggagcgggcaagggatcgcttacacctgagacgaactacagaacagcacgtaccagaggtggaagtccaagtcaaacgcagaaggactgcctcactgagcaaccaagagtgagtacagactgtgttgggaacaaatgcaagtcagaatctcctttcagattagaacaaaatatcatgcaatgaggggattaaaatgaacataattgaagaagcagacacatctaatacagaagatgtagtaaaaaagcaatgaaattcttaaccatattatcctaaaataattcaccctcttaaagattttagtataattttcttttttcctatacgtgggtaagtgcattttatctttataaaattttgtaattacccttcaacataagcatacttaaatttttctgcattattaaatcactttgtatgcttgcaaaatgtactgtgcgctgaagtgattaatttacatattcattcttgctctgtgatatttaggtgtttgtttttggttagtgcatttattctgttaaaatttaaaatacatttgtgttttttatcctgttttaagtatatatatgtggaatgtatatataggatgtatacacagacacactcagacacatattttaatttagatttctagaagggaaattttaattaaaaataggtgaacattttaaatgacctaatacatatttagtccacattgaaactttggcattttgtcattgccattaaaattttgatggcattaaaatttgatgccattaaaattttgatcagtaggtagcatttttttcttagctacaattgttttttttaattataagtattaaaaattcatgaagatgattctttttgtaaaacagttttgcataaagataatcattaagtaaatagccatcagaccttgtcctatgcattgtgtgtgtagtggggagagaggaagggaggacatgggacacatttgaagtttgtgtgcatacgacaccgtgctgtctgtattttgacaatatgtcttggtgatcttttcatatcagtacacataaatctaccttattttacaaagtgtgcgtggtgtgataacattattattgtaatcgttagcttgctgctggatatttagtttgtttgcattgtttggctattaacaatgaaaagaacagtcactttgaaaacgcagtgtaggccaggcatggtggcccatgcctgtaatcccagcactttgggaggctaagccaggcggatcacaaggtcaggagttcgagaccagcctggccaacatggtgaaaccccgtctctcc

SEQ ID NO: 445112 - DNA, 992 bp, Homo sapiens
agccggtacctactttccacagggaggagcggccgccggagatgcctgacgcatctgtctgaggagcggtcagtgacgcgatggagcgggcaaggagacagggtctggctatgttgcccaggttggagtgcagtgatgcagttatagctccctgtaacctcaaactcctggatcaatctagactcctgcctcagcctcccaagtgcctgttagtacaggcttgagggatcgcttacacctgagacgaactacagaacagcacgtaccagaggtggaagtccaagtcaaacgcagaaggactgcctcactgagcaaccaagagtgtcagttgtacccgaggcgttctcagcagcagcaagtacctgtggtggatttccaggctgaactgaggcaggcattcttagctgagacaccaagaggtggttaaagccatattggagtagcgaggaatctgattccaagcaaaaaccagggttagagctaatgcagcaatgatcaagaataaagaatcattaaagaatggggtgttgggggttctcttaattatcagtgacacattaatttttttccttagagcttcatacaataaacacattgcagaaagtttaagaaagttttgcaggaccttaaattttctgccctgacactttcgtcatgtttctgtattccagttattgtagcgcatgcttttcaggtagttttcttttgcgttttttttaattatataaaaatatttcactataaatggctcttgaataccctgttactgaatgtttataatttccttttgtgggaggtgtcatttttttctgccagtagtttgaacaaagctttagtagatagctttgtataaaacttagaataattttttcaaatatgcagatgtgaaaataaattgaatcaaggaatatgaacttaaggtacatttttctaaattatattgcaaagtattaaattagtattcattgctttcgaaaaataaagggccagtt

SEQ ID NO: 445113 - DNA, 918 bp, Homo sapiens
ggcaaacatttaacaccctttctatatgatgattttttcatgatgtcctcagtttcataaaatgttggtttctgtgttggggatgcagttagataaatgcatgtgtgtgtgtatctagaacattcaataaagtagtgttttcaaaatcttatagatgacattttatatgtagattaaaaataagtagatttaagccaggtgcggtggctcatgtctatagtcccagcacttttggaggccaaggcagaaggatcactggagcctgggagttcaagcttgggtattgagaccccgtctctacatttaaaaaaaggtaaattcagaaagttgaaataatagaatattttggtttgatggctatttcctcagttgacctcagacctttcatattgagcaactgccgaatgggttctttttgttttttggtaagacagtgtttgcagttgtacactattagattaatcatggtttagttgatagtttctttaattgtattatattaaggtactacattattagctgtatttgtgtgcccaccataatgtagcactgatcagtactaaattcctttttatggctgaaagacattcgtttggatatatcatattttcttcattcgtaagttgatggacatttgagttgtttccactctttggctattatgaataatgctactaggaacacgtataatacgtttaatacaaagaattagtttcacaaggttttacttagccctcgtatatgccaggttcttgaaattttgtctttttggaagtatgagagtagtggtagctgggaaggctgcaggtataatagaaagaacatgaactgtctgggcatggtggctcatgcctgtaatcccagcactttgggaggccgaggtgggtagatcacctgagggcaggagctcgacatcag

SEQ ID NO: 445114 - DNA, 283 bp, Homo sapiens
catcttcaatagtcaaggaggacaaagacatctttcctgcaggtaaaatcattaaagactatattgtgattttgaagctgttctatttgctacgttgaggatatattagattcttatttgagttctttgaaattaaatttcttttctcatacatcctactttgtggttatgtgattattttgagtcgatattttaatcaaggactttatagttaactcttgttaataaccaacatttaatgaaatcaggcattttcttgactttagtaccacgagaagttgca

SEQ ID NO: 445115 - DNA, 1204 bp, Homo sapiens
tgatatcgagaattcgggccggcggccgctccactctgccaaccaagagtgtcagttgtacccgaggcgttctcagcagcagcaagtacctgtggtggatttccaggctgaactgaggcaggcattcttagctgagacaccaagaggtggttaaagccatattggagtagcgaggaatctgattccaagcaaaaaccaggctccatctactctttgaagcttctgcccagcttgcattgtttctaggagaacccgcgtcatacctttatctatagccttcccctaggtcttcagaagcatcaagttttaactgtggacattggatttggtggaacagcaatcatgactgttggcaagagtagcaagatgctgcagcacattgactatagaatgagatgtatcctgcaagatggccgaatcttcattggcacctttaaggcttttgacaagcatatgaatttgatcctctgtgattgtgatgagttcagaaagatcaagccaaagaatgcgaagcaaccagagcgtgaagaaaagcgggttttgggtctggtgttgctgcgtggggagaacttggtatccatgactgtggaggggccaccccccaaagatactggcattgctcgggtaccacttgctggagctgctggaggccctggggttggtagggcagctggtagaggagtaccagctggtgtgccaattccccaggcccctgctggattggcaggccctgtccgaggagttgggggaccatcccagcaggtaatgactccacagggaagaggcactgtagcagctgctgctgttgctgcgactgccagtattgctggagccccaacacagtacccaccaggacggggcactccgcccccacccgtcggcagagcaaccccacctccaggcattatggctcctccacctggtatgagaccacccatgggcccaccaattgggcttccccctgctcgagggacgccaataggcatgccgcctccgggaatgagaccccctccaccaggcattagaggtccacctcccccaggaatgcgtccaccaagaccttagcatactgttgatccatctcagtcactttttcccctgcaatgcgtcttgtgaaattgtgtagagtgtttgtgagctttttgttccctcattctgcattaataatagctaataataaatgcatagagcaattaaactgtga

SEQ ID NO: 445116 - DNA, 1752 bp, Homo sapiens
caccaagggctggccgcagccactgtagctgagctcagagccttctgtgtggtttgcgggggcaaggtcagctgccccctgccctctctctggggctatttgaggaatgcggcctttttgcataagaaaggcttttctctacagtaactgtggtcgctgatcaatgacaccttcctggtaacatttcatattgcttttttggagatgtaagtgggatctgtggatctgaaaattcacagtggccagctcaccaccacctgatgaaagatacaccacagggtgagagcatcctaacagcaaactgcaaatgagatactttgacgaaggtaattgggactcccatcaagtctccacacagctagcagccacgtggggcacttctccagcatatgtaagtggaactcagaaggcaacattccctgaacatactcttccaccagaatctcctctacagatttttgctgccccttttaccagtggctgaatctactttctcttatggatcgcttacacctgagacgaactacagaacagcacgtaccagaggtggaagtccaagtcaaacgcagaaggactgcctcactgagcaaccaagagtgtcagttgtacccgaggcgttctcagcagcagcaagtacctgtggtggatttccaggctgaactgaggcaggcattcttagctgagacaccaagaggtggttaaagccatattggagtagcgaggaatctgattccaagcaaaaaccaggctccatctactctttgaagcttctgcccagcttgcattgtttctaggagaacccgcgtcatacctttatctatagccttcccctaggtcttcagaagcatcaagttttaactgtggacattggatttggtggaacagcaatcatgactgttggcaagagtagcaagatgctgcagcacattgactatagaatgagatgtatcctgcaagatggccgaatcttcattggcacctttaaggcttttgacaagcatatgaatttgatcctctgtgattgtgatgagttcagaaagatcaagccaaagaatgcgaagcaaccagagcgtgaagaaaagcgggttttgggtctggtgttgctgcgtggggagaacttggtatccatgactgtggaggggccaccccccaaagatactggcattgctcgggtaccacttgctggagctgctggaggccctggggttggtagggcagctggtagaggagtaccagctggtgtgccaattccccaggcccctgctggattggcaggccctgtccgaggagttgggggaccatcccagcaggtaatgactccacagggaagaggcactgtagcagctgctgctgttgctgcgactgccagtattgctggagccccaacacagtacccaccaggacggggcactccgcccccacccgtcggcagagcaaccccacctccaggcattatggctcctccacctggtatgagaccacccatgggcccaccaattgggcttccccctgctcgagggacgccaataggcatgccgcctccgggaatgagaccccctccaccaggcattagaggtccacctcccccaggaatgcgtccaccaagaccttagcatactgttgatccatctcagtcactttttcccctgcaatgcgtcttgtgaaattgtgtagagtgtttgtgagctttttgttccctcattctgcattaataatagctaataataaatgcatagagcaattaaactgtga

SEQ ID NO: 445117 - DNA, 1089 bp, Homo sapiens
ggcacgagggctccatctactctttgaagcctggtttttgcttggaatcagattcctcgctactccaatatggctttaaccaccgctccatctactctttgaagcttctgcccagcttgcattgtttctaggagaacccgcgtcatacctttatctatagccttcccctaggtcttcagaagcatcaagttttaactgtggacattggatttggtggaacagcaatcatgactgttggcaagagtagcaagatgctgcagcacattgactatagaatgagatgtatcctgcaagatggccgaatcttcattggcacctttaaggcttttgacaagcatatgaatttgatcctctgtgattgtgatgagttcagaaagatcaagccaaagaatgcgaagcaaccagagcgtgaagaaaagcgggttttgggtctggtgttgctgcgtggggagaacttggtatccatgactgtggaggggccaccccccaaagatactggcattgctcgggtaccacttgctggagctgctggaggccctggggttggtagggcagctggtagaggagtaccagctggtgtgccaattccccaggcccctgctggattggcaggccctgtccgaggagttgggggaccatcccagcaggtaatgactccacagggaagaggcactgtagcagctgctgctgttgctgcgactgccagtattgctggagccccaacacagtacccaccaggacggggcactccgcccccacccgtcggcagagcaaccccacctccaggcattatggctcctccacctggtatgagaccacccatgggcccaccaattgggcttccccctgctcgagggacgccaataggcatgccgcctccgggaatgagaccccctccaccaggcattagaggtccacctcccccaggaatgcgtccaccaagaccttagcatactgttgatccatctcagtcactttttcccctgcaatgcgtcttgtgaaattgtgtagagtgtttgtgagctttttgttccctcattctgcattaataatagctaataataaatgcatagagcaattaaactgtga

SEQ ID NO: 445118 - DNA, 1346 bp, Homo sapiens
agccggtacctactttccacagggaggagcggccgccggagatgcctgacgcatctgtctgaggagcggtcagtgacgcgatggagcgggcaagggatcgcttacacctgagacgaactacagaacagcacgtaccagaggtggaagtccaagtcaaacgcagaaggactgcctcactgagcaaccaagagtgtcagttgtacccgaggcgttctcagcagcagcaagtacctgtggtggatttccaggctgaactgaggcaggcattcttagctgagacaccaagaggtggttaaagccatattggagtagcgaggaatctgattccaagcaaaaaccaggctccatctactctttgaagcttctgcccagcttgcattgtttctaggagaacccgcgtcatacctttatctatagccttcccctaggtcttcagaagcatcaagttttaactgtggacattggatttggtggaacagcaatcatgactgttggcaagagtagcaagatgctgcagcacattgactatagaatgagatgtatcctgcaagatggccgaatcttcattggcacctttaaggcttttgacaagcatatgaatttgatcctctgtgattgtgatgagttcagaaagatcaagccaaagaatgcgaagcaaccagagcgtgaagaaaagcgggttttgggtctggtgttgctgcgtggggagaacttggtatccatgactgtggaggggccaccccccaaagatactggcattgctcgggtaccacttgctggagctgctggaggccctggggttggtagggcagctggtagaggagtaccagctggtgtgccaattccccaggcccctgctggattggcaggccctgtccgaggagttgggggaccatcccagcaggtaatgactccacagggaagaggcactgtagcagctgctgctgttgctgcgactgccagtattgctggagccccaacacagtacccaccaggacggggcactccgcccccacccgtcggcagagcaaccccacctccaggcattatggctcctccacctggtatgagaccacccatgggcccaccaattgggcttccccctgctcgagggacgccaataggcatgccgcctccgggaatgagaccccctccaccaggcattagaggtccacctcccccaggaatgcgtccaccaagaccttagcatactgttgatccatctcagtcactttttcccctgcaatgcgtcttgtgaaattgtgtagagtgtttgtgagctttttgttccctcattctgcattaataatagctaataataaatgcatagagcaattaaactgtga

SEQ ID NO: 445119 - DNA, 5012 bp, Homo sapiens
agccggtacctactttccacagggaggagcggccgccggagatgcctgacgcatctgtctgaggagcggtcagtgacgcgatggagcgggcaagggatcgcttacacctgagacgaactacagaacagcacgtaccagaggtggaagtccaagtcaaacgcagaaggactgcctcactgagcaaccaagagtgtcagttgtacccgaggcgttctcagcagcagcaagtacctgtggtggatttccaggctgaactgaggcaggcattcttagctgagacaccaagaggtggttaaagccatattggagtagcgaggaatctgattccaagcaaaaaccaggctccatctactctttgaagcttctgcccagcttgcattgtttctaggagaacccgcgtcatacctttatctatagccttcccctaggtcttcagaagcatcaagttttaactgtggacattggatttggtggaacagcaatcatgactgttggcaagagtagcaagatgctgcagcacattgactatagaatgagatgtatcctgcaagatggccgaatcttcattggcacctttaaggcttttgacaagcatatgaatttgatcctctgtgattgtgatgagttcagaaagatcaagccaaagaatgcgaagcaaccagagcgtgaagaaaagcgggttttgggtctggtgttgctgcgtggggagaacttggtatccatgactgtggaggggccaccccccaaagatactggcattgctcgggtaccacttgctggagctgctggaggccctggggttggtagggcagctggtagaggagtaccagctggtgtgccaattccccaggcccctgctggattggcaggccctgtccgaggagttgggggaccatcccagcaggtaatgactccacagggaagaggcactgtagcagctgctgctgttgctgcgactgccagtattgctggagccccaacacagtacccaccaggacggggcactccgcccccacccgtcggcagagcaaccccacctccaggcattatggctcctccacctggtatgagaccacccatgggcccaccaattgggcttccccctgctcgagggacgccaataggcatgccgcctccgggaatgagaccccctccaccaggcattagaggtccacctcccccaggaatgcgtccaccaagaccttagcatactgttgatccatctcagtcactttttcccctgcaatgcgtcttgtgaaattgtgtagagtgtttgtgagctttttgttccctcattctgcattaataatagctaataataaatgcatagagcaattaaactgtgaggtactgttgtatatatttttttgcctgttgattttgatgagatcttaagttactgtggatgagggtgatgcctattaagcagttgattcaaatcatattctctttaattcttaggataaaaaggttttctgctatctaactttcactttgtgcattgactggtgttggttaataatgttttcatgacccgggggtttaagtggttgtgctgcttcacacatggcctcctgcttctcatgttgctatgtcacattatctgaagggaagtggggatgggatgaaaggccttgtaaggccacctatatactgaaggaagttgtagtgaatcacagtccatgctcattacatatcaaggcatttgaaatagaagttactctttttcttgggatgttgacctcagttgatcaggttttacagtgtcctatgatcagaatagaggatgtgatactggaataatcattttctaccattgagtaagtatttatttataaattactaaatgagtggaagatcctgggtactgggaggcaggaggttgcatatttgagttgataagttgtactactgataataaagataactgacacactaaaacatacttggtacactgaaatacaaattacggttatgtccagtggtatcaccaagtgacaaactgggagctaaatagttcagaaatgccctagtctctaggtccagtttgaattggttatggaacaaagaagccatttataaaagggaagagatttttaggttttgcagctaaggtttatagtaggcagcgagggaatgattcatagtgattgtagcagttggtttaccaagcactaaagagattggtgttaactccataatactgatagactgattggaattacattttttctcttgaatttaccaggagtggttgtgaatgtcaccttttccatcttttaaattacatccttgcaggtggtaatcactcaaggaaaaggaattatcagagtaacaatagttcctgttactgacttgatatggtctctgccagaatagcttctcagattaatggccactctcaggggaagcatttctccttgcattggtttgctggtatggatggcccttagattttggcatgagtgattatgcagcctatttgaagaaaacctgttttcaggacctttttaattaaatatggcctgttacatgagttaaagtgtcatacgataccattttttgaccacttagttgatgcctctgaaaggaagagagaatcagatcgctaaaatttgatgtgtcgtcagtgtggatcctactcagtagtgtcacaacgaggctgaaaatcatattaagtgcttttaggacagaaacgtaaactgctcaggtaaaataaccttataaagagaaataagcatatattgcagaggccttggctaggttcatgatgacacaggaccttgtctgaacataatgatttcaaaatttgagcttaaaaatgacactctgaaatccagtcagtgtgcctcactagacttttcgatttcaagattttctgcagaaaatgttttgaaaactttgaatacttaaaaatggcaggtgtagtattgcactttgctagttgctcagatacccttttttatttgtatagatattctgagttcctttttttttctacatgttgtacgttgtcgaaagctaaaaggaaacttatccttggatcacggaaggcagaggcatttggtgagatggaaacaaggatgtgtaaaaatgagacgaccacctctcggattaaaaaaaaaaagtgccagagttctagggttctaagtgatgtccaggaaggaggaggaataatatttatggagcatatattatggaacacaccattatgaatggtttttgattgatctcacaaagagcatgtgctttagacattaatgcagcgactaccatgaaacagagtattggattacctaaggaaagaagcagaggatggaatttgaggcaatcaggatgagtgaaaaattgatttgcagctgacctgcaaatggaatcatcaggaacatccctttctcatggagtcccttaatttacaagttaactgcaaacataggagatgatagttccaagaaggaacattttatcgtctttgtttttaatctcaagaatggtacctaccatcagtgaatgacctgttgcagtgctttcattgaagtgttcttcgttccctcagcaatatgattgtgatgactgaaaaagggaaactgtgccactatttgtaccatcattttcaccaaaatctaaaaatgctttttatgacgtatggagacattcttcatgtttgtttcagtggacactccttgcagatgtaaaaaactgagaaaactcacttttggaaagtgacctaaagagtgtcattgaagtgaattttaagtaggcacgatgattgttttcatggttgctgttggatcatatctcaggagctggaatgacagacattattgaacaaagaaatcaggatagtggaacttaaagggcttcatctcagtgctttcataagtatgaagtgcatatatttataattttcactaatcacaggaatattccctctgtatacttgcatttttttctatcaattgacgcttacaattatttttgcaagttggaaaaaaatgcagtattaatttcatttgcaacaaatttaatagattaattaggagagaatagatatctttaaaattgagtcttctgtccaactgcaagttatagctgaggtggtaccagtttaagaagtgagaacttcttcactgactgaaatttgcatatcaatccaaatcattgtgcttatttactatttttgtagacgtcattcttcaaaagtgctgcatcttcaatagtcaaggaggacaaagacatctttcctgcaggtggtgaccatgtggataataggatcatagacaaatggtggttccatctacagcatcaccgaaatgctgttgttactgcttctttctgggatcttcttgcatctttgcttctaaaggggcacaccttttatagaagtacgtccaggaatagaagtgacctgctttttcgcaagtaattgcctggaatgtttttatgtacttctctgcactctcaatacatttcatgcttccctctatttttgtatattaactcattgtatttcttaaatttatattttactttatgaatggaagtgagatttgtgtatggtaaatataattaattcaaccccatggatacgttagtcactgtccagatgatggcaagtctttctcagaagcagagggccttggtgtgccagtgattttttttccccatgtgtaagatactttttttcctcatttgaatcaggagcccacagtttttagacaagtcccaaatgaaatcttaagcatttgtgttatctggactagaccttctgtagtatcctttttgttagacctagtatatctcattgcagatcaggatctgagattgactatagttcacctctttccaagtacacaaacttggatgacatgacaactgagtgtgtaagggagagcgagacccttgcactgccatttgagcccttgtgatctcatcttgtagaacatgttgtacaatcattttattggtatcattagtgttatttggggctggaataaaaatctcagtgcacc

SEQ ID NO: 445120 - DNA, 4268 bp, Homo sapiens
agccggtacctactttccacagggaggagcggccgccggagatgcctgacgcatctgtctgaggagcggtcagtgacgcgatggagcgggcaagggatcgcttacacctgagacgaactacagaacagcacgtaccagaggtggaagtccaagtcaaacgcagaaggactgcctcactgagcaaccaagagtgtcagttgtacccgaggcgttctcagcagcagcaagtacctgtggtggatttccaggctgaactgaggcaggcattcttagctgagacaccaagaggtggttaaagccatattggagtagcgaggaatctgattccaagcaaaaaccaggctccatctactctttgaagcttctgcccagcttgcattgtttctaggagaacccgcgtcatacctttatctatagccttcccctaggtcttcagaagcatcaagttttaactgtggacattggatttggtggaacagcaatcatgactgttggcaagagtagcaagatgctgcagcacattgactatagaatgagatgtatcctgcaagatggccgaatcttcattggcacctttaaggcttttgacaagcatatgaatttgatcctctgtgattgtgatgagttcagaaagatcaagccaaagaatgcgaagcaaccagagcgtgaagaaaagcgggttttgggtctggtgttgctgcgtggggagaacttggtatccatgactgtggaggggccaccccccaaagatactggcattgctcgggtaccacttgctggagctgctggaggccctggggttggtagggcagctggtagaggagtaccagctggtgtgccaattccccaggcccctgctggattggcaggccctgtccgaggagttgggggaccatcccagcaggtaatgactccacagggaagaggcactgtagcagctgctgctgttgctgcgactgccagtattgctggagccccaacacagtacccaccaggacggggcactccgcccccacccgtcggcagagcaaccccacctccaggcattatggctcctccacctggtatgagaccacccatgggcccaccaattgggcttccccctgctcgagggacgccaataggcatgccgcctccgggaatgagaccccctccaccaggcattagaggtccacctcccccaggaatgcgtccaccaagaccttagcatactgttgatccatctcagtcactttttcccctgcaatgcgtcttgtgaaattgtgtagagtgtttgtgagctttttgttccctcattctgcattaataatagctaataataaatgcatagagcaattaaactgtgaggtactgttgtatatatttttttgcctgttgattttgatgagatcttaagttactgtggatgagggtgatgcctattaagcagttgattcaaatcatattctctttaattcttaggataaaaaggttttctgctatctaactttcactttgtgcattgactggtgttggttaataatgttttcatgacccgggggtttaagtggttgtgctgcttcacacatggcctcctgcttctcatgttgctatgtcacattatctgaagggaagtggggatgggatgaaaggccttgtaaggccacctatatactgaaggaagttgtagtgaatcacagtccatgctcattacatatcaaggcatttgaaatagaagttactctttttcttgggatgttgacctcagttgatcaggttttacagtgtcctatgatcagaatagaggatgtgatactggaataatcattttctaccattgagtaagtatttatttataaattactaaatgagtggaagatcctgggtactgggaggcaggaggttgcatatttgagttgataagttgtactactgataataaagataactgacacactaaaacatacttggtacactgaaatacaaattacggttatgtccagtggtatcaccaagtgacaaactgggagctaaatagttcagaaatgccctagtctctaggtccagtttgaattggttatggaacaaagaagccatttataaaagggaagagatttttaggttttgcagctaaggtttatagtaggcagcgagggaatgattcatagtgattgtagcagttggtttaccaagcactaaagagattggtgttaactccataatactgatagactgattggaattacattttttctcttgaatttaccaggagtggttgtgaatgtcaccttttccatcttttaaattacatccttgcaggtggtaatcactcaaggaaaaggaattatcagagtaacaatagttcctgttactgacttgatatggtctctgccagaatagcttctcagattaatggccactctcaggggaagcatttctccttgcattggtttgctggtatggatggcccttagattttggcatgagtgattatgcagcctatttgaagaaaacctgttttcaggacctttttaattaaatatggcctgttacatgagttaaagtgtcatacgataccattttttgaccacttagttgatgcctctgaaaggaagagagaatcagatcgctaaaatttgatgtgtcgtcagtgtggatcctactcagtagtgtcacaacgaggctgaaaatcatattaagtgcttttaggacagaaacgtaaactgctcaggtaaaataaccttataaagagaaataagcatatattgcagaggccttggctaggttcatgatgacacaggaccttgtctgaacataatgatttcaaaatttgagcttaaaaatgacactctgaaatccagtcagtgtgcctcactagacttttcgatttcaagattttctgcagaaaatgttttgaaaactttgaatacttaaaaatggcaggtgtagtattgcactttgctagttgctcagatacccttttttatttgtatagatattctgagttcctttttttttctacatgttgtacgttgtcgaaagctaaaaggaaacttatccttggatcacggaaggcagaggcatttggtgagatggaaacaaggatgtgtaaaaatgagacgaccacctctcggattaaaaaaaaaaagtgccagagttctagggttctaagtgatgtccaggaaggaggaggaataatatttatggagcatatattatggaacacagtgatgactgaaaaagggaaactgtgccactatttgtaccatcattttcaccaaaatctaaaaatgctttttatgacgtatggagacattcttcatgtttgtttcagtggacactccttgcagatgtaaaaaactgagaaaactcacttttggaaagtgacctaaagagtgtcattgaagtgaattttaagtaggcacgatgattgttttcatggttgctgttggatcatatctcaggagctggaatgacagacattattgaacaaagaaatcaggatagtggaacttaaagggcttcatctcagtgctttcataagtatgaagtgcatatatttataattttcactaatcacagggtaaatataaaattgattcattaaaaatgtttcataagaattcaaaggacatagaattttgtgaaatgtagtatttttacttaagtgccttttctctgcttctaccccacagccaattttttataaaccagttgataacataagtagttttgggggatgatacattacttatacattttctatgtagtaaacatgtatgtgtatgtgtgtgggtgtgtgtctaattactttgttggacagattcctgtggtttggaactgctggggccaagtttatacaaaaatctacatttttgagtaaactccccatgactctagtaagtttccacagtatttgagtattctttatttcctaaagctgtacaaacatcagataatcaatatttgtaaggatcgataatataatttataatgaaattgctttatcagctattaatgttaactacatcatcttcatatagccttataactcatttgtgctattccattttcctctgttccttttattttcacttcccttgtaatgttagtctctttgtactgatttctgaagagttcatttatgattaaacatgttaacattttgtctagaattgcaaatatgttttttctcattcattttactatggtgttttattttttggttatacagaagttgtatattgaaatataatcttgttctgttttatgactttggagttttgtgg

SEQ ID NO: 445121 - DNA, 5392 bp, Homo sapiens
agccggtacctactttccacagggaggagcggccgccggagatgcctgacgcatctgtctgaggagcggtcagtgacgcgatggagcgggcaagggatcgcttacacctgagacgaactacagaacagcacgtaccagaggtggaagtccaagtcaaacgcagaaggactgcctcactgagcaaccaagagtgtcagttgtacccgaggcgttctcagcagcagcaagtacctgtggtggatttccaggctgaactgaggcaggcattcttagctgagacaccaagaggtggttaaagccatattggagtagcgaggaatctgattccaagcaaaaaccaggctccatctactctttgaagcttctgcccagcttgcattgtttctaggagaacccgcgtcatacctttatctatagccttcccctaggtcttcagaagcatcaagttttaactgtggacattggatttggtggaacagcaatcatgactgttggcaagagtagcaagatgctgcagcacattgactatagaatgagatgtatcctgcaagatggccgaatcttcattggcacctttaaggcttttgacaagcatatgaatttgatcctctgtgattgtgatgagttcagaaagatcaagccaaagaatgcgaagcaaccagagcgtgaagaaaagcgggttttgggtctggtgttgctgcgtggggagaacttggtatccatgactgtggaggggccaccccccaaagatactggcattgctcgggtaccacttgctggagctgctggaggccctggggttggtagggcagctggtagaggagtaccagctggtgtgccaattccccaggcccctgctggattggcaggccctgtccgaggagttgggggaccatcccagcaggtaatgactccacagggaagaggcactgtagcagctgctgctgttgctgcgactgccagtattgctggagccccaacacagtacccaccaggacggggcactccgcccccacccgtcggcagagcaaccccacctccaggcattatggctcctccacctggtatgagaccacccatgggcccaccaattgggcttccccctgctcgagggacgccaataggcatgccgcctccgggaatgagaccccctccaccaggcattagaggtccacctcccccaggaatgcgtccaccaagaccttagcatactgttgatccatctcagtcactttttcccctgcaatgcgtcttgtgaaattgtgtagagtgtttgtgagctttttgttccctcattctgcattaataatagctaataataaatgcatagagcaattaaactgtgaggtactgttgtatatatttttttgcctgttgattttgatgagatcttaagttactgtggatgagggtgatgcctattaagcagttgattcaaatcatattctctttaattcttaggataaaaaggttttctgctatctaactttcactttgtgcattgactggtgttggttaataatgttttcatgacccgggggtttaagtggttgtgctgcttcacacatggcctcctgcttctcatgttgctatgtcacattatctgaagggaagtggggatgggatgaaaggccttgtaaggccacctatatactgaaggaagttgtagtgaatcacagtccatgctcattacatatcaaggcatttgaaatagaagttactctttttcttgggatgttgacctcagttgatcaggttttacagtgtcctatgatcagaatagaggatgtgatactggaataatcattttctaccattgagtaagtatttatttataaattactaaatgagtggaagatcctgggtactgggaggcaggaggttgcatatttgagttgataagttgtactactgataataaagataactgacacactaaaacatacttggtacactgaaatacaaattacggttatgtccagtggtatcaccaagtgacaaactgggagctaaatagttcagaaatgccctagtctctaggtccagtttgaattggttatggaacaaagaagccatttataaaagggaagagatttttaggttttgcagctaaggtttatagtaggcagcgagggaatgattcatagtgattgtagcagttggtttaccaagcactaaagagattggtgttaactccataatactgatagactgattggaattacattttttctcttgaatttaccaggagtggttgtgaatgtcaccttttccatcttttaaattacatccttgcaggtggtaatcactcaaggaaaaggaattatcagagtaacaatagttcctgttactgacttgatatggtctctgccagaatagcttctcagattaatggccactctcaggggaagcatttctccttgcattggtttgctggtatggatggcccttagattttggcatgagtgattatgcagcctatttgaagaaaacctgttttcaggacctttttaattaaatatggcctgttacatgagttaaagtgtcatacgataccattttttgaccacttagttgatgcctctgaaaggaagagagaatcagatcgctaaaatttgatgtgtcgtcagtgtggatcctactcagtagtgtcacaacgaggctgaaaatcatattaagtgcttttaggacagaaacgtaaactgctcaggtaaaataaccttataaagagaaataagcatatattgcagaggccttggctaggttcatgatgacacaggaccttgtctgaacataatgatttcaaaatttgagcttaaaaatgacactctgaaatccagtcagtgtgcctcactagacttttcgatttcaagattttctgcagaaaatgttttgaaaactttgaatacttaaaaatggcaggtgtagtattgcactttgctagttgctcagatacccttttttatttgtatagatattctgagttcctttttttttctacatgttgtacgttgtcgaaagctaaaaggaaacttatccttggatcacggaaggcagaggcatttggtgagatggaaacaaggatgtgtaaaaatgagacgaccacctctcggattaaaaaaaaaaagtgccagagttctagggttctaagtgatgtccaggaaggaggaggaataatatttatggagcatatattatggaacacaccattatgaatggtttttgattgatctcacaaagagcatgtgctttagacattaatgcagcgactaccatgaaacagagtattggattacctaaggaaagaagcagaggatggaatttgaggcaatcaggatgagtgaaaaattgatttgcagctgacctgcaaatggaatcatcaggaacatccctttctcatggagtcccttaatttacaagttaactgcaaacataggagatgatagttccaagaaggaacattttatcgtctttgtttttaatctcaagaatggtacctaccatcagtgaatgacctgttgcagtgctttcattgaagtgttcttcgttccctcagcaatatgattttatagctgaggtggtaccagtttaagaagtgagaacttcttcactgactgaaatttgcatatcaatccaaatcattgtgcttatttactatttttgtagacgtcattcttcaaaagtgctgcatcttcaatagtcaaggaggacaaagacatctttcctgcaggtggtgaccatgtggataataggatcatagacaaatggtggttccatctacagcatcaccgaaatgctgttgttactgcttctttctgggatcttcttgcatctttgcttctaaaggggcacaccttttatagaagtacgtccaggaatagaagtgacctgctttttcgcaagtaattgcctggaatgtttttatgtacttctctgcactctcaatacatttcatgcttccctctatttttgtatattaactcattgtatttcttaaatttatattttactttatgaatggaagtgagatttgtgtatggtaaatataattaattcaaccccatggatacgttagtcactgtccagatgatggcaagtctttctcagaagcagagggccttggtgtgccagtgattttttttccccatgtgtaagatactttttttcctcatttgaatcaggagcccacagtttttagacaagtcccaaatgaaatcttaagcatttgtgttatctggactagaccttctgtagtatcctttttgttagacctagtatatctcattgcagatcaggatctgagattgactatagttcacctctttccaagtacacaaacttggatgacatgacaactgagtgtgtaagggagagcgagacccttgcactgccatttgagcccttgtgatctcatcttgtagaacatgttgtacaatcattttattggtatcattagtgttatttggggctggaataaaaatctcagtgcaccaaagagatttcccctttatccacgttaccctggttttcctttgttttctgtttaacctaaacgggcttaatataaaatagtgcttatttggtgttttaattgtctgcttctataacataagctgcactgtccattggggaactgctcaccatattgcccaacctgtcttgataggtttatacatgggaggcattcagtaatattaattacctctctagaccagtgttagcaataacaaacacttgctagaattttaagactatataatcaatcactttgatgtcagttaatcctaccaacacaagattaaaggtttaaaaatctcatacgtgtacagccattagtgtctcctttcatactatattattttgttcattggcagctagatttttaggtagaacttgtgttcctttttgcaatgctcatttattttacctggacagaaggtgctcttctgtctcttctccaaagttaatttatctcatactatttcttgtgttaatattttccaagttcagtatgctgttctggttataagaagatcagtgtcctaatcacacacttttacattatatgaaacatcatacagagttttgtagtctgtataacaatacacagaggtagcaaaatttgtaaaagagcagactatatagtccatactgtagtaactactcaacattgccattatacgtgaaatcggctataaccaattcataaacaaatgaatttggccgtgttctagtaaaacttatttacaaaaacatgtgttaggccagatttggaccacaggctgtagatttctgacctctggcttacagcagaagtttattatgatcctggggaaggtggatatacatggaaggcagaagcgagaagatgtattccatcccatgtcatttt

SEQ ID NO: 445122 - DNA, 5032 bp, Homo sapiens
agccggtacctactttccacagggaggagcggccgccggagatgcctgacgcatctgtctgaggagcggtcagtgacgcgatggagcgggcaagggatcgcttacacctgagacgaactacagaacagcacgtaccagaggtggaagtccaagtcaaacgcagaaggactgcctcactgagcaaccaagagtgtcagttgtacccgaggcgttctcagcagcagcaagtacctgtggtggatttccaggctgaactgaggcaggcattcttagctgagacaccaagaggtggttaaagccatattggagtagcgaggaatctgattccaagcaaaaaccaggctccatctactctttgaagcttctgcccagcttgcattgtttctaggagaacccgcgtcatacctttatctatagccttcccctaggtcttcagaagcatcaagttttaactgtggacattggatttggtggaacagcaatcatgactgttggcaagagtagcaagatgctgcagcacattgactatagaatgagatgtatcctgcaagatggccgaatcttcattggcacctttaaggcttttgacaagcatatgaatttgatcctctgtgattgtgatgagttcagaaagatcaagccaaagaatgcgaagcaaccagagcgtgaagaaaagcgggttttgggtctggtgttgctgcgtggggagaacttggtatccatgactgtggaggggccaccccccaaagatactggcattgctcgggtaccacttgctggagctgctggaggccctggggttggtagggcagctggtagaggagtaccagctggtgtgccaattccccaggcccctgctggattggcaggccctgtccgaggagttgggggaccatcccagcaggtaatgactccacagggaagaggcactgtagcagctgctgctgttgctgcgactgccagtattgctggagccccaacacagtacccaccaggacggggcactccgcccccacccgtcggcagagcaaccccacctccaggcattatggctcctccacctggtatgagaccacccatgggcccaccaattgggcttccccctgctcgagggacgccaataggcatgccgcctccgggaatgagaccccctccaccaggcattagaggtccacctcccccaggaatgcgtccaccaagaccttagcatactgttgatccatctcagtcactttttcccctgcaatgcgtcttgtgaaattgtgtagagtgtttgtgagctttttgttccctcattctgcattaataatagctaataataaatgcatagagcaattaaactgtgaggtactgttgtatatatttttttgcctgttgattttgatgagatcttaagttactgtggatgagggtgatgcctattaagcagttgattcaaatcatattctctttaattcttaggataaaaaggttttctgctatctaactttcactttgtgcattgactggtgttggttaataatgttttcatgacccgggggtttaagtggttgtgctgcttcacacatggcctcctgcttctcatgttgctatgtcacattatctgaagggaagtggggatgggatgaaaggccttgtaaggccacctatatactgaaggaagttgtagtgaatcacagtccatgctcattacatatcaaggcatttgaaatagaagttactctttttcttgggatgttgacctcagttgatcaggttttacagtgtcctatgatcagaatagaggatgtgatactggaataatcattttctaccattgagtaagtatttatttataaattactaaatgagtggaagatcctgggtactgggaggcaggaggttgcatatttgagttgataagttgtactactgataataaagataactgacacactaaaacatacttggtacactgaaatacaaattacggttatgtccagtggtatcaccaagtgacaaactgggagctaaatagttcagaaatgccctagtctctaggtccagtttgaattggttatggaacaaagaagccatttataaaagggaagagatttttaggttttgcagctaaggtttatagtaggcagcgagggaatgattcatagtgattgtagcagttggtttaccaagcactaaagagattggtgttaactccataatactgatagactgattggaattacattttttctcttgaatttaccaggagtggttgtgaatgtcaccttttccatcttttaaattacatccttgcaggtggtaatcactcaaggaaaaggaattatcagagtaacaatagttcctgttactgacttgatatggtctctgccagaatagcttctcagattaatggccactctcaggggaagcatttctccttgcattggtttgctggtatggatggcccttagattttggcatgagtgattatgcagcctatttgaagaaaacctgttttcaggacctttttaattaaatatggcctgttacatgagttaaagtgtcatacgataccattttttgaccacttagttgatgcctctgaaaggaagagagaatcagatcgctaaaatttgatgtgtcgtcagtgtggatcctactcagtagtgtcacaacgaggctgaaaatcatattaagtgcttttaggacagaaacgtaaactgctcaggtaaaataaccttataaagagaaataagcatatattgcagaggccttggctaggttcatgatgacacaggaccttgtctgaacataatgatttcaaaatttgagcttaaaaatgacactctgaaatccagtcagtgtgcctcactagacttttcgatttcaagattttctgcagaaaatgttttgaaaactttgaatacttaaaaatggcaggtgtagtattgcactttgctagttgctcagatacccttttttatttgtatagatattctgagttcctttttttttctacatgttgtacgttgtcgaaagctaaaaggaaacttatccttggatcacggaaggcagaggcatttggtgagatggaaacaaggatgtgtaaaaatgagacgaccacctctcggattaaaaaaaaaaagtgccagagttctagggttctaagtgatgtccaggaaggaggaggaataatatttatggagcatatattatggaacacattatagctgaggtggtaccagtttaagaagtgagaacttcttcactgactgaaatttgcatatcaatccaaatcattgtgcttatttactatttttgtagacgtcattcttcaaaagtgctgcatcttcaatagtcaaggaggacaaagacatctttcctgcaggtggtgaccatgtggataataggatcatagacaaatggtggttccatctacagcatcaccgaaatgctgttgttactgcttctttctgggatcttcttgcatctttgcttctaaaggggcacaccttttatagaagtacgtccaggaatagaagtgacctgctttttcgcaagtaattgcctggaatgtttttatgtacttctctgcactctcaatacatttcatgcttccctctatttttgtatattaactcattgtatttcttaaatttatattttactttatgaatggaagtgagatttgtgtatggtaaatataattaattcaaccccatggatacgttagtcactgtccagatgatggcaagtctttctcagaagcagagggccttggtgtgccagtgattttttttccccatgtgtaagatactttttttcctcatttgaatcaggagcccacagtttttagacaagtcccaaatgaaatcttaagcatttgtgttatctggactagaccttctgtagtatcctttttgttagacctagtatatctcattgcagatcaggatctgagattgactatagttcacctctttccaagtacacaaacttggatgacatgacaactgagtgtgtaagggagagcgagacccttgcactgccatttgagcccttgtgatctcatcttgtagaacatgttgtacaatcattttattggtatcattagtgttatttggggctggaataaaaatctcagtgcaccaaagagatttcccctttatccacgttaccctggttttcctttgttttctgtttaacctaaacgggcttaatataaaatagtgcttatttggtgttttaattgtctgcttctataacataagctgcactgtccattggggaactgctcaccatattgcccaacctgtcttgataggtttatacatgggaggcattcagtaatattaattacctctctagaccagtgttagcaataacaaacacttgctagaattttaagactatataatcaatcactttgatgtcagttaatcctaccaacacaagattaaaggtttaaaaatctcatacgtgtacagccattagtgtctcctttcatactatattattttgttcattggcagctagatttttaggtagaacttgtgttcctttttgcaatgctcatttattttacctggacagaaggtgctcttctgtctcttctccaaagttaatttatctcatactatttcttgtgttaatattttccaagttcagtatgctgttctggttataagaagatcagtgtcctaatcacacacttttacattatatgaaacatcatacagagttttgtagtctgtataacaatacacagaggtagcaaaatttgtaaaagagcagactatatagtccatactgtagtaactactcaacattgccattatacgtgaaatcggctataaccaattcataaacaaatgaatttggccgtgttctagtaaaacttatttacaaaaacatgtgttaggccagatttggaccacaggctgtagatttctgacctctggcttacagcagaagtttattatgatcctggggaaggtggatatacatggaaggcagaagcgagaagatgtattccatcccatgtcatttt

SEQ ID NO: 445123 - DNA, 1341 bp, Homo sapiens
  misc_feature (1306)..(1306): n is a, c, g, or t
  misc_feature (1316)..(1316): n is a, c, g, or t
agccggtacctactttccacagggaggagcggccgccggagatgcctgacgcatctgtctgaggagcggtcagtgacgcgatggagcgggcaagggatcgcttacacctgagacgaactacagaacagcacgtaccagaggtggaagtccaagtcaaacgcagaaggactgcctcactgagcaaccaagagtgtcagttgtacccgaggcgttctcagcagcagcaagtacctgtggtggatttccaggctgaactgaggcaggcattcttagctgagacaccaagaggtggttaaagccatattggagtagcgaggaatctgattccaagcaaaaaccaggctccatctactctttgaagcttctgcccagcttgcattgtttctaggagaacccgcgtcatacctttatctatagccttcccctaggtcttcagaagcatcaagttttaactgtggacattggatttggtggaacagcaatcatgactgttggcaagagtagcaagatgctgcagcacattgactatagaatgagatgtatcctgcaagatggccgaatcttcattggcacctttaaggcttttgacaagcatatgaatttgatcctctgtgattgtgatgagttcagaaagatcaagccaaagaatgcgaagcaaccagagcgtgaagaaaagcgggttttgggtctggtgttgctgcgtggggagaacttggtatccatgactgtggaggggccaccccccaaagatactggcattgctcgggtaccacttgctggagctgctggaggccctggggttggtagggcagctggtagaggagtaccagctggtgtgccaattccccaggcccctgctggattggcaggccctgtccgaggagttgggggaccatcccagcaggtaatgactccacagggaagaggcactgtagcagctgctgctgttgctgcgactgccagtattgctggagccccaacacagtacccaccaggacggggcactccgcccccacccgtcggcagagcaaccccacctccaggcattatggctcctccacctggtatgagaccacccatgggcccaccaattgggcttccccctgctcgagggacgccaataggcatgccggcatcatgccagggagccaagcgtcctgcccggccgttgctccgactgtgtgttccaggagtggtggctctaaggtgtgaccctgcccacgtttgggcccagccaggttcagccccccaataaggagggcagcttgataacaaaaaggaaaacagtgtcaacgggtactaccangagaagaagnaaaagagttttatagcagaggtttc

SEQ ID NO: 445124 - DNA, 1124 bp, Homo sapiens
agccggtacctactttccacagggaggagcggccgccggagatgcctgacgcatctgtctgaggagcggtcagtgacgcgatggagcgggcaagggatcgcttacacctgagacgaactacagaacagcacgtaccagaggtggaagtccaagtcaaacgcagaaggactgcctcactgagcaaccaagagtgtcagttgtacccgaggcgttctcagcagcagcaagtacctgtggtggatttccaggctgaactgaggcaggcattcttagctgagacaccaagaggtggttaaagccatattggagtagcgaggaatctgattccaagcaaaaaccaggctccatctactctttgaagcttctgcccagcttgcattgtttctaggagaacccgcgtcatacctttatctatagccttcccctaggtcttcagaagcatcaagttttaactgtggacattggatttggtggaacagcaatcatgactgttggcaagagtagcaagatgctgcagcacattgactatagaatgagatgtatcctgcaagatggccgaatcttcattggcacctttaaggcttttgacaagcatatgaatttgatcctctgtgattgtgatgagttcagaaagatcaagccaaagaatgcgaagcaaccagagcgtgaagaaaagcgggttttgggtctggtgttgctgcgtggggagaacttggtatccatgactgtggaggggccaccccccaaagatactggcattgctcgggtaccacttgctggagctgctggaggccctggggttggtagggcagctggtagaggagtaccagctggtgtgccaattccccaggcccctgctggattggcaggccctgtccgaggagttgggggaccatcccagcaggtaatgactccacagggaagaggcactgtagcagctgctgctgttgctgcgactgccagtattgctggagccccaacacagtacccaccaggacggggcactccgcccccacccgtcggcagagcaaccccacctccaggcattatggctcctccaattggtgggcccatgggtggtctcataccaggtggaggagccataatgcctggaggtggggttg

SEQ ID NO: 445125 - DNA, 1477 bp, Homo sapiens
agccggtacctactttccacagggaggagcggccgccggagatgcctgacgcatctgtctgaggagcggtcagtgacgcgatggagcgggcaaggagacagggtctggctatgttgcccaggttggagtgcagtgatgcagttatagctccctgtaacctcaaactcctggatcaatctagactcctgcctcagcctcccaagtgcctgttagtacaggcttgagggatcgcttacacctgagacgaactacagaacagcacgtaccagaggtggaagtccaagtcaaacgcagaaggactgcctcactgagcaaccaagagtgtcagttgtacccgaggcgttctcagcagcagcaagtacctgtggtggatttccaggctgaactgaggcaggcattcttagctgagacaccaagaggtggttaaagccatattggagtagcgaggaatctgattccaagcaaaaaccaggctccatctactctttgaagcttctgcccagcttgcattgtttctaggagaacccgcgtcatacctttatctatagccttcccctaggtcttcagaagcatcaagttttaactgtggacattggatttggtggaacagcaatcatgactgttggcaagagtagcaagatgctgcagcacattgactatagaatgagatgtatcctgcaagatggccgaatcttcattggcacctttaaggcttttgacaagcatatgaatttgatcctctgtgattgtgatgagttcagaaagatcaagccaaagaatgcgaagcaaccagagcgtgaagaaaagcgggttttgggtctggtgttgctgcgtggggagaacttggtatccatgactgtggaggggccaccccccaaagatactggcattgctcgggtaccacttgctggagctgctggaggccctggggttggtagggcagctggtagaggagtaccagctggtgtgccaattccccaggcccctgctggattggcaggccctgtccgaggagttgggggaccatcccagcaggtaatgactccacagggaagaggcactgtagcagctgctgctgttgctgcgactgccagtattgctggagccccaacacagtacccaccaggacggggcactccgcccccacccgtcggcagagcaaccccacctccaggcattatggctcctccacctggtatgagaccacccatgggcccaccaattgggcttccccctgctcgagggacgccaataggcatgccgcctccgggaatgagaccccctccaccaggcattagaggtccacctcccccaggaatgcgtccaccaagaccttagcatactgttgatccatctcagtcactttttcccctgcaatgcgtcttgtgaaattgtgtagagtgtttgtgagctttttgttccctcattctgcattaataatagctaataataaatgcatagagcaattaaactgtga

SEQ ID NO: 445126 - DNA, 1195 bp, Homo sapiens
agccggtacctactttccacagggaggagcggccgccggagatgcctgacgcatctgtctgaggagcggtcagtgacgcgatggagcgggcaagggatcgcttacacctgagacgaactacagaacagcacgtaccagaggtggaagtccaagtcaaacgcagaaggactgcctcactgagcaaccaagagctccatctactctttgaagcttctgcccagcttgcattgtttctaggagaacccgcgtcatacctttatctatagccttcccctaggtcttcagaagcatcaagttttaactgtggacattggatttggtggaacagcaatcatgactgttggcaagagtagcaagatgctgcagcacattgactatagaatgagatgtatcctgcaagatggccgaatcttcattggcacctttaaggcttttgacaagcatatgaatttgatcctctgtgattgtgatgagttcagaaagatcaagccaaagaatgcgaagcaaccagagcgtgaagaaaagcgggttttgggtctggtgttgctgcgtggggagaacttggtatccatgactgtggaggggccaccccccaaagatactggcattgctcgggtaccacttgctggagctgctggaggccctggggttggtagggcagctggtagaggagtaccagctggtgtgccaattccccaggcccctgctggattggcaggccctgtccgaggagttgggggaccatcccagcaggtaatgactccacagggaagaggcactgtagcagctgctgctgttgctgcgactgccagtattgctggagccccaacacagtacccaccaggacggggcactccgcccccacccgtcggcagagcaaccccacctccaggcattatggctcctccacctggtatgagaccacccatgggcccaccaattgggcttccccctgctcgagggacgccaataggcatgccgcctccgggaatgagaccccctccaccaggcattagaggtccacctcccccaggaatgcgtccaccaagaccttagcatactgttgatccatctcagtcactttttcccctgcaatgcgtcttgtgaaattgtgtagagtgtttgtgagctttttgttccctcattctgcattaataatagctaataataaatgcatagagcaattaaactgtga

SEQ ID NO: 445127 - DNA, 1270 bp, Homo sapiens
agccggtacctactttccacagggaggagcggccgccggagatgcctgacgcatctgtctgaggagcggtcagtgacgcgatggagcgggcaagggatcgcttacacctgagacgaactacagaacagcacgtaccagaggtggaagtccaagtcaaacgcagaaggactgcctcactgagcaaccaagagtgtcagttgtacccgaggcgttctcagcagcagcaagtacctgtggtggatttccaggctgaactgaggcaggcattcttagctgagacaccaagaggtggttaaagccatattggagtagcgaggaatctgattccaagcaaaaaccagccttcccctaggtcttcagaagcatcaagttttaactgtggacattggatttggtggaacagcaatcatgactgttggcaagagtagcaagatgctgcagcacattgactatagaatgagatgtatcctgcaagatggccgaatcttcattggcacctttaaggcttttgacaagcatatgaatttgatcctctgtgattgtgatgagttcagaaagatcaagccaaagaatgcgaagcaaccagagcgtgaagaaaagcgggttttgggtctggtgttgctgcgtggggagaacttggtatccatgactgtggaggggccaccccccaaagatactggcattgctcgggtaccacttgctggagctgctggaggccctggggttggtagggcagctggtagaggagtaccagctggtgtgccaattccccaggcccctgctggattggcaggccctgtccgaggagttgggggaccatcccagcaggtaatgactccacagggaagaggcactgtagcagctgctgctgttgctgcgactgccagtattgctggagccccaacacagtacccaccaggacggggcactccgcccccacccgtcggcagagcaaccccacctccaggcattatggctcctccacctggtatgagaccacccatgggcccaccaattgggcttccccctgctcgagggacgccaataggcatgccgcctccgggaatgagaccccctccaccaggcattagaggtccacctcccccaggaatgcgtccaccaagaccttagcatactgttgatccatctcagtcactttttcccctgcaatgcgtcttgtgaaattgtgtagagtgtttgtgagctttttgttccctcattctgcattaataatagctaataataaatgcatagagcaattaaactgtga

SEQ ID NO: 445128 - DNA, 972 bp, Homo sapiens
agccggtacctactttccacagggaggagcggccgccggagatgcctgacgcatctgtctgaggagcggtcagtgacgcgatggagcgggcaagggatcgcttacacctgagacgaactacagaacagcacgtaccagaggtggaagtccaagtcaaacgcagaaggactgcctcactgagcaaccaagagtgtcagttgtacccgaggcgttctcagcagcagcaagtacctgtggtggatttccaggctgaactgaggcaggcattcttagctgagacaccaagaggtggttaaagccatattggagtagcgaggaatctgattccaagcaaaaaccaggctccatctactctttgaagcttctgcccagcttgcattgtttctaggagaacccgcgtcatacctttatctatagccttcccctaggtcttcagaagcatcaagttttaactgtggacattggatttggtggaacagcaatcatgactgttggcaagagtagcaagatgctgcagcacattgactatagaatgagatgtatcctgcaagatggccgaatcttcattggcacctttaaggcttttgacaagcatatgaatttgatcctctgtgattgtgatgagttcagaaagatcaagccaaagaatgcgaagcaaccagagcgtgaagaaaagcgggttttgggtctggtgttgctgcgtggggagaacttggtatccatgactgtggaggggccaccccccaaagatactggcattgctcgggtaccacttgctggagctgctggaggccctggggttggtagggcagctggtagaggagtccgttggtttcaacttcccggccctgtttgatggggccgtccggtggggccccgcggtagcgcccaggaagccgtcttggtttcgcgtttggccacgccgaggccccccggggccccgtttcccgtaccgcccggcgggtagccgcc

SEQ ID NO: 445129 - DNA, 896 bp, Homo sapiens
agccggtacctactttccacagggaggagcggccgccggagatgcctgacgcatctgtctgaggagcggtcagtgacgcgatggagcgggcaagggatcgcttacacctgagacgaactacagaacagcacgtaccagaggtggaagtccaagtcaaacgcagaaggactgcctcactgagcaaccaagagtgtcagttgtacccgaggcgttctcagcagcagcaagtacctgtggtggatttccaggctgaactgaggcaggcattcttagctgagacaccaagaggtggttaaagccatattggagtagcgaggaatctgattccaagcaaaaaccaggctccatctactctttgaagcttctgcccagcttgcattgtttctaggagaacccgcgtcatacctttatctatagccttcccctaggtcttcagaagcatcaagttttaactgtggacattggatttggtggaacagcaatcatgactgttggcaagagtagcaagatgctgcagcacattgactatagaatgagatgtatcctgcaagatggccgaatcttcattggcacctttaaggcttttgacaagcatatgaatttgatcctctgtgattgtgatgagttcagaaagatcaagccaaagaatgcgaagcaaccagagcgtgaagaaaagcgggttttgggtctggtgttgctgcgtggggagaacttggtatccatgactgtggaggggccaccccccaaagatacgggtggtcggacactggggagcgcgagggcgggtggaggagggtgagatccagggggaaaccccccccggaggagcgccgagggtgaccccgtagggagacggaggcgcataggccaacagagggcgcgccatccgaggaggc

SEQ ID NO: 445130 - DNA, 5141 bp, Homo sapiens
agccggtacctactttccacagggaggagcggccgccggagatgcctgacgcatctgtctgaggagcggtcagtgacgcgatggagcgggcaagggatcgcttacacctgagacgaactacagaacagcacgtaccagaggtggaagtccaagtcaaacgcagaaggactgcctcactgagcaaccaagagtgtcagttgtacccgaggcgttctcagcagcagcaagtacctgtggtggatttccaggctgaactgaggcaggcattcttagctgagacaccaagaggtggttaaagccatattggagtagcgaggaatctgattccaagcaaaaaccaggctccatctactctttgaagcttctgcccagcttgcattgtttctaggagaacccgcgtcatacctttatctatagccttcccctaggtcttcagaagcatcaagttttaactgtggacattggatttggtggaacagcaatcatgacggggtcttgctctgtctcccagtctggagtgcagtggtgcggtcttggctcactgcaaccctgggttcaagagattctcgtgcctcagcctctttattagaaacagggtttcactgtgttggccaggctggtctcaggctcctgacctctggtgatccacccacctcggcctcccaaagtgctgggattacaggcatgagatgagccactgtgcctggccatgagaaatgtttcatgatgtgagaaaatacaggagtttttggtcatgattccaccagtggtgaaggactgtcctgcagatgatggactctcagactgttggcaagagtagcaagatgctgcagcacattgactatagaatgagatgtatcctgcaagatggccgaatcttcattggcacctttaaggcttttgacaagcatatgaatttgatcctctgtgattgtgatgagttcagaaagatcaagtccacctcccccaggaatgcgtccaccaagaccttagcatactgttgatccatctcagtcactttttcccctgcaatgcgtcttgtgaaattgtgtagagtgtttgtgagctttttgttccctcattctgcattaataatagctaataataaatgcatagagcaattaaactgtgaggtactgttgtatatatttttttgcctgttgattttgatgagatcttaagttactgtggatgagggtgatgcctattaagcagttgattcaaatcatattctctttaattcttaggataaaaaggttttctgctatctaactttcactttgtgcattgactggtgttggttaataatgttttcatgacccgggggtttaagtggttgtgctgcttcacacatggcctcctgcttctcatgttgctatgtcacattatctgaagggaagtggggatgggatgaaaggccttgtaaggccacctatatactgaaggaagttgtagtgaatcacagtccatgctcattacatatcaaggcatttgaaatagaagttactctttttcttgggatgttgacctcagttgatcaggttttacagtgtcctatgatcagaatagaggatgtgatactggaataatcattttctaccattgagtaagtatttatttataaattactaaatgagtggaagatcctgggtactgggaggcaggaggttgcatatttgagttgataagttgtactactgataataaagataactgacacactaaaacatacttggtacactgaaatacaaattacggttatgtccagtggtatcaccaagtgacaaactgggagctaaatagttcagaaatgccctagtctctaggtccagtttgaattggttatggaacaaagaagccatttataaaagggaagagatttttaggttttgcagctaaggtttatagtaggcagcgagggaatgattcatagtgattgtagcagttggtttaccaagcactaaagagattggtgttaactccataatactgatagactgattggaattacattttttctcttgaatttaccaggagtggttgtgaatgtcaccttttccatcttttaaattacatccttgcaggtggtaatcactcaaggaaaaggaattatcagagtaacaatagttcctgttactgacttgatatggtctctgccagaatagcttctcagattaatggccactctcaggggaagcatttctccttgcattggtttgctggtatggatggcccttagattttggcatgagtgattatgcagcctatttgaagaaaacctgttttcaggacctttttaattaaatatggcctgttacatgagttaaagtgtcatacgataccattttttgaccacttagttgatgcctctgaaaggaagagagaatcagatcgctaaaatttgatgtgtcgtcagtgtggatcctactcagtagtgtcacaacgaggctgaaaatcatattaagtgcttttaggacagaaacgtaaactgctcaggtaaaataaccttataaagagaaataagcatatattgcagaggccttggctaggttcatgatgacacaggaccttgtctgaacataatgatttcaaaatttgagcttaaaaatgacactctgaaatccagtcagtgtgcctcactagacttttcgatttcaagattttctgcagaaaatgttttgaaaactttgaatacttaaaaatggcaggtgtagtattgcactttgctagttgctcagatacccttttttatttgtatagatattctgagttcctttttttttctacatgttgtacgttgtcgaaagctaaaaggaaacttatccttggatcacggaaggcagaggcatttggtgagatggaaacaaggatgtgtaaaaatgagacgaccacctctcggattaaaaaaaaaaagtgccagagttctagggttctaagtgatgtccaggaaggaggaggaataatatttatggagcatatattatggaacacagtgagtatagtacctgcctttaaatgaatactgttggttttttaggacagttgcttttttttcttttttcttcagctgtgtgcagttgattaacttgtacagagcctatcacacaatagatgtttaagaaatattaagtgaatgaatgaggcagcattgctaatttttgtatagtgagacggtatctcacagtccaggctggagttcagtggcattaacataactcactgcagccttgaacacctgagctcaaacgatcctttcaccttatcctccagagtagctgggactgcagtcgcgtgtcaacatgcctggctaattttagttttctaatttttttagagttgggatctcactatgttgcttagactggtcttgaactcctggcctcatgccatcctcttgcctcagctggtattgtaggtgtgagccactgtgccaggtactaattttttttatgttagaaaacaagtttttaggtattttatagttacttccttatgacaatatctcatcagaatctaggcctatctgatatctgactccatacgtttataccgtgtagtcagccattcccagatagaggtcatttgagttacttagtgtttaccagcacttgtttactaccttgcgatgatatttacagtgtatttttgggtatggttttggggttatttggttgttgttaaaatgcctgtaatcccggcactttgggaggttgaggcgggtggatcacctgaggtcaggagttcgagcccagcctggccaacatggcgaaaccctacctctactaaaaatacaaaaattagcctggcgtggtggcaggcacctgtaatcccaactacgcaggaggctaaggcaggagaattgcttgaacccgggaggcggaggttgcagtgagccgagatcgcgccaatggcactccattcagcttgagtgacagaggtgagactcccatctcaaggtaaaaaaaaaaaatagaaatcagcaactgctatttgagtttacaggagtgagaagtcctctcttgcatggtgagatggggaacatttaattcaatagaaatatttgagaccaggtatggtggctcaagcctgtaatcccagcactttgggaggctgagttgggtggatcacctgacatcaggagtttgagactagcctggccaacatagcaataccctgtctcaaagatacaaaaattacccaggcttggtggtgtgtgtctgtggtcccagctactcaggaggctgaggcaggagaatcacttgaacctgggcggcaaaggttgcagtgagccgagaccatgccactgcactccagcctgggtgacagagtgagactccgtctggaaaaaaaaagaaaaaaatgagatataaagttcaaaggatgtatttattaagccaatataaagtaaagaggtggggaatgttgtagaagtatatgttgataaagggatcaggtggttgtacaataagaagggggttgcagacatggagaaacagttcttctagctcttccactttcagtatcatctgtgtgggtcactggaatcctttttcacaatgcctgcttgcccatgagttttaagaactagtacagtgtagaaatgattagtaggaaaaacttggctgggttaatttgctttgctgagccgattcaacttaaaaagcgaggtccatactaagtgcccaagaatcaagaaggaggctcacatttgaacttgatgtttagttaatgtgaatcattttctgttgaactaatgagaatacagtgaccttgagggttaggttgtacatctgaattgttcgggctgtttcctgtcttttggatgttttgtttgtatagatattttcattttatgttacatcatttgttctttggtagcaaaaattgagttgaaatgatacagttcctgaaatctatgatttcatgtttcggagatatgtatcaggaataatagtgtgggttctcatgagaaaatctggattgcattactgtgctactttggtttcttgtcagagaagttagtagtttagacctccttcagaatcctttctttggactttgtgtttcttacgttgtgccagccttgattttatttgtctgtcctctgtctttctataccatttgtttacacttaactctag

SEQ ID NO: 445131 - DNA, 696 bp, Homo sapiens
agccggtacctactttccacagggaggagcggccgccggagatgcctgacgcatctgtctgaggagcggtcagtgacgcgatggagcgggcaagggatcgcttacacctgagacgaactacagaacagcacgtaccagaggtggaagtccaagtcaaacgcagaaggactgcctcactgagcaaccaagagtgtcagttgtacccgaggcgttctcagcagcagcaagtacctgtggtggatttccaggctgaactgaggcaggcattcttagctgagacaccaagaggtggttaaagccatattggagtagcgaggaatctgattccaagcaaaaaccaggctccatctactctttgaagcttctgcccagcttgcattgtttctaggagaacccgcgtcatacctttatctatagccttcccctaggtcttcagaagcatcaagttttaactgtggacattggatttggtggaacagcaatcatgactgttggcaagagtagcaagatgctgcagcacattgactatagaatgagatgtatcctgcaagatggccgaatcttcattggcacctttaaggcttttgacaagcatatgaatttgatcctctgtgattgtgatgagttcagaaagatcaacaaagaatgcgaagcacccagagcgtgaaggttgagggccaccccccaagatactgt

SEQ ID NO: 445132 - DNA, 1894 bp, Homo sapiens
agccggtacctactttccacagggaggagcggccgccggagatgcctgacgcatctgtctgaggagcggtcagtgacgcgatggagcgggcaagggatcgcttacacctgagacgaactacagaacagcacgtaccagaggtggaagtccaagtcaaacgcagaaggactgcctcactgagcaaccaagagtaatgactccacagggaagaggcactgtagcagctgctgctgttgctgcgactgccagtattgctggagccccaacacagtacccaccaggacggggcactccgcccccacccgtcggcagagcaaccccacctccaggcattatggctcctccacctggtatgagaccacccatgggcccaccaattgggcttccccctgctcgagggacgccaataggcatgccgcctccgggaatgagaccccctccaccaggcattagaggggaagcatttctccttgcattggtttgctggtatggatggcccttagattttggcatgagtgattatgcagcctatttgaagaaaacctgttttcaggacctttttaattaaatatggcctgttacatgagttaaaggcaatcaggatgagtgaaaaattgatttgcagctgacctgcaaatggaatcatcaggaacatccctttctcatggagtcccttaatttacaagttaactgcaaacataggagatgatagttccaagaaggaacattttatcgtctttgtttttaatctcaagaatggtacctaccatcagtgaatgacctgttgcagtgctttcattgaagtgttcttcgttccctcagcaatatgattgtgatgactgaaaaagggaaactgtgccactatttgtaccatcattttcaccaaaatctaaaaatgctttttatgacgtatggagacattcttcatgtttgtttcagtggacactccttgcagatgtaaaaaactgagaaaactcacttttggaaagtgacctaaagagtgtcattgaagtgaattttaagtaggcacgatgattgttttcatggttgctgttggatcatatctcaggagctggaatgacagacattattgaacaaagaaatcaggatagtggaacttaaagggcttcatctcagtgctttcataagtatgaagtgcatatatttataattttcactaatcacagggtaaatataaaattgattcattaaaaatgtttcataagaattcaaaggacatagaattttgtgaaatgtagtatttttacttaagtgccttttctctgcttctaccccacagccaattttttataaaccagttgataacataagtagttttgggggatgatacattacttatacattttctatgtagtaaacatgtatgtgtatgtgtgtgggtgtgtgtctaattactttgttggacagattcctgtggtttggaactgctggggccaagtttatacaaaaatctacatttttgagtaaactccccatgactctagtaagtttccacagtatttgagtattctttatttcctaaagctgtacaaacatcagataatcaatatttgtaaggatcgataatataatttataatgaaattgctttatcagctattaatgttaactacatcatcttcatatagccttataactcatttgtgctattccattttcctctgttccttttattttcacttcccttgtaatgttagtctctttgtactgatttctgaagagttcatttatgattaaacatgttaacattttgtctagaattgcaaatatgttttttctcattcattttactatggtgttttattttttggttatacagaagttgtatattgaaatataatcttgttctgttttatgactttggagttttgtgg

SEQ ID NO: 445133 - DNA, 481 bp, Homo sapiens
tgagggaaggacccgtgattatccccaacacacttcagccagctggcatttcatttattgatttttattatttttattttaagacaccatctcactgtgtcacccaggccagagtgcagtggtgagaacaacgacctcccagctcaagcaatcctcccaccgcagcctcttgagtagctgggactgcaggtgtgtgccaccatgcccagctaatttttttagttttcgtagagacgagatttcaccatgttgcccaggctagtctcaaactcctgggatcaagcaatcctcccacctcgacctctcaaagtgttgggattacaggtgtgagccaccatgcatggccagctggcattttaaatgtattcaataattatcccacttattgcttttatttatttatttatttatttacttattttgagacggtgtcttgctctgtaccccaggctggagtgcgatgacatgatcttggctcact

SEQ ID NO: 445134 - DNA, 945 bp, Homo sapiens
tttttttaattttaagttagtatttcttgagaacccttattagactcagcccttttaattctcagaatagctgttagaagtaggtatgattatagtatttactgtggagcaaaccgaggcaacgaggagtattgtgttcatggtcaggaaatgacagtcacttgatcccaggtatatcagatctcaaagcccatactttttctccaggtcctggagaaagcctgagcgagggcccttgaccttaatttaagaaatttgccttgaatcccagatctttagacgtggattctaagctcacctacttggtacacctgggtaatgtggcccacagccccgttctgtgatcgtcaagatgtcatccaatcaaacgtcatgatttttttagctttcaaaccgattgtcagtgaatagaattttaggtttctaactgtcttaccttcttgatcctgtataggtaaattctcctacaggatattcttttttttcctgatttttttttctttttctgtgcttcacttgccttataagaaagatacaatggtaatatatcctccagaagtgttgtgagggttaaataagatggcgtatatgtgaaacacttggtaaatttaaatgcagcataaaggtaaggtattgttgttttttttctaggcattgccacctggggtatcgttgtcatggcagaccccaaagggaaggcctaccgcgttgtttgaaagtaccaccagtgaatctgtcttctgtctctgtccctttccccgtgacacacagagcaggcatggaatttaatgggtgttctggacagacacttgtacatggacagacatcactactgtggatactacaagactgaaaagaaaatcgtatgttgtcattctctggctatggagtgtttgtggccttcacagatttcacaggaaccaataaatccctcagagaagtaaa

SEQ ID NO: 445135 - DNA, 472 bp, Homo sapiens
ttttataggtatctcgcatttcccctgcttgcactcaatccatcctgctaccccatgaagaaggtgcctgcttctcctttgccttctaccacgattatgcacccagagcaacaggcagatactacactgcactatgggcttccctcatggccatgactctttcactatgtcctggcaggcattgccacctggggtatcgttgtcatggcagaccccaaagggaaggcctaccgcgttgtttgaaagtaccaccagtgaatctgtcttctgtctctgtccctttccccgtgacacacagagcaggcatggaatttaatgggtgttctggacagacacttgtacatggacagacatcactactgtggatactacaagactgaaaagaaaatcgtatgttgtcattctctggctatggagtgtttgtggccttcacagatttcacaggaaccaataaatccctcagagaagtaaa

SEQ ID NO: 445136 - DNA, 984 bp, Homo sapiens
acaggcctctggataggagatatgacatgcccaaggtctcgcagttcatgtgaggcaggaaacttaagagagccagacttctttaaggagactgaaaggtgattcatttagtgagtagcgattacagaatttctaaaacagtgggggcggggggggcggcggggaggagggctggaattgtcctccagcgcatacaaggttgttgctgccagagaaatccagcaggaaagagcagcattctttcaccttttccgcctctgaagcggaggagaacttcatttcccagcagcccttaagattcctccgcgcactgcgctagcgtcccggcattctgctttccggcgctctgccttccggtgcgtcgtttacgccagtttgaaccaaagacgcccaaggttgaggccgagttccagagcatggggtctcggttgtcccagccttttgagtcctatatcactgcgcctcccggtaccgccgccgcgcccgccaaacctgcgcccccagctacacccggagcgccgacctccccagcagaacaccgcctgttgaagacctgctggagctgtcgcgtgctttctgggttggggctgatgggggcgggcgggtacgtgtactgggtggcacggaagcccatgaagatgggataccccccgagtccatggaccattacgcagatggtcatcggcctcagcattgccacctggggtatcgttgtcatggcagaccccaaagggaaggcctaccgcgttgtttgaaagtaccaccagtgaatctgtcttctgtctctgtccctttccccgtgacacacagagcaggcatggaatttaatgggtgttctggacagacacttgtacatggacagacatcactactgtggatactacaagactgaaaagaaaatcgtatgttgtcattctctggctatggagtgtttgtggccttcacagatttcacaggaaccaataaatccctcagagaagtaaa

SEQ ID NO: 445137 - DNA, 2817 bp, Homo sapiens
acaggcctctggataggagatatgacatgcccaaggtctcgcagttcatgtgaggcaggaaacttaagagagccagacttctttaaggagactgaaaggtgattcatttagtgagtagcgattacagaatttctaaaacagtgggggcggggggggcggcggggaggagggctggaattgtcctccagcgcatacaaggttgttgctgccagagaaatccagcaggaaagagcagcattctttcaccttttccgcctctgaagcggaggagaacttcatttcccagcagcccttaagattcctccgcgcactgcgctagcgtcccggcattctgctttccggcgctctgccttccggtgcgtcgtttacgccagtttgaaccaaagacgcccaaggttgaggccgagttccagagcatggggtctcggttgtcccagccttttgagtcctatatcactgcgcctcccggtaccgccgccgcgcccgccaaacctgcgcccccagctacacccggagcgccgacctccccagcagaacaccgcctgttgaagacctgctggagctgtcgcgtgctttctgggttggggctgatgggggcgggcgggtacgtgtactgggtggcacggaagcccatgaagatgggataccccccgagtccatggaccattacgcagatggtcatcggcctcagcattgccacctggggtatcgttgtcatggcagaccccaaagggaaggcctaccgcgttgtttgaaagtaccaccagtgaatctgtcttctgtctctgtccctttccccgtgacacacagagcaggcatggaatttaatgggtgttctggacagacacttgtacatggacagacatcactactgtggatactacaagactgaaaagaaaatcgtatgttgtcattctctggctatggagtgtttgtggccttcacagatttcacaggaaccaataaatccctcagagaagtaaacaggttctttgtcttatctggggaaggaaagtataacttatatttaaatataattgcttaattaagcattatatataaacataatagtatgtcttatataattgcatgtcatattatatataataaacataaatatgtttagttatatagttagtataatttttaaaacttttaaatacagcatatggtaaaccaacgggaaaattagctattttacttcattattttaaagagttctttttatttctttcataattggatcaacaactgttaacctaaccctgggtgggcatcatgcaatatatagaagtacgtgaaattttctgtgtatgaattgctgatactttgcaaggcattttcaaatccatcaccttatgagagcttcacagctagtctgaggtagttacttcattggaggtaaaacttaaaacacaagaaagagcccacatgatttgcctagggtcattcagtaagtccgtgatggagctagaacttgttcttgtcagttttttgttctagtcttccctttcatggaggcaagaataaccattatgaaacagttagataatcataaaaatcagcatacaataaaagacttaaatgtcacaagaaaaattcaaaacctttagctaaaaaaaaaaaagatcttttgattctttttccacaagcactagatatgtttctgtgatgattttgagataagtactcaaaattacatagttcatttctaagagaaggccatgttttctacctattgggtttttctaccctgagatactatggcttctttgtaaaggtatataaagtgtttttcaaagcggaaagatactgttaaattcagctgctaatcatagtgtatttgtttggaatgacatgttgagcaggtagtacctttacggctgttgctttttgcagcattatgtggaagtgcctaagtctatttagcctcacagatgactttagaatcttgtattttctacatcagagttcatagcggggatggtgctacatatatctatgcaactgaaaaagaaaacatttcaaacctaaagtacgcaacaagatattatttatatgaaatccatagctcagttatgctatgttcatgaatagagaagttttaagttggaagggaccatggatgacccaaagcagatacatatggtcattcatatacctaaaatacctacaaagacaagttgttccctggtttaaaaggcagtctgttctattgatggactgctttagtccctgaacattttctttggttaaaccaaaaacacataaacctaacttggtcttggcttgatctactgggtaaataataactcttaaatatatatacagttgacccttggacaacacaggagttaagagcgctgaacatttgctcagtggagaatctgcatataacctgactcctcaaaaacttaattagtagttagtttacaattgactggaagccttattgataacatattgtatgtattatattccgtattcttacaagaaggtaagctagagaaaaaaaaatgttattaaggaagtaatatattcactattcgttaggtagaagtgaatcatcctaaaggtcttcatcctcatcttcacgctgagtagtctgaggagcaagaggagttggtctttctgtcccagtggcagaggtggaagaaaatccacagatacgtggacctgcgcagttcaaacctgtgttgtttgggtcaactgtattgtaatagcattttaatgtttttctcagacttttacgagtatgaatctgagctttttctgaataaacctgcctgctcaccattaataatgccaaaaaaaaat

SEQ ID NO: 445138 - DNA, 2805 bp, Homo sapiens
tttttttaattttaagttagtatttcttgagaacccttattagactcagcccttttaattctcagaatagctgttagaagtaggtatgattatagtatttactgtggagcaaaccgaggcaacgaggagtattgtgttcatggtcaggaaatgacagtcacttgatcccaggtatatcagatctcaaagcccatactttttctccaggtcctggagaaagcctgagcgagggcccttgaccttaatttaagaaatttgccttgaatcccagatctttagacgtggattctaagctcacctacttggtacacctgggtaatgtggcccacagccccgttctgtgatcgtcaagatgtcatccaatcaaacgtcatgatttttttagctttcaaaccgattgtcagtgaatagaattttaggtttctaactgtcttaccttcttgatcctgtataggtaaattctcctacaggatattcttttttttcctgatttttttttctttttctgtgcttcacttgccttataagaaagatacaatggtaatatatcctccagaagtgttgtgagggttaaataagatggcgtatatgtgaaacacttggtaaatttaaatgcagcataaaggtaaggtattgttgttttttttctaggcattgccacctggggtatcgttgtcatggcagaccccaaagggaaggcctaccgcgttgtttgaaagtaccaccagtgaatctgtcttctgtctctgtccctttccccgtgacacacagagcaggcatggaatttaatgggtgttctggacagacacttgtacatggacagacatcactactgtggatactacaagactgaaaagaaaatcgtatgttgtcattctctggctatggagtgtttgtggccttcacagatttcacaggaaccaataaatccctcagagaagtaaacaggttctttgtcttatctggggaaggaaagtataacttatatttaaatataattgcttaattaagcattatatataaacataatagtatgtcttatataattgcatgtcatattatatataataaacataaatatgtttagttatatagttagtataatttttaaaacttttaaatacagcatatggtaaaccaacgggaaaattagctattttacttcattattttaaagagttctttttatttctttcataattggatcaacaactgttaacctaaccctgggtgggcatcatgcaatatatagaagtacgtgaaattttctgtgtatgaattgctgatactttgcaaggcattttcaaatccatcaccttatgagagcttcacagctagtctgaggtagttacttcattggaggtaaaacttaaaacacaagaaagagcccacatgatttgcctagggtcattcagtaagtccgtgatggagctagaacttgttcttgtcagttttttgttctagtcttccctttcatggaggcaagaataaccattatgaaacagttagataatcataaaaatcagcatacaataaaagacttaaatgtcacaagaaaaattcaaaacctttagctaaaaaaaaaaaagatcttttgattctttttccacaagcactagatatgtttctgtgatgattttgagataagtactcaaaattacatagttcatttctaagagaaggccatgttttctacctattgggtttttctaccctgagatactatggcttctttgtaaaggtatataaagtgtttttcaaagcggaaagatactgttaaattcagctgctaatcatagtgtatttgtttggaatgacatgttgagcaggtagtacctttacggctgttgctttttgcagcattatgtggaagtgcctaagtctatttagcctcacagatgactttagaatcttgtattttctacatcagagttcatagcggggatggtgctacatatatctatgcaactgaaaaagaaaacatttcaaacctaaagtacgcaacaagatattatttatatgaaatccatagctcagttatgctatgttcatgaatagagaagttttaagttggaagggaccatggatgacccaaagcagatacatatggtcattcatatacctaaaatacctacaaagacaagttgttccctggtttaaaaggcagtctgttctattgatggactgctttagtccctgaacattttctttggttaaaccaaaaacacataaacctaacttggtcttggcttgatctactgggtaaataataactcttaaatatatatacagttgacccttggacaacacaggagttaagagcgctgaacatttgctcagtggagaatctgcatataacctgactcctcaaaaacttaattagtagttagtttacaattgactggaagccttattgataacataaagcagttgattaacatattttttgtgttgtatgtattatattccgtattcttacaagaaggtaagctagagaaaaaaaaatgttattaaggaagtaatatattcactattcgttaggtagaagtgaatcatcctaaaggtcttcatcctcatcttcacgctgagtagtctgaggagcaagaggagttggtctttctgtcccagtggcagaggtggaagaaaatccacagatacgtggacctgcgcagttcaaacctgtgttgtttgggtcaactgtattgtaatagcattttaatgtttttctcagacttttacgagtatgaatctgagctttttctgaataaacctgcctgctcaccattaataatgccaaaaaaaaat

SEQ ID NO: 445139 - DNA, 2264 bp, Homo sapiens
acaggcctctggataggagatatgacatgcccaaggtctcgcagttcatgtgaggcaggaaacttaagagagccagacttctttaaggagactgaaaggtgattcatttagcattgccacctggggtatcgttgtcatggcagaccccaaagggaaggcctaccgcgttgtttgaaagtaccaccagtgaatctgtcttctgtctctgtccctttccccgtgacacacagagcaggcatggaatttaatgggtgttctggacagacacttgtacatggacagacatcactactgtggatactacaagactgaaaagaaaatcgtatgttgtcattctctggctatggagtgtttgtggccttcacagatttcacaggaaccaataaatccctcagagaagtaaacaggttctttgtcttatctggggaaggaaagtataacttatatttaaatataattgcttaattaagcattatatataaacataatagtatgtcttatataattgcatgtcatattatatataataaacataaatatgtttagttatatagttagtataatttttaaaacttttaaatacagcatatggtaaaccaacgggaaaattagctattttacttcattattttaaagagttctttttatttctttcataattggatcaacaactgttaacctaaccctgggtgggcatcatgcaatatatagaagtacgtgaaattttctgtgtatgaattgctgatactttgcaaggcattttcaaatccatcaccttatgagagcttcacagctagtctgaggtagttacttcattggaggtaaaacttaaaacacaagaaagagcccacatgatttgcctagggtcattcagtaagtccgtgatggagctagaacttgttcttgtcagttttttgttctagtcttccctttcatggaggcaagaataaccattatgaaacagttagataatcataaaaatcagcatacaataaaagacttaaatgtcacaagaaaaattcaaaacctttagctaaaaaaaaaaaagatcttttgattctttttccacaagcactagatatgtttctgtgatgattttgagataagtactcaaaattacatagttcatttctaagagaaggccatgttttctacctattgggtttttctaccctgagatactatggcttctttgtaaaggtatataaagtgtttttcaaagcggaaagatactgttaaattcagctgctaatcatagtgtatttgtttggaatgacatgttgagcaggtagtacctttacggctgttgctttttgcagcattatgtggaagtgcctaagtctatttagcctcacagatgactttagaatcttgtattttctacatcagagttcatagcggggatggtgctacatatatctatgcaactgaaaaagaaaacatttcaaacctaaagtacgcaacaagatattatttatatgaaatccatagctcagttatgctatgttcatgaatagagaagttttaagttggaagggaccatggatgacccaaagcagatacatatggtcattcatatacctaaaatacctacaaagacaagttgttccctggtttaaaaggcagtctgttctattgatggactgctttagtccctgaacattttctttggttaaaccaaaaacacataaacctaacttggtcttggcttgatctactgggtaaataataactcttaaatatatatacagttgacccttggacaacacaggagttaagagcgctgaacatttgctcagtggagaatctgcatataacctgactcctcaaaaacttaattagtagttagtttacaattgactggaagccttattgataacataaagcagttgattaacatattttttgtgttgtatgtattatattccgtattcttacaagaaggtaagctagagaaaaaaaaatgttattaaggaagtaatatattcactattcgttaggtagaagtgaatcatcctaaaggtcttcatcctcatcttcacgctgagtagtctgaggagcaagaggagttggtctttctgtcccagtggcagaggtggaagaaaatccacagatacgtggacctgcgcagttcaaacctgtgttgtttgggtcaactgtattgtaatagcattttaatgtttttctcagacttttacgagtatgaatctgagctttttctgaataaacctgcctgctcaccattaataatgccaaaaaaaaat

SEQ ID NO: 445140 - DNA, 1256 bp, Homo sapiens
acaggcctctggataggagatatgacatgcccaaggtctcgcagttcatgtgaggcaggaaacttaagagagccagacttctttaaggagactgaaaggtgattcatttagtgagtagcgattacagaatttctaaaacagtgggggcggggggggcggcggggaggagggctggaattgtcctccagcgcatacaaggttgttgctgccagagaaatccagcaggaaagagcagcattctttcaccttttccgcctctgaagcggaggagaacttcatttcccagcagcccttaagattcctccgcgcactgcgctagcgtcccggcattctgctttccggcgctctgccttccggtgcgtcgtttacgccagtttgaaccaaagacgcccaaggttgaggccgagttccagagcatggggtctcggttgtcccagccttttgagtcctatatcactgcgcctcccggtaccgccgccgcgcccgccaaacctgcgcccccagctacacccggagcgccgacctccccagcagaacaccgcctgttgaagacctgctggagctgtcgcgtgctttctgggttggggctgatgggggcgggcgggtacgtgtactgggtggcacggaagcccatgaagatgggataccccccgagtccatggaccattacgcagatggtcatcggcctcagcattgccacctggggtatcgttgtcatggcagaccccaaagggaaggcctaccgcgttgtttgaaagtaccaccagtgaatctgtcttctgtctctgtccctttccccgtgacacacagagcaggcatggaatttaatgggtgttctggacagacacttgtacatggacagacatcactactgtggatactacaagactgaaaagaaaatcgtatgttgtcattctctggctatggagtgtttgtggccttcacagatttcacaggaaccaataaatccctcagagaagtaaaaaaaaaaaaaaaaaaaaagaaaaaaaaaaaagaaaaacaaaaaaagaaaaaaaaaaaaaaaaagagaaaagaaaaaaaggggcacgaaacaagaaaaaacagcgaagaggaacaacacaagaaagaccagacaaaaaaaaagacacaacaaaaggaaaaataaaggcagaggagggaaaaaaaaaaaagagaggaaaaaaaaaataaagataataagagaaaaaatatagtagaagaaaaaaaaagtaaacaatcgaagaaaaaggactaag

SEQ ID NO: 445141 - DNA, 1309 bp, Homo sapiens
  misc_feature (987)..(988): n is a, c, g, or t
  misc_feature (993)..(994): n is a, c, g, or t
  misc_feature (996)..(996): n is a, c, g, or t
  misc_feature (1001)..(1001): n is a, c, g, or t
  misc_feature (1010)..(1011): n is a, c, g, or t
  misc_feature (1015)..(1015): n is a, c, g, or t
  misc_feature (1017)..(1017): n is a, c, g, or t
  misc_feature (1019)..(1019): n is a, c, g, or t
  misc_feature (1027)..(1027): n is a, c, g, or t
  misc_feature (1035)..(1035): n is a, c, g, or t
  misc_feature (1041)..(1042): n is a, c, g, or t
  misc_feature (1045)..(1045): n is a, c, g, or t
  misc_feature (1047)..(1047): n is a, c, g, or t
  misc_feature (1063)..(1063): n is a, c, g, or t
  misc_feature (1067)..(1068): n is a, c, g, or t
  misc_feature (1074)..(1074): n is a, c, g, or t
acaggcctctggataggagatatgacatgcccaaggtctcgcagttcatgtgaggcaggaaacttaagagagccagacttctttaaggagactgaaaggtgattcatttagtgagtagcgattacagaatttctaaaacagtgggggcggggggggcggcggggaggagggctggaattgtcctccagcgcatacaaggttgttgctgccagagaaatccagcaggaaagagcagcattctttcaccttttccgcctctgaagcggaggagaacttcatttcccagcagcccttaagattcctccgcgcactgcgctagcgtcccggcattctgctttccggcgctctgccttccggtgcgtcgtttacgccagtttgaaccaaagacgcccaaggttgaggccgagttccagagcatggggtctcggttgtcccagccttttgagtcctatatcactgcgcctcccggtaccgccgccgcgcccgccaaacctgcgcccccagctacacccggagcgccgacctccccagcagaacaccgcctgttgaagacctgctggagctgtcgcgtgctttctgggttggggctgatgggggcgggcgggtacgtgtactgggtggcacggaagcccatgaagatgggataccccccgagtccatggaccattacgcagatggtcatcggcctcagcattgccacctggggtatcgttgtcatggcagaccccaaagggaaggcctaccgcgttgtttgaaagtaccaccagtgaatctgtcttctgtctctgtccctttccccgtgacacacagagcaggcatggaatttaatgggtgttctggacagacacttgtacatggacagacatcactactgtggatactacaagactgaaaagaaaatcgtatgttgtcattctctggctatggagtgtttgtggccttcacagatttcacaggaaccaataaatccctcagagaagtaaaaannacagnnanaatcnaaaaaaaannatangngntaaaattnactgaaanaaatannaananacctcgagtttttttntttnntttttnaagatttatctttgccatttttttttaaaatcttattcaaaattttaattattactttcagatttgaaaaaatttcctgcattcgtttcaggggaatttccatggcgctacccttccttattgggaaggtccactgcccgcccaagagacaggttggacggctttcttccagctttacttgctcaagccacattgctaacccggtacctgcttaacattttagggctggtttcct

SEQ ID NO: 445142 - DNA, 1016 bp, Homo sapiens
acaggcctctggataggagatatgacatgcccaaggtctcgcagttcatgtgaggcaggaaacttaagagagccagacttctttaaggagactgaaaggtgattcatttagtgagtagcgattacagaatttctaaaacagtgggggcggggggggcggcggggaggagggctggaattgtcctccagcgcatacaaggttgttgctgccagagaaatccagcaggaaagagcagcattctttcaccttttccgcctctgaagcggaggagaacttcatttcccagcagcccttaagattcctccgcgcactgcgctagcgtcccggcattctgctttccggcgctctgccttccggtgcgtcgtttacgccagtttgaaccaaagacgcccaaggttgaggccgagttccagagcatggggtctcggttgtcccagccttttgagtcctatatcactgcgcctcccggtaccgccgccgcgcccgccaaacctgcgcccccagctacacccggagcgccgacctccccagcagaacaccgcctgttgaagacctgctggagctgtcgcgtgctttctgggttggggctgatgggggcgggcgggtacgtgtactgggtggcacggaagcccatgaagatgggataccccccgagtccatggaccattacgcagatggtcatcggcctcagcattgccacctggggtatcgttgtcatggcagaccccaaagggaaggcctaccgcgttgtttgaaagtaccaccagtgaatctgtcttctgtctctgtccctttccccgtgacacacagagcaggcatgggccatcggcgacgggggccaagccctccccgtgcccaccctctttccctgttgctgacctcaggcctgatgctggacccatgagactcccagagggaaaacacagacacagcccatccatccattgccaccttcctccagaagatcctggggacccctacccccccatcccatgaggcaccagggctgggctccc

SEQ ID NO: 445143 - DNA, 733 bp, Homo sapiens
acaggcctctggataggagatatgacatgcccaaggtctcgcagttcatgtgaggcaggaaacttaagagagccagacttctttaaggagactgaaaggtgattcatttagtgagtagcgattacagaatttctaaaacagtgggggcggggggggcggcggggaggagggctggaattgtcctccagcgcatacaaggttgttgctgccagagaaatccagcaggaaagagcagcattctttcaccttttccgcctctgaagcggaggagaacttcatttcccagcagcccttaagattcctccgcgcactgcgctagcgtcccggcattctgctttccggcgctctgccttccggtgcgtcgtttacgccagtttgaaccaaagacgcccaaggttgaggccgagttccagagcatggggtctcggttgtcccagccttttgagtcctatatcactgcgcctcccggtaccgccgccgcgcccgccaaacctgcgcccccagctacacccggagcgccgacctccccagcagaacaccgcctgttgaagacctgctggagctgtcgcgtgctttctgggttggggctgatgggggcgggcgggtacgtgtactgggtggcacggaagcccatgaagatgggataccccccgagtccatggaccattacgcagatggtcatcggcctcagtgagaatcaaggcacagcacttgggcgggttgggtatctgcg

SEQ ID NO: 445144 - DNA, 2844 bp, Homo sapiens
acaggcctctggataggagatatgacatgcccaaggtctcgcagttcatgtgaggcaggaaacttaagagagccagacttctttaaggagactgaaaggtgattcatttagtgagtagcgattacagaatttctaaaacagtgggggcggggggggcggcggggaggagggctggaattgtcctccagcgcatacaaggttgttgctgccagagaaatccagcaggaaagagcagcattctttcaccttttccgcctctgaagcggaggagaacttcatttcccagcagcccttaagattcctccgcgcactgcgctagcgtcccggcattctgctttccggcgctctgccttccggtgcgtcgtttacgccagtttgaaccaaagacgcccaaggttgaggccgagttccagagcatggggtctcggttgtcccagccttttgagtcctatatcactgcgcctcccggtaccgccgccgcgcccgccaaacctgcgcccccagctacacccggagcgccgacctccccagcagaacaccgcctgttgaagacctgctggagctgtcgcgtgctttctgggttggggctgatgggggcgggcgggtacgtgtactgggtggcacggaagcccatgaagatgggataccccccgagtccatggaccattacgcagatggtcatcggcctcagcattgccacctggggtatcgttgtcatggcagaccccaaagggaaggcctaccgcgttgtttgaaagtaccaccagtgaatctgtcttctgtctctgtccctttccccgtgacacacagagcaggcatggaatttaatgggtgttctggacagacacttgtacatggacagacatcactactgtggatactacaagactgaaaagaaaatcgtatgttgtcattctctggctatggagtgtttgtggccttcacagatttcacaggaaccaataaatccctcagagaagtaaacaggttctttgtcttatctggggaaggaaagtataacttatatttaaatataattgcttaattaagcattatatataaacataatagtatgtcttatataattgcatgtcatattatatataataaacataaatatgtttagttatatagttagtataatttttaaaacttttaaatacagcatatggtaaaccaacgggaaaattagctattttacttcattattttaaagagttctttttatttctttcataattggatcaacaactgttaacctaaccctgggtgggcatcatgcaatatatagaagtacgtgaaattttctgtgtatgaattgctgatactttgcaaggcattttcaaatccatcaccttatgagagcttcacagctagtctgaggtagttacttcattggaggtaaaacttaaaacacaagaaagagcccacatgatttgcctagggtcattcagtaagtccgtgatggagctagaacttgttcttgtcagttttttgttctagtcttccctttcatggaggcaagaataaccattatgaaacagttagataatcataaaaatcagcatacaataaaagacttaaatgtcacaagaaaaattcaaaacctttagctaaaaaaaaaaaagatcttttgattctttttccacaagcactagatatgtttctgtgatgattttgagataagtactcaaaattacatagttcatttctaagagaaggccatgttttctacctattgggtttttctaccctgagatactatggcttctttgtaaaggtatataaagtgtttttcaaagcggaaagatactgttaaattcagctgctaatcatagtgtatttgtttggaatgacatgttgagcaggtagtacctttacggctgttgctttttgcagcattatgtggaagtgcctaagtctatttagcctcacagatgactttagaatcttgtattttctacatcagagttcatagcggggatggtgctacatatatctatgcaactgaaaaagaaaacatttcaaacctaaagtacgcaacaagatattatttatatgaaatccatagctcagttatgctatgttcatgaatagagaagttttaagttggaagggaccatggatgacccaaagcagatacatatggtcattcatatacctaaaatacctacaaagacaagttgttccctggtttaaaaggcagtctgttctattgatggactgctttagtccctgaacattttctttggttaaaccaaaaacacataaacctaacttggtcttggcttgatctactgggtaaataataactcttaaatatatatacagttgacccttggacaacacaggagttaagagcgctgaacatttgctcagtggagaatctgcatataacctgactcctcaaaaacttaattagtagttagtttacaattgactggaagccttattgataacataaagcagttgattaacatattttttgtgttgtatgtattatattccgtattcttacaagaaggtaagctagagaaaaaaaaatgttattaaggaagtaatatattcactattcgttaggtagaagtgaatcatcctaaaggtcttcatcctcatcttcacgctgagtagtctgaggagcaagaggagttggtctttctgtcccagtggcagaggtggaagaaaatccacagatacgtggacctgcgcagttcaaacctgtgttgtttgggtcaactgtattgtaatagcattttaatgtttttctcagacttttacgagtatgaatctgagctttttctgaataaacctgcctgctcaccattaataatgccaaaaaaaaat

SEQ ID NO: 445145 - DNA, 2758 bp, Homo sapiens
acaggcctctggataggagatatgacatgcccaaggtctcgcagttcatgtgaggcaggaaacttaagagagccagacttctttaaggagactgaaaggtgattcatttagtgagtagcgattacagaatttctaaaacagtgggggcggggggggcggcggggaggagggctggaattgtcctccagcgcatacaaggttgttgctgccagagaaatccagcaggaaagagcagcattctttcaccttttccgcctctgaagcggaggagaacttcatttcccagcagcccttaagattcctccgcgcactgcgctagcgtcccggcattctgctttccggcgctctgccttccggtgcgtcgtttacgccagtttgaaccaaagacgcccaaggttgaggccgagttccagagcatggggtctcggttgtcccagccttttgagtcctatatcactgcgcctcccggtaccgccgccgcgcccgccaaacctgcgcccccagctacacccggagcgccgacctccccagcagaacaccgcctgttgaagacctgctggagctgtcgcgtgctttctgggttggggctgatgggggcgggcgggcattgccacctggggtatcgttgtcatggcagaccccaaagggaaggcctaccgcgttgtttgaaagtaccaccagtgaatctgtcttctgtctctgtccctttccccgtgacacacagagcaggcatggaatttaatgggtgttctggacagacacttgtacatggacagacatcactactgtggatactacaagactgaaaagaaaatcgtatgttgtcattctctggctatggagtgtttgtggccttcacagatttcacaggaaccaataaatccctcagagaagtaaacaggttctttgtcttatctggggaaggaaagtataacttatatttaaatataattgcttaattaagcattatatataaacataatagtatgtcttatataattgcatgtcatattatatataataaacataaatatgtttagttatatagttagtataatttttaaaacttttaaatacagcatatggtaaaccaacgggaaaattagctattttacttcattattttaaagagttctttttatttctttcataattggatcaacaactgttaacctaaccctgggtgggcatcatgcaatatatagaagtacgtgaaattttctgtgtatgaattgctgatactttgcaaggcattttcaaatccatcaccttatgagagcttcacagctagtctgaggtagttacttcattggaggtaaaacttaaaacacaagaaagagcccacatgatttgcctagggtcattcagtaagtccgtgatggagctagaacttgttcttgtcagttttttgttctagtcttccctttcatggaggcaagaataaccattatgaaacagttagataatcataaaaatcagcatacaataaaagacttaaatgtcacaagaaaaattcaaaacctttagctaaaaaaaaaaaagatcttttgattctttttccacaagcactagatatgtttctgtgatgattttgagataagtactcaaaattacatagttcatttctaagagaaggccatgttttctacctattgggtttttctaccctgagatactatggcttctttgtaaaggtatataaagtgtttttcaaagcggaaagatactgttaaattcagctgctaatcatagtgtatttgtttggaatgacatgttgagcaggtagtacctttacggctgttgctttttgcagcattatgtggaagtgcctaagtctatttagcctcacagatgactttagaatcttgtattttctacatcagagttcatagcggggatggtgctacatatatctatgcaactgaaaaagaaaacatttcaaacctaaagtacgcaacaagatattatttatatgaaatccatagctcagttatgctatgttcatgaatagagaagttttaagttggaagggaccatggatgacccaaagcagatacatatggtcattcatatacctaaaatacctacaaagacaagttgttccctggtttaaaaggcagtctgttctattgatggactgctttagtccctgaacattttctttggttaaaccaaaaacacataaacctaacttggtcttggcttgatctactgggtaaataataactcttaaatatatatacagttgacccttggacaacacaggagttaagagcgctgaacatttgctcagtggagaatctgcatataacctgactcctcaaaaacttaattagtagttagtttacaattgactggaagccttattgataacataaagcagttgattaacatattttttgtgttgtatgtattatattccgtattcttacaagaaggtaagctagagaaaaaaaaatgttattaaggaagtaatatattcactattcgttaggtagaagtgaatcatcctaaaggtcttcatcctcatcttcacgctgagtagtctgaggagcaagaggagttggtctttctgtcccagtggcagaggtggaagaaaatccacagatacgtggacctgcgcagttcaaacctgtgttgtttgggtcaactgtattgtaatagcattttaatgtttttctcagacttttacgagtatgaatctgagctttttctgaataaacctgcctgctcaccattaataatgccaaaaaaaaat

SEQ ID NO: 445146 - DNA, 898 bp, Homo sapiens
acaggcctctggataggagatatgacatgcccaaggtctcgcagttcatgtgaggcaggaaacttaagagagccagacttctttaaggagactgaaaggtgattcatttagtgagtagcgattacagaatttctaaaacagtgggggcggggggggcggcggggaggagggctggaattgtcctccagcgcatacaaggttgttgctgccagagaaatccagcaggaaagagcagcattctttcaccttttccgcctctgaagcggaggagaacttcatttcccagcagcccttaagattcctccgcgcactgcgctagcgtcccggcattctgctttccggcgctctgccttccggtgcgtcgtttacgccagtttgaaccaaagacgcccaaggttgaggccgagttccagagcatggggtctcggttgtcccagccttttgagtcctatatcactgcgcctcccggtaccgccgccgcgcccgccaaacctgcgcccccagctacacccggagcgccgacctccccagcagaacaccgcctgttgaagacctgctggagctgtcgcgtgctttctgggttggggctgatgggggcgggcgggcattgccacctggggtatcgttgtcatggcagaccccaaagggaaggcctaccgcgttgtttgaaagtaccaccagtgaatctgtcttctgtctctgtccctttccccgtgacacacagagcaggcatggaatttaatgggtgttctggacagacacttgtacatggacagacatcactactgtggatactacaagactgaaaagaaaatcgtatgttgtcattctctggctatggagtgtttgtggccttcacagatttcacaggaaccaataaatccctcagagaagtaaa

SEQ ID NO: 445147 - DNA, 622 bp, Homo sapiens
ggggatgcaacccttaaatttgcgttttttcatgaccctccctctgatttaagtacggggatactgctgacctggtgctgccttgccaccctttacatgctgtgtcatttgggttaagacatttgacaacttactaatcttctgactatgtgttcccacagggaggtggggaagacagggctccagctaccacaggacgggctctgggtatagccgttccagtcagggacagccgtggagagaccagggaccaggaagcagacagtatgagcatgaccagtggagaaggtactagtcaacctccagaaagagtatggagagaaaaagaggcacacctggacgcagagccctgccagcgccctcctctgctgttgcagctgcaaggagaccatgcctgtgggagccaggcctcgcttgcatgaagaaggaacgatgcctttttcaatggtgtctccctcccattgtgcagaagagcttttgttggcttctctcccgagcttgtgcctgattctgtggcccaaaacaatcattgttaacatcttcatgtgtttcattctgatctttcattcatatatatgatgcctagctaatttcattttaaaataaatgggaatctgttgta

SEQ ID NO: 445148 - DNA, 3181 bp, Homo sapiens
agcggaagcggaagtgaacgaggcggctgtggcggtggctgaggcggctgggcctagggtgcagcgggcgcgtctgcggctggtgttggcgcatctctagatcctttcccggagttcagttatgggtgtgagaggtttgcaaggatttgtgggaagtacctgcccacatatatgtacagtagtaaatttcaaagaactggcagagcaccaccgaagcaagtatcctggatgtacccctaccattgtggttgatgccatgtgttgtctcagatattggtatactccagaatcttggatctgcggtggccagtggcgagaatacttttctgctttgcgagattttgttaaaacttttacggcagctgggatcaagttgatattcttctttgatggcatggtggagcaggataagagagatgaatgggtgaaacgaaggctcaagaacaacagggagatatccaggatttttcattacatcaagtcacacaaggagcagccaggcagaaatatgttcttcatcccctcagggctagctgtgtttacacgatttgctctaaagacactgggccaggaaactttgtgttctttgcaggaagcagattatgaggtagcttcctatggcctccagcataactgtcttgggattctgggggaagacactgattacctaatctatgacacttgtccctacttttcaattagcgagctctgcctagagagcctggacaccgtcatgctctgcagagagaagctctgtgagagtctgggcctctgtgtggccgaccttcctcttctggcctgcctccttggcaacgacataatcccagagggcatgtttgaaagctttaggtacaaatgcttatcgtcctacacctctgtaaaagagaactttgacaaaaaaggtaacatcatattagctgtgtcagaccatatatcgaaagttctttacttgtatcaaggtgagaaaaaattagaagagatattacctctgggaccaaacaaagctcttttttataaaggaatggcatcatatcttttaccaggacaaaaatctccatggtttttccaaaaacccaaaggtgtaataactttggacaaacaagtaatatccacgagttcagacgccgaatccagggaagaagttcccatgtgttcagatgctgaatccaggcaagaagttcccatgtgtacaggccctgaatccaggcgagaagttcccgtgtatacagattctgaacccaggcaagaagttcccatgtgttcagaccctgaacccaggcaagaagttcccacgtgtacaggccctgaatccaggcgagaagttcccatgtgttcagaccctgaacccaggcaagaagttcccatgtgtacaggccctgaagccaggcaagaagttcccatgtatacagactctgaacccaggcaagaagttcccatgtatacagactctgaacccaggcaagaagttcccatgtatacaggctctgaacccaggcaagaagttcccatgtatacaggccctgaatccaggcaagaagttcccatgtatacaggccctgaatccaggcaagaagttttaatacggacagaccctgaatctaggcaagaaattatgtgtacaggccatgaatccaaacaggaagttcccatatgtacagatcctatatccaagcaagaagactccatgtgtacacacgctgaaatcaatcaaaaattacctgtagcaacagattttgaatttaagctagaagctctcatgtgtacaaaccctgaaattaaacaagaagaccccacaaatgtggggcctgaagtaaagcaacaagtaaccatggtttcagacactgaaatcttaaaggttgctagaacacatcacgtccaagcagaaagctacctggtgtacaacatcatgagcagtggagagattgaatgcagcaacaccctagaagatgagcttgaccaggccttacccagccaggccttcatttaccgtcccattcgacagcgggtctactcactcttactggaggactgtcaagatgtcaccagcacctgcctagctgtcaaggagtggtttgtgtatcctgggaacccactgaggcacccggacctcgtcaggccgctgcagatgaccattccagggggaacgcctagtttgaaaatattatggctgaaccaagagccagaaatacaggttcggcgcttggacacactcctagcctgtttcaatctttcctcctcaagagaagagctgcaggctgtcgaaagcccatttcaagctttgtgctgcctcttgatctacctctttgtccaggtggacacgctttgcctggaggatttgcatgcgtttattgcgcaggccttgtgcctccaaggaaaatccacctcgcagcttgtaaatctacagcctgattacatcaaccccagagccgtgcagctgggctcccttctcgtccgcggcctcaccactctggttttagtcaacagcgcatgtggcttcccctggaagacgagtgatttcatgccctggaatgtatttgacgggaagctttttcatcagaagtacttgcaatctgaaaagggttatgctgtggaggttcttttagaacaaaatagatctcggctcaccaaattccacaacctgaaggcagtcgtctgcaaggcctgcatgaaggagaacagacgcatcactggccgagcccactggggctcacaccacgcagggaggtggggaagacagggctccagctaccacaggacgggctctgggtatagccgttccagtcagggacagccgtggagagaccagggaccaggaagcagacagtatgagcatgaccagtggagaaggtactagtcaacctccagaaagagtatggagagaaaaagaggcacacctggacgcagagccctgccagcgccctcctctgctgttgcagctgcaaggagaccatgcctgtgggagccaggcctcgcttgcatgaagaaggaacgatgcctttttcaatggtgtctccctcccattgtgcagaagagcttttgttggcttctctcccgagcttgtgcctgattctgtggcccaaaacaatcattgttaacatcttcatgtgtttcattctgatctttcattcatatatatgatgcctagctaatttcattttaaaataaatgggaatctgttgta

SEQ ID NO: 445149 - DNA, 1334 bp, Homo sapiens
cagtggtacttacaatttttatagaaactaaattttgactattttctaatgaagtctgcatacaaatgggcagaaatcagtgtcctgtcatattattccaagttaatgaggcaaactacattttccttttgtattattccattaatgaggcgaactacattttaagagctatgatagattagtaagatcatttcgtgatttggaaactgttcccttttttgttctcaaagtaattttcttcacaaatccaacttaaggttctatggttcagtccctcattttgctgaagaaccttatgccccacatggctcacccaaaaccaagctgattcttcgttgcagaacttagactgaagcctccaccgcttggccccagccccatgttcttgggtaatgctgagcttgcacctcctgtgttggggaagggctgtagggacgtggtagggccctgcagtcctgactgccgttgtctgcttccacgggccgcacagccaggccactgcaacaccaagctactcggtgtgttggcctctggacccaagctgacagctgtgagctcacaactgctccaagcttggagtcacctgttattctcagtgtgtggtcacaagtgctcatgctggaggtgagctggagaccacgtgtgtaagatgagcacacacgggctgaccctggccagatgtgaggagcatgtcaccagtcctgcagaccagtagctcagagacaagggcagcagtcacaaagggatgacatcacggcaggaaggtgggtcttgggggactttcagtagctagactggggtaaaacaccacaatgggaggacactggggaaggtgagtcagccttagagaccacagaggctgctgaatgccagggaggtggggaagacagggctccagctaccacaggacgggctctgggtatagccgttccagtcagggacagccgtggagagaccagggaccaggaagcagacagtatgagcatgaccagtggagaaggtactagtcaacctccagaaagagtatggagagaaaaagaggcacacctggacgcagagccctgccagcgccctcctctgctgttgcagctgcaaggagaccatgcctgtgggagccaggcctcgcttgcatgaagaaggaacgatgcctttttcaatggtgtctccctcccattgtgcagaagagcttttgttggcttctctcccgagcttgtgcctgattctgtggcccaaaacaatcattgttaacatcttcatgtgtttcattctgatctttcattcatatatatgatgcctagctaatttcattttaaaataaatgggaatctgttgta

SEQ ID NO: 445150 - DNA, 3445 bp, Homo sapiens
agcggaagcggaagtgaacgaggcggctgtggcggtggctgaggcggctgggcctagggtgcagcgggcgcgtctgcggctggtgttggcgcatctctagatcctttcccggagttcagttatgggtgtgagaggtttgcaaggatttgtgggaagtacctgcccacatatatgtacagtagtaaatttcaaagaactggcagagcaccaccgaagcaagtatcctggatgtacccctaccattgtggttgatgccatgtgttgtctcagatattggtatactccagaatcttggatctgcggtggccagtggcgagaatacttttctgctttgcgagattttgttaaaacttttacggcagctgggatcaagttgatattcttctttgatggcatggtggagcaggataagagagatgaatgggtgaaacgaaggctcaagaacaacagggagatatccaggatttttcattacatcaagtcacacaaggagcagccaggcagaaatatgttcttcatcccctcagggctagctgtgtttacacgatttgctctaaagacactgggccaggaaactttgtgttctttgcaggaagcagattatgaggtagcttcctatggcctccagcataactgtcttgggattctgggggaagacactgattacctaatctatgacacttgtccctacttttcaattagcgagctctgcctagagagcctggacaccgtcatgctctgcagagagaagctctgtgagagtctgggcctctgtgtggccgaccttcctcttctggcctgcctccttggcaacgacataatcccagagggcatgtttgaaagctttaggtacaaatgcttatcgtcctacacctctgtaaaagagaactttgacaaaaaaggtaacatcatattagctgtgtcagaccatatatcgaaagttctttacttgtatcaaggtgagaaaaaattagaagagatattacctctgggaccaaacaaagctcttttttataaaggaatggcatcatatcttttaccaggacaaaaatctccatggtttttccaaaaacccaaaggtgtaataactttggacaaacaagtaatatccacgagttcagacgccgaatccagggaagaagttcccatgtgttcagatgctgaatccaggcaagaagttcccatgtgtacaggccctgaatccaggcgagaagttcccgtgtatacagattctgaacccaggcaagaagttcccatgtgttcagaccctgaacccaggcaagaagttcccacgtgtacaggccctgaatccaggcgagaagttcccatgtgttcagaccctgaacccaggcaagaagttcccatgtgtacaggccctgaagccaggcaagaagttcccatgtatacagactctgaacccaggcaagaagttcccatgtatacagactctgaacccaggcaagaagttcccatgtatacaggctctgaacccaggcaagaagttcccatgtatacaggccctgaatccaggcaagaagttcccatgtatacaggccctgaatccaggcaagaagttttaatacggacagaccctgaatctaggcaagaaattatgtgtacaggccatgaatccaaacaggaagttcccatatgtacagatcctatatccaagcaagaagactccatgtgtacacacgctgaaatcaatcaaaaattacctgtagcaacagattttgaatttaagctagaagctctcatgtgtacaaaccctgaaattaaacaagaagaccccacaaatgtggggcctgaagtaaagcaacaagtaaccatggtttcagacactgaaatcttaaaggttgctagaacacatcacgtccaagcagaaagctacctggtgtacaacatcatgagcagtggagagattgaatgcagcaacaccctagaagatgagcttgaccaggccttacccagccaggccttcatttaccgtcccattcgacagcgggtctactcactcttactggaggactgtcaagatgtcaccagcacctgcctagctgtcaaggagtggtttgtgtatcctgggaacccactgaggcacccggacctcgtcaggccgctgcagatgaccattccagggggaacgcctagtttgaaaatattatggctgaaccaagagccagaaatacaggttcggcgcttggacacactcctagcctgtttcaatctttcctcctcaagagaagagctgcaggctgtcgaaagcccatttcaagctttgtgctgcctcttgatctacctctttgtccaggtggacacgctttgcctggaggatttgcatgcgtttattgcgcaggccttgtgcctccaaggaaaatccacctcgcagcttgtaaatctacagcctgattacatcaaccccagagccgtgcagctgggctcccttctcgtccgcggcctcaccactctggttttagtcaacagcgcatgtggcttcccctggaagacgagtgatttcatgccctggaatgtatttgacgggaagctttttcatcagaagtacttgcaatctgaaaagggttatgctgtggaggttcttttagaacaaaatagatctcggctcaccaaattccacaacctgaaggcagtcgtctgcaaggcctgcatgaaggagaacagacgcatcactggccgagcccactggggctcacaccacgcagggaggtggggaagacagggctccagctaccacaggacgggctctgggtatagccgttccagtcagggacagccgtggagagaccagggaccaggaagcagacagtatgagcatgaccagtggagaaggtactagtcaacctccagaaagagtatggagagaaaaagaggcacacctggacgcagagccctgccagcgccctcctctgctgttgcagctgcaaggagaccatgcctgtgggagccaggcctcgcttgcatgaagaaggaacgatgcctttttcaatggtgtctccctcccattgtgcagaagagcttttgttggcttctctcccgagcttgtgcctgattctgtggcccaaaacaatcattgttaacatcttcatgtgtttcattctgatctttcattcatatatatgatgcctagctaatttcattttaaaataaatgggaatctgttgtattctgattttttattagcaacactagattatgaggggttatctcctgttattaaaaagtcagaaaacactatacagtagtcctcccttatctgcgggggagacatcccaagaccctcagtggatgcctgagactggatagtatggaatcctacatatctataccgtggctttttcctctacgtacataccatgataaagcttaacaaagaacagtgagagattaacagcaaccaataactaataaaagctatgtgaatgtggtc

SEQ ID NO: 445151 - DNA, 3342 bp, Homo sapiens
agcggaagcggaagtgaacgaggcggctgtggcggtggctgaggcggctgggcctagggtgcagcgggcgcgtctgcggctggtgttggcgcatctctagatcctttcccggagttcagttatgggtgtgagaggtttgcaaggatttgtgggaagtacctgcccacatatatgtacagtagtaaatttcaaagaactggcagagcaccaccgaagcaagtatcctggatgtacccctaccattgtggttgatgccatgtgttgtctcagatattggtatactccagaatcttggatctgcggtggccagtggcgagaatacttttctgctttgcgagattttgttaaaacttttacggcagctgggatcaagttgatattcttctttgatggcatggtggagcaggataagagagatgaatgggtgaaacgaaggctcaagaacaacagggagatatccaggatttttcattacatcaagtcacacaaggagcagccaggcagaaatatgttcttcatcccctcagggctagctgtgtttacacgatttgctctaaagacactgggccaggaaactttgtgttctttgcaggaagcagattatgaggtagcttcctatggcctccagcataactgtcttgggattctgggggaagacactgattacctaatctatgacacttgtccctacttttcaattagcgagctctgcctagagagcctggacaccgtcatgctctgcagagagaagctctgtgagagtctgggcctctgtgtggccgaccttcctcttctggcctgcctccttggcaacgacataatcccagagggcatgtttgaaagctttaggtacaaatgcttatcgtcctacacctctgtaaaagagaactttgacaaaaaaggtaacatcatattagctgtgtcagaccatatatcgaaagttctttacttgtatcaaggtgagaaaaaattagaagagatattacctctgggaccaaacaaagctcttttttataaaggaatggcatcatatcttttaccaggacaaaaatctccatggtttttccaaaaacccaaaggtgtaataactttggacaaacaagtaatatccacgagttcagacgccgaatccagggaagaagttcccatgtgttcagatgctgaatccaggcaagaagttcccatgtgtacaggccctgaatccaggcgagaagttcccgtgtatacagattctgaacccaggcaagaagttcccatgtgttcagaccctgaacccaggcaagaagttcccacgtgtacaggccctgaatccaggcgagaagttcccatgtgttcagaccctgaacccaggcaagaagttcccatgtgtacaggccctgaagccaggcaagaagttcccatgtatacagactctgaacccaggcaagaagttcccatgtatacagactctgaacccaggcaagaagttcccatgtatacaggctctgaacccaggcaagaagttcccatgtatacaggccctgaatccaggcaagaagttcccatgtatacaggccctgaatccaggcaagaagttttaatacggacagaccctgaatctaggcaagaaattatgtgtacaggccatgaatccaaacaggaagttcccatatgtacagatcctatatccaagcaagaagactccatgtgtacacacgctgaaatcaatcaaaaattacctgtagcaacagattttgaatttaagctagaagctctcatgtgtacaaaccctgaaattaaacaagaagaccccacaaatgtggggcctgaagtaaagcaacaagtaaccatggtttcagacactgaaatcttaaaggttgctagaacacatcacgtccaagcagaaagctacctggtgtacaacatcatgagcagtggagagattgaatgcagcaacaccctagaagatgagcttgaccaggccttacccagccaggccttcatttaccgtcccattcgacagcgggtctactcactcttactggaggactgtcaagatgtcaccagcacctgcctagctgtcaaggagtggtttgtgtatcctgggaacccactgaggcacccggacctcgtcaggccgctgcagatgaccattccagggggaacgcctagtttgaaaatattatggctgaaccaagagccagaaatacaggttcggcgcttggacacactcctagcctgtttcaatctttcctcctcaagagaagagctgcaggctgtcgaaagcccatttcaagctttgtgctgcctcttgatctacctctttgtccaggtggacacgctttgcctggaggatttgcatgcgtttattgcgcaggccttgtgcctccaaggaaaatccacctcgcagcttgtaaatctacagcctgattacatcaaccccagagccgtgcagctgggctcccttctcgtccgcggcctcaccactctggttttagtcaacagcgcatgtggcttcccctggaagacgagtgatttcatgccctggaatgtatttgacgggaagctttttcatcagaagtacttgcaatctgaaaagggttatgctgtggaggttcttttagaacaaaatagatctcggctcaccaaattccacaacctgaaggcagtcgtctgcaaggcctgcatgaaggagaacagacgcatcactggccgagcccactggggctcacaccacgcagggaggtggggaagacagggctccagctaccacaggacgggctctgggtatagccgttccagtcagggacagccgtggagagaccagggaccaggaagcagacagtatgagcatgaccagtggagaaggtactagtcaacctccaggtaagttcatcacctgcatctccagaagaaatcagtcacatgtctgtcttaataacataaatcttccatatcaagtaccaaagtaaacagaactcagatattgaatcctgctgacctggtgccgagttaacttggtttcaaaacactcttgcttcctccagaaagagtatggagagaaaaagaggcacacctggacgcagagccctgccagcgccctcctctgctgttgcagctgcaaggagaccatgcctgtgggagccaggcctcgcttgcatgaagaaggaacgatgcctttttcaatggtgtctccctcccattgtgcagaagagcttttgttggcttctctcccgagcttgtgcctgattctgtggcccaaaacaatcattgttaacatcttcatgtgtttcattctgatctttcattcatatatatgatgcctagctaatttcattttaaaataaatgggaatctgttgta

SEQ ID NO: 445152 - DNA, 1598 bp, Homo sapiens
cagtggtacttacaatttttatagaaactaaattttgactattttctaatgaagtctgcatacaaatgggcagaaatcagtgtcctgtcatattattccaagttaatgaggcaaactacattttccttttgtattattccattaatgaggcgaactacattttaagagctatgatagattagtaagatcatttcgtgatttggaaactgttcccttttttgttctcaaagtaattttcttcacaaatccaacttaaggttctatggttcagtccctcattttgctgaagaaccttatgccccacatggctcacccaaaaccaagctgattcttcgttgcagaacttagactgaagcctccaccgcttggccccagccccatgttcttgggtaatgctgagcttgcacctcctgtgttggggaagggctgtagggacgtggtagggccctgcagtcctgactgccgttgtctgcttccacgggccgcacagccaggccactgcaacaccaagctactcggtgtgttggcctctggacccaagctgacagctgtgagctcacaactgctccaagcttggagtcacctgttattctcagtgtgtggtcacaagtgctcatgctggaggtgagctggagaccacgtgtgtaagatgagcacacacgggctgaccctggccagatgtgaggagcatgtcaccagtcctgcagaccagtagctcagagacaagggcagcagtcacaaagggatgacatcacggcaggaaggtgggtcttgggggactttcagtagctagactggggtaaaacaccacaatgggaggacactggggaaggtgagtcagccttagagaccacagaggctgctgaatgccagggaggtggggaagacagggctccagctaccacaggacgggctctgggtatagccgttccagtcagggacagccgtggagagaccagggaccaggaagcagacagtatgagcatgaccagtggagaaggtactagtcaacctccagaaagagtatggagagaaaaagaggcacacctggacgcagagccctgccagcgccctcctctgctgttgcagctgcaaggagaccatgcctgtgggagccaggcctcgcttgcatgaagaaggaacgatgcctttttcaatggtgtctccctcccattgtgcagaagagcttttgttggcttctctcccgagcttgtgcctgattctgtggcccaaaacaatcattgttaacatcttcatgtgtttcattctgatctttcattcatatatatgatgcctagctaatttcattttaaaataaatgggaatctgttgtattctgattttttattagcaacactagattatgaggggttatctcctgttattaaaaagtcagaaaacactatacagtagtcctcccttatctgcgggggagacatcccaagaccctcagtggatgcctgagactggatagtatggaatcctacatatctataccgtggctttttcctctacgtacataccatgataaagcttaacaaagaacagtgagagattaacagcaaccaataactaataaaagctatgtgaatgtggtc

SEQ ID NO: 445153 - DNA, 391 bp, Homo sapiens
gttttcatgtctgtttactgcaggaagcagacagtatgagcatgaccagtggagaaggtactagtcaacctccagaaagagtatggagagaaaaagaggcacacctggacgcagagccctgccagcgccctcctctgctgttgcagctgcaaggagaccatgcctgtgggagccaggcctcgcttgcatgaagaaggaacgatgcctttttcaatggtgtctccctcccattgtgcagaagagcttttgttggcttctctcccgagcttgtgcctgattctgtggcccaaaacaatcattgttaacatcttcatgtgtttcattctgatctttcattcatatatatgatgcctagctaatttcattttaaaataaatgggaatctgttgta

SEQ ID NO: 445154 - DNA, 3251 bp, Homo sapiens
agcggaagcggaagtgaacgaggcggctgtggcggtggctgaggcggctgggcctagggtgcagcgggcgcgtctgcggctggtgttggcgcatctctagatcctttcccggagttcagttatgggtgtgagaggtttgcaaggatttgtgggaagtacctgcccacatatatgtacagtagtaaatttcaaagaactggcagagcaccaccgaagcaagtatcctggatgtacccctaccattgtggttgatgccatgtgttgtctcagatattggtatactccagaatcttggatctgcggtggccagtggcgagaatacttttctgctttgcgagattttgttaaaacttttacggcagctgggatcaagttgatattcttctttgatggcatggtggagcaggataagagagatgaatgggtgaaacgaaggctcaagaacaacagggagatatccaggatttttcattacatcaagtcacacaaggagcagccaggcagaaatatgttcttcatcccctcagggctagctgtgtttacacgatttgctctaaagacactgggccaggaaactttgtgttctttgcaggaagcagattatgaggtagcttcctatggcctccagcataactgtcttgggattctgggggaagacactgattacctaatctatgacacttgtccctacttttcaattagcgagctctgcctagagagcctggacaccgtcatgctctgcagagagaagctctgtgagagtctgggcctctgtgtggccgaccttcctcttctggcctgcctccttggcaacgacataatcccagagggcatgtttgaaagctttaggtacaaatgcttatcgtcctacacctctgtaaaagagaactttgacaaaaaaggtaacatcatattagctgtgtcagaccatatatcgaaagttctttacttgtatcaaggtgagaaaaaattagaagagatattacctctgggaccaaacaaagctcttttttataaaggaatggcatcatatcttttaccaggacaaaaatctccatggtttttccaaaaacccaaaggtgtaataactttggacaaacaagtaatatccacgagttcagacgccgaatccagggaagaagttcccatgtgttcagatgctgaatccaggcaagaagttcccatgtgtacaggccctgaatccaggcgagaagttcccgtgtatacagattctgaacccaggcaagaagttcccatgtgttcagaccctgaacccaggcaagaagttcccacgtgtacaggccctgaatccaggcgagaagttcccatgtgttcagaccctgaacccaggcaagaagttcccatgtgtacaggccctgaagccaggcaagaagttcccatgtatacagactctgaacccaggcaagaagttcccatgtatacagactctgaacccaggcaagaagttcccatgtatacaggctctgaacccaggcaagaagttcccatgtatacaggccctgaatccaggcaagaagttcccatgtatacaggccctgaatccaggcaagaagttttaatacggacagaccctgaatctaggcaagaaattatgtgtacaggccatgaatccaaacaggaagttcccatatgtacagatcctatatccaagcaagaagactccatgtgtacacacgctgaaatcaatcaaaaattacctgtagcaacagattttgaatttaagctagaagctctcatgtgtacaaaccctgaaattaaacaagaagaccccacaaatgtggggcctgaagtaaagcaacaagtaaccatggtttcagacactgaaatcttaaaggttgctagaacacatcacgtccaagcagaaagctacctggtgtacaacatcatgagcagtggagagattgaatgcagcaacaccctagaagatgagcttgaccaggccttacccagccaggccttcatttaccgtcccattcgacagcgggtctactcactcttactggaggactgtcaagatgtcaccagcacctgcctagctgtcaaggagtggtttgtgtatcctgggaacccactgaggcacccggacctcgtcaggccgctgcagatgaccattccagggggaacgcctagtttgaaaatattatggctgaaccaagagccagaaatacaggttcggcgcttggacacactcctagcctgtttcaatctttcctcctcaagagaagagctgcaggctgtcgaaagcccatttcaagctttgtgctgcctcttgatctacctctttgtccaggtggacacgctttgcctggaggatttgcatgcgtttattgcgcaggccttgtgcctccaaggaaaatccacctcgcagcttgtaaatctacagcctgattacatcaaccccagagccgtgcagctgggctcccttctcgtccgcggcctcaccactctggttttagtcaacagcgcatgtggcttcccctggaagacgagtgatttcatgccctggaatgtatttgacgggaagctttttcatcagaagtacttgcaatctgaaaagggttatgctgtggaggttcttttagaacaaaatagatctcggctcaccaaattccacaacctgaaggcagtcgtctgcaaggcctgcatgaaggagaacagacgcatcactggccgagcccactggggctcacaccacgcagggaggtggggaagacagggctccagctaccacaggacgggctctgggtatagccgttccagtcagggacagccgtggagagaccagggaccaggaagcagacagtatgagcatgaccagtggagaaggtactagtcaacctccagaaagagtatggagagaaaaagaggcacacctggacgcagagccctgccagcgccctcctctgctgttgcagctgcaaggagaccatgcctgtgggagccaggcctcgcttgcatgaagaaggaacgatgcctttttcaatggtgtctccctcccattgtgcagaagagcttttgttggcttctctcccgagcttgtgcctgattctgtggcccaaaacaatcattgttaacatcttcatgtgtttcattctgatctttcattcatatatatgatgcctagctaatttcattttaaaataaatgggaatctgttgtattctgattttttattagcaacactagattatgaggggttatctcctgttattaaaaagtcagaaaacact

SEQ ID NO: 445155 - DNA, 1910 bp, Homo sapiens
agcggaagcggaagtgaacgaggcggctgtggcggtggctgaggcggctgggcctagggtgcagcgggcgcgtctgcggctggtgttggcgcatctctagatcctttcccggagttcagttatgggtgtgagaggtttgcaaggatttgtgggaagtacctgcccacatatatgtacagtagtaaatttcaaagaactggcagagcaccaccgaagcaagtatcctggatgtacccctaccattgtggttgatgccatgtgttgtctcagatattggtatactccagaatcttggatctgcggtggccagtggcgagaatacttttctgctttgcgagattttgttaaaacttttacggcagctgggatcaagttgatattcttctttgatggcatggtggagcaggataagagagatgaatgggtgaaacgaaggctcaagaacaacagggagatatccaggatttttcattacatcaagtcacacaaggagcagccaggcagaaatatgttcttcatcccctcagggctagctgtgtttacacgatttgctctaaagacactgggccaggaaactttgtgttctttgcaggaagcagattatgaggtagcttcctatggcctccagcataactgtcttgggattctgggggaagacactgattacctaatctatgacacttgtccctacttttcaattagcgagctctgcctagagagcctggacaccgtcatgctctgcagagagaagctctgtgagagtctgggcctctgtgtggccgaccttcctcttctggcctgcctccttggcaacgacataatcccagagggcatgtttgaaagctttaggtacaaatgcttatcgtcctacacctctgtaaaagagaactttgacaaaaaaggtaacatcatattagctgtgtcagaccatatatcgaaagttctttacttgtatcaaggtgagaaaaaattagaagagatattacctctgggaccaaacaaagctcttttttataaaggaatggcatcatatcttttaccaggacaaaaatctccatggtttttccaaaaacccaaaggtgtaataactttggacaaacaagtaatatccacgagttcagacgccgaatccagggaagaagttcccatgtgttcagatgctgaatccaggcaagaagttcccatgtgtacaggccctgaatccaggcgagaagttcccgtgtatacagattctgaacccaggcaagaagttcccatgtgttcagaccctgaacccaggcaagaagttcccacgtgtacaggccctgaatccaggcgagaagttcccatgtgttcagaccctgaacccaggcaagaagttcccatgtgtacaggccctgaagccaggcaagaagttcccatgtatacagactctgaacccaggcaagaagttcccatgtatacagactctgaacccaggcaagaagttcccatgtatacaggctctgaacccaggcaagaagttcccatgtatacaggccctgaatccaggcaagaagttcccaaaacaatcattgttaacatcttcatgtgtttcattctgatctttcattcatatatatgatgcctagctaatttcattttaaaataaatgggaatctgttgtattctgattttttattagcaacactagattatgaggggttatctcctgttattaaaaagtcagaaaacactatacagtagtcctcccttatctgcgggggagacatcccaagaccctcagtggatgcctgagactggatagtatggaatcctacatatctataccgtggctttttcctctacgtacataccatgataaagcttaacaaagaacagtgagagattaacagcaaccaataactaataaaagctatgtgaatgtggtc

SEQ ID NO: 445156 - DNA, 672 bp, Homo sapiens
caatgtcaatagttctgaggtctcaacctactgcctaggtttgaatcctggctctggtacttcctaactgtgtggctttgagcacattactttacttctctgagcttcaggttccttatctgtaaaatggaattgttttgagtattaacacacacactcattatacagattttagaatagagtctggcatgtaataaatgatcagtaaaaatgagctgctgttgtagtaattcttttaaactatggagtgaatatttacctttaaaaacggataccaaatttttattatgtttaccatgtaagtgtggtgttttaaagtataaacacaataaagatcttttgacagttatgaatagtattataaattaacatttttcttgtaataaagggaacatttttgtcttggtgcttgtctttgtttcctacctttttaattgctttaaattagtgttatatttttgttcacttttttatctttttttaaatagctggggctctcagtgcacataggtatttccgagataatccttccgaattatgctgtatcattgttgatagtggatattcctttacacatatagttccttattgtagaagtaaaaagaaaaaagaagcaattattcggtgagttgtatttaattttcatgttgtttctaaagattaaacagaatg

SEQ ID NO: 445157 - DNA, 554 bp, Homo sapiens
  misc_feature (521)..(521): n is a, c, g, or t
  misc_feature (542)..(542): n is a, c, g, or t
accatagagtaccggaaaaagctcgagcagaggggtcggaaagggaaaacaactacggctgcggtgtggttggtggtgagatgacgaccttagtgctggataatggagcttacaacgccaaaatcggttacagccatgaaaatgtgtcggttattcctaattgtcagttccggtcaaaaacagcacgtcttaaaacttttactgccaaccagatagatgaaataaaagacccttctggactcttttacatcctcccttttcaaaagggctacttggtgaattgggatgttcagagacaagtttgggattacctttttggaaaagaaatgtatcaggttgattttttagatactaatattattatcactgaaccatactttaacttcacttcaattcaagaatcaatgaatgaaattctatttgaagaataccagtttcaagcagtattaagagtaaatgttccttattgtagaagtaaaaagaaaaaagaagcaattattcgataaatgtgggaagactcntaaccctccatctggagatcnatatcttacggc

SEQ ID NO: 445158 - DNA, 1469 bp, Homo sapiens
accatagagtaccggaaaaagctcgagcagaggggtcggaaagggaaaacaactacggctgcggtgtggttggtggtgagatgacgaccttagtgctggataatggagcttacaacgccaaaatcggttacagccatgaaaatgtgtcggttattcctaattgtcagttccggtcaaaaacagcacgtcttaaaacttttactgccaaccagatagatgaaataaaagacccttctggactcttttacatcctcccttttcaaaagggctacttggtgaattgggatgttcagagacaagtttgggattacctttttggaaaagaaatgtatcaggttgattttttagatactaatattattatcactgaaccatactttaacttcacttcaattcaagaatcaatgaatgaaattctatttgaagaataccagtttcaagcagtattaagagtaaatgctggggctctcagtgcacataggtatttccgagataatccttccgaattatgctgtatcattgttgatagtggatattcctttacacatatagttccttattgtagaagtaaaaagaaaaaagaagcaattattcggataaatgtgggaggaaaactcttaaccaatcatctaaaggagatcatatcttacaggcagctacatgttatggatgaaacacatgtgattaatcaagtgaaagaagatgtatgctatgtgtctcaggatttttatagagacatggatattgcaaagttgaaaggagaagaaaatacagtaatgatagactatgtcttgcctgacttcagtacaattaaaaagggcttttgtaagccctattacttatgcctgggaaggtggaaaattgatatcagagaatgatgattttgaagatatggtggtaacaagagaagattacgaagaaaatggacatagcgtctgtgaagagaaatttgatatttaagcaacatttttgaatgaaagttgtgaccataaggtttaatttcaaagttccttttaaaagaggttaaggaactgtgttaccttttgtcctaagaaaaaggcttgaatttatgtaaatactttgatcgattgctaattttcaaaggcttcttaggtaggttactacagtaaactgtaactcagtccacattttcatttaggagctagactaccataacaatgcttatgctgtttccaagggtaggttatttttcattaaaagaagaatgaatgcattttaagtttaattcttcatagctgaaagcacaaatttaacggcttcactggacagttttccttagaaggtagttttgtgtgactgtgactaaactattttattttaaaatgtcattcttatttatacattctaaagttggaaagactgatcttatatgtgtataatgtttattttgtacctagagtacatttaaaagggtggagactaagctaataaagtttttttggccacta

SEQ ID NO: 445159 - DNA, 1921 bp, Homo sapiens
accatagagtaccggaaaaagctcgagcagaggggtcggaaagggaaaacaactacggctgcggtgtggttggtggtgagatgacgaccttagtgctggataatggagcttacaacgccaaaatcggttacagccatgaaaatgtgtcgtaagtactttctttctccgagggacaagatatatacgcctagtggtttcatgtgctacgtttcatctccggacatcaatgaactgcagacacccccgcgcggccctgacttagccagagggattccctggttggagctggggttattcctaattgtcagttccggtcaaaaacagcacgtcttaaaacttttactgccaaccagatagatgaaataaaagacccttctggactcttttacatcctcccttttcaaaagggctacttggtgaattgggatgttcagagacaagtttgggattacctttttggaaaagaaatgtatcaggttgattttttagatactaatattattatcactgaaccatactttaacttcacttcaattcaagaatcaatgaatgaaattctatttgaagaataccagtttcaagcagtattaagagtaaatgctggggctctcagtgcacataggtatttccgagataatccttccgaattatgctgtatcattgttgatagtggatattcctttacacatatagttccttattgtagaagtaaaaagaaaaaagaagcaattattcggataaatgtgggaggaaaactcttaaccaatcatctaaaggagatcatatcttacaggcagctacatgttatggatgaaacacatgtgattaatcaagtgaaagaagatgtatgctatgtgtctcaggatttttatagagacatggatattgcaaagttgaaaggagaagaaaatacagtaatgatagactatgtcttgcctgacttcagtacaattaaaaagggcttttgtaagccaagggaagagatggtgttgagtggaaaatacaaatctggggaacaaattcttcgtttggccaatgagagatttgctgttccggaaatactctttaatccttctgatataggcattcaagaaatgggaattccagaagctattgtctattcaattcaaaatctacctgaagaaatgcagccgcatttttttaagaacattgtcttgacaggaggaaattcccttttcccaggatttagggatcgggtttactcagaagttcgatgtcttactccaacagattatgatgtttctgttgtgctgcctgaaaaccctattacttatgcctgggaaggtggaaaattgatatcagagaatgatgattttgaagatatggtggtaacaagagaagattacgaagaaaatggacatagcgtctgtgaagagaaatttgatatttaagcaacatttttgaatgaaagttgtgaccataaggtttaatttcaaagttccttttaaaagaggttaaggaactgtgttaccttttgtcctaagaaaaaggcttgaatttatgtaaatactttgatcgattgctaattttcaaaggcttcttaggtaggttactacagtaaactgtaactcagtccacattttcatttaggagctagactaccataacaatgcttatgctgtttccaagggtaggttatttttcattaaaagaagaatgaatgcattttaagtttaattcttcatagctgaaagcacaaatttaacggcttcactggacagttttccttagaaggtagttttgtgtgactgtgactaaactattttattttaaaatgtcattcttatttatacattctaaagttggaaagactgatcttatatgtgtataatgtttattttgtacctagagtacatttaaaagggtggagactaagctaataaagtttttttggccacta

SEQ ID NO: 445160 - DNA, 1809 bp, Homo sapiens
caatgtcaatagttctgaggtctcaacctactgcctaggtttgaatcctggctctggtacttcctaactgtgtggctttgagcacattactttacttctctgagcttcaggttccttatctgtaaaatggaattgttttgagtattaacacacacactcattatacagattttagaatagagtctggcatgtaataaatgatcagtaaaaatgagctgctgttgtagtaattcttttaaactatggagtgaatatttacctttaaaaacggataccaaatttttattatgtttaccatgtaagtgtggtgttttaaagtataaacacaataaagatcttttgacagttatgaatagtattataaattaacatttttcttgtaataaagggaacatttttgtcttggtgcttgtctttgtttcctacctttttaattgctttaaattagtgttatatttttgttcacttttttatctttttttaaatagctggggctctcagtgcacataggtatttccgagataatccttccgaattatgctgtatcattgttgatagtggatattcctttacacatatagttccttattgtagaagtaaaaagaaaaaagaagcaattattcggataaatgtgggaggaaaactcttaaccaatcatctaaaggagatcatatcttacaggcagctacatgttatggatgaaacacatgtgattaatcaagtgaaagaagatgtatgctatgtgtctcaggatttttatagagacatggatattgcaaagttgaaaggagaagaaaatacagtaatgatagactatgtcttgcctgacttcagtacaattaaaaagggcttttgtaagccaagggaagagatggtgttgagtggaaaatacaaatctggggaacaaattcttcgtttggccaatgagagatttgctgttccggaaatactctttaatccttctgatataggcattcaagaaatgggaattccagaagctattgtctattcaattcaaaatctacctgaagaaatgcagccgcatttttttaagaacattgtcttgacaggaggaaattcccttttcccaggatttagggatcgggtttactcagaagttcgatgtcttactccaacagattatgatgtttctgttgtgctgcctgaaaaccctattacttatgcctgggaaggtggaaaattgatatcagagaatgatgattttgaagatatggtggtaacaagagaagattacgaagaaaatggacatagcgtctgtgaagagaaatttgatatttaagcaacatttttgaatgaaagttgtgaccataaggtttaatttcaaagttccttttaaaagaggttaaggaactgtgttaccttttgtcctaagaaaaaggcttgaatttatgtaaatactttgatcgattgctaattttcaaaggcttcttaggtaggttactacagtaaactgtaactcagtccacattttcatttaggagctagactaccataacaatgcttatgctgtttccaagggtaggttatttttcattaaaagaagaatgaatgcattttaagtttaattcttcatagctgaaagcacaaatttaacggcttcactggacagttttccttagaaggtagttttgtgtgactgtgactaaactattttattttaaaatgtcattcttatttatacattctaaagttggaaagactgatcttatatgtgtataatgtttattttgtacctagagtacatttaaaagggtggagactaagctaataaagtttttttggccacta

SEQ ID NO: 445161 - DNA, 1687 bp, Homo sapiens
accatagagtaccggaaaaagctcgagcagaggggtcggaaagggaaaacaactacggctgcggtgtggttggtggtgagatgacgaccttagtgctggataatggagcttacaacgccaaaatcggttacagccatgaaaatgtgtcggttattcctaattgtcagttccggtcaaaaacagcacgtcttaaaacttttactgccaaccagatagatgaaataaaagacccttctggactcttttacatcctcccttttcaaaagggctacttggtgaattgggatgttcagagacaagtttgggattacctttttggaaaagaaatgtatcaggttgattttttagatactaatattattatcactgaaccatactttaacttcacttcaattcaagaatcaatgaatgaaattctatttgaagaataccagtttcaagcagtattaagagtaaatgttccttattgtagaagtaaaaagaaaaaagaagcaattattcggataaatgtgggaggaaaactcttaaccaatcatctaaaggagatcatatcttacaggcagctacatgttatggatgaaacacatgtgattaatcaagtgaaagaagatgtatgctatgtgtctcaggatttttatagagacatggatattgcaaagttgaaaggagaagaaaatacagtaatgatagactatgtcttgcctgacttcagtacaattaaaaagggcttttgtaagccaagggaagagatggtgttgagtggaaaatacaaatctggggaacaaattcttcgtttggccaatgagagatttgctgttccggaaatactctttaatccttctgatataggcattcaagaaatgggaattccagaagctattgtctattcaattcaaaatctacctgaagaaatgcagccgcatttttttaagaacattgtcttgacaggaggaaattcccttttcccaggatttagggatcgggtttactcagaagttcgatgtcttactccaacagattatgatgtttctgttgtgctgcctgaaaaccctattacttatgcctgggaaggtggaaaattgatatcagagaatgatgattttgaagatatggtggtaacaagagaagattacgaagaaaatggacatagcgtctgtgaagagaaatttgatatttaagcaacatttttgaatgaaagttgtgaccataaggtttaatttcaaagttccttttaaaagaggttaaggaactgtgttaccttttgtcctaagaaaaaggcttgaatttatgtaaatactttgatcgattgctaattttcaaaggcttcttaggtaggttactacagtaaactgtaactcagtccacattttcatttaggagctagactaccataacaatgcttatgctgtttccaagggtaggttatttttcattaaaagaagaatgaatgcattttaagtttaattcttcatagctgaaagcacaaatttaacggcttcactggacagttttccttagaaggtagttttgtgtgactgtgactaaactattttattttaaaatgtcattcttatttatacattctaaagttggaaagactgatcttatatgtgtataatgtttattttgtacctagagtacatttaaaagggtggagactaagctaataaagtttttttggccacta

SEQ ID NO: 445162 - DNA, 598 bp, Homo sapiens
tgtatcattgttgatagtggatattcctttacacatatagttccttattgtagaagtaaaaagaaaaaagaagcaattattcggtgagttgtatttaattttcatgttgtttctaaagattaaacagaatgatatgtgcgataattaaatttgagttctccccttgcaggataaatgtgggaggaaaactcttaaccaatcatctaaaggagatcatatcttacaggtgatgcttagctttgattctttgggaggatggggctctggggaggaaccttttacagtaatttaagattattccttacttttaaggccagtcattgtgactcacgcctgtaatcccagcacattgggaggccgaggtgggtgcatcacttgaggccaggagttcgagaccagcctgggcaacctggtgaaaccccacttctactaaaaatacaaaaattagccaggtgtggtggtacacacctgtaatcccagctactcgggaggctgaggcatgagaatcatttgaaccaggaggtggaggttgcagtgagccgagatcgcgccacttcactccagcctgggtgacaaagtgagactctctctctctcaa

SEQ ID NO: 445163 - DNA, 1780 bp, Homo sapiens
accatagagtaccggaaaaagctcgagcagaggggtcggaaagggaaaacaactacggctgcggtgtggttggtggtgagatgacgaccttagtgctggataatggagcttacaacgccaaaatcggttacagccatgaaaatgtgtcggttattcctaattgtcagttccggtcaaaaacagcacgtcttaaaacttttactgccaaccagatagatgaaataaaagacccttctggactcttttacatcctcccttttcaaaagggctacttggtgaattgggatgttcagagacaagtttgggattacctttttggaaaagaaatgtatcaggttgattttttagatactaatattattatcactgaaccatactttaacttcacttcaattcaagaatcaatgaatgaaattctatttgaagaataccagtttcaagcagtattaagagtaaatgctggggctctcagtgcacataggtatttccgagataatccttccgaattatgctgtatcattgttgatagtggatattcctttacacatatagttccttattgtagaagtaaaaagaaaaaagaagcaattattcggataaatgtgggaggaaaactcttaaccaatcatctaaaggagatcatatcttacaggcagctacatgttatggatgaaacacatgtgattaatcaagtgaaagaagatgtatgctatgtgtctcaggatttttatagagacatggatattgcaaagttgaaaggagaagaaaatacagtaatgatagactatgtcttgcctgacttcagtacaattaaaaagggcttttgtaagccaagggaagagatggtgttgagtggaaaatacaaatctggggaacaaattcttcgtttggccaatgagagatttgctgttccggaaatactctttaatccttctgatataggcattcaagaaatgggaattccagaagctattgtctattcaattcaaaatctacctgaagaaatgcagccgcatttttttaagaacattgtcttgacaggaggaaattcccttttcccaggatttagggatcgggtttactcagaagttcgatgtcttactccaacagattatgatgtttctgttgtgctgcctgaaaaccctattacttatgcctgggaaggtggaaaattgatatcagagaatgatgattttgaagatatggtggtaacaagagaagattacgaagaaaatggacatagcgtctgtgaagagaaatttgatatttaagcaacatttttgaatgaaagttgtgaccataaggtttaatttcaaagttccttttaaaagaggttaaggaactgtgttaccttttgtcctaagaaaaaggcttgaatttatgtaaatactttgatcgattgctaattttcaaaggcttcttaggtaggttactacagtaaactgtaactcagtccacattttcatttaggagctagactaccataacaatgcttatgctgtttccaagggtaggttatttttcattaaaagaagaatgaatgcattttaagtttaattcttcatagctgaaagcacaaatttaacggcttcactggacagttttccttagaaggtagttttgtgtgactgtgactaaactattttattttaaaatgtcattcttatttatacattctaaagttggaaagactgatcttatatgtgtataatgtttattttgtacctagagtacatttaaaagggtggagactaagctaataaagtttttttggccacta

SEQ ID NO: 445164 - DNA, 1720 bp, Homo sapiens
accatagagtaccggaaaaagctcgagcagaggggtcggaaagggaaaacaactacggctgcggtgtggttggtggtgagatgacgaccttagtgctggataatggagcttacaacgccaaaatcggttacagccatgaaaatgtgtcggttattcctaattgtcagttccggtcaaaaacagcacgtcttaaaacttttactgccaaccagatagatgaaataaaagacccttctggactcttttacatcctcccttttcaaaagggctacttggtgaattgggatgttcagagacaagtttgggattacctttttggaaaagaaatgtatcaggttgattttttagatactaatattattatcactgaaccatactttaacttcacttcaattcaagaatcaatgaatgaaattctatttgaagaataccagtttcaagcagtattaagagtaaatgctggggctctcagtgcacataggtatttccgagataatccttccgaattatgctgtatcattgttgatagtggatattcctttacacatatagttccttattgtagaagtaaaaagaaaaaagaagcaattattcggataaatgtgggaggaaaactcttaaccaatcatctaaaggagatcatatcttacaggcagctacatgttatggatgaaacacatgtgattaatcaagtgaaagaagatgtatgctatgtgtctcaggatttttatagagacatggatattgcaaagttgaaaggagaagaaaatacagtaatgatagactatgtcttgcctgacttcagtacaattaaaaagggcttttgtaagccaagggaagagatggtgttgagtggaaaatacaaatctggggaacaaattcttcgtttggccaatgagagatttgctgttccggaaatactctttaatccttctgatataggcattcaagaaatgggaattccagaagctattgtctattcaattcaaaatctacctgaaggatttagggatcgggtttactcagaagttcgatgtcttactccaacagattatgatgtttctgttgtgctgcctgaaaaccctattacttatgcctgggaaggtggaaaattgatatcagagaatgatgattttgaagatatggtggtaacaagagaagattacgaagaaaatggacatagcgtctgtgaagagaaatttgatatttaagcaacatttttgaatgaaagttgtgaccataaggtttaatttcaaagttccttttaaaagaggttaaggaactgtgttaccttttgtcctaagaaaaaggcttgaatttatgtaaatactttgatcgattgctaattttcaaaggcttcttaggtaggttactacagtaaactgtaactcagtccacattttcatttaggagctagactaccataacaatgcttatgctgtttccaagggtaggttatttttcattaaaagaagaatgaatgcattttaagtttaattcttcatagctgaaagcacaaatttaacggcttcactggacagttttccttagaaggtagttttgtgtgactgtgactaaactattttattttaaaatgtcattcttatttatacattctaaagttggaaagactgatcttatatgtgtataatgtttattttgtacctagagtacatttaaaagggtggagactaagctaataaagtttttttggccacta

SEQ ID NO: 445165 - DNA, 1743 bp, Homo sapiens
accatagagtaccggaaaaagctcgagcagaggggtcggaaagggaaaacaactacggctgcggtgtggttggtggtgagatgacgaccttagtgctggataatggagcttacaacgccaaaatcggttacagccatgaaaatgtgtcggttattcctaattgtcagttccggtcaaaaacagcacgtcttaaaacttttactgccaaccagatagatgaaataaaagacccttctggactcttttacatcctcccttttcaaaagggctacttggtgaattgggatgttcagagacaagtttgggattacctttttggaaaagaaatgtatcagcatactttaacttcacttcaattcaagaatcaatgaatgaaattctatttgaagaataccagtttcaagcagtattaagagtaaatgctggggctctcagtgcacataggtatttccgagataatccttccgaattatgctgtatcattgttgatagtggatattcctttacacatatagttccttattgtagaagtaaaaagaaaaaagaagcaattattcggataaatgtgggaggaaaactcttaaccaatcatctaaaggagatcatatcttacaggcagctacatgttatggatgaaacacatgtgattaatcaagtgaaagaagatgtatgctatgtgtctcaggatttttatagagacatggatattgcaaagttgaaaggagaagaaaatacagtaatgatagactatgtcttgcctgacttcagtacaattaaaaagggcttttgtaagccaagggaagagatggtgttgagtggaaaatacaaatctggggaacaaattcttcgtttggccaatgagagatttgctgttccggaaatactctttaatccttctgatataggcattcaagaaatgggaattccagaagctattgtctattcaattcaaaatctacctgaagaaatgcagccgcatttttttaagaacattgtcttgacaggaggaaattcccttttcccaggatttagggatcgggtttactcagaagttcgatgtcttactccaacagattatgatgtttctgttgtgctgcctgaaaaccctattacttatgcctgggaaggtggaaaattgatatcagagaatgatgattttgaagatatggtggtaacaagagaagattacgaagaaaatggacatagcgtctgtgaagagaaatttgatatttaagcaacatttttgaatgaaagttgtgaccataaggtttaatttcaaagttccttttaaaagaggttaaggaactgtgttaccttttgtcctaagaaaaaggcttgaatttatgtaaatactttgatcgattgctaattttcaaaggcttcttaggtaggttactacagtaaactgtaactcagtccacattttcatttaggagctagactaccataacaatgcttatgctgtttccaagggtaggttatttttcattaaaagaagaatgaatgcattttaagtttaattcttcatagctgaaagcacaaatttaacggcttcactggacagttttccttagaaggtagttttgtgtgactgtgactaaactattttattttaaaatgtcattcttatttatacattctaaagttggaaagactgatcttatatgtgtataatgtttattttgtacctagagtacatttaaaagggtggagactaagctaataaagtttttttggccacta

SEQ ID NO: 445166 - DNA, 1644 bp, Homo sapiens
accatagagtaccggaaaaagctcgagcagaggggtcggaaagggaaaacaactacggctgcggtgtggttggtggtgagatgacgaccttagtgctggataatggagcttacaacgccaaaatcggttacagccatgaaaatgtgtcggttattcctaattgtcagttccggtcaaaaacagcacgtcttaaaacttttactgccaaccagatagatgaaataaaagacccttctggactcttttacatcctcccttttcaaaagggctacttggtgaattgggatgttcagagacaagtttgggattacctttttggaaaagaaatgtatcaggttgattttttagatactaatattattatcactgaaccatactttaacttcacttcaattcaagaatcaatgaatgaaattctatttgaagaataccagtttcaagcagtattaagagtaaatggataaatgtgggaggaaaactcttaaccaatcatctaaaggagatcatatcttacaggcagctacatgttatggatgaaacacatgtgattaatcaagtgaaagaagatgtatgctatgtgtctcaggatttttatagagacatggatattgcaaagttgaaaggagaagaaaatacagtaatgatagactatgtcttgcctgacttcagtacaattaaaaagggcttttgtaagccaagggaagagatggtgttgagtggaaaatacaaatctggggaacaaattcttcgtttggccaatgagagatttgctgttccggaaatactctttaatccttctgatataggcattcaagaaatgggaattccagaagctattgtctattcaattcaaaatctacctgaagaaatgcagccgcatttttttaagaacattgtcttgacaggaggaaattcccttttcccaggatttagggatcgggtttactcagaagttcgatgtcttactccaacagattatgatgtttctgttgtgctgcctgaaaaccctattacttatgcctgggaaggtggaaaattgatatcagagaatgatgattttgaagatatggtggtaacaagagaagattacgaagaaaatggacatagcgtctgtgaagagaaatttgatatttaagcaacatttttgaatgaaagttgtgaccataaggtttaatttcaaagttccttttaaaagaggttaaggaactgtgttaccttttgtcctaagaaaaaggcttgaatttatgtaaatactttgatcgattgctaattttcaaaggcttcttaggtaggttactacagtaaactgtaactcagtccacattttcatttaggagctagactaccataacaatgcttatgctgtttccaagggtaggttatttttcattaaaagaagaatgaatgcattttaagtttaattcttcatagctgaaagcacaaatttaacggcttcactggacagttttccttagaaggtagttttgtgtgactgtgactaaactattttattttaaaatgtcattcttatttatacattctaaagttggaaagactgatcttatatgtgtataatgtttattttgtacctagagtacatttaaaagggtggagactaagctaataaagtttttttggccacta

SEQ ID NO: 445167 - DNA, 2713 bp, Homo sapiens
ggattgtgtgcacactctgcattccagggacacgtggctgaagaaagcaagagtggtgaggcttggagaagtaccctacaagatggtgaaaggcttttctaaccgtgctcggaaagcccgacttgctgagccccagctgcgggaagaaaatgacctgggcctgtttggctactggcagacagaggagtatcagcccccagtggccgtggacgggaaggtgccccggaacgagtttgggaatgtgtacctcttcctgcccagcatgatgcctattggctgtgtccagctgaacctgcccaatctacaccgcgtggcccgcaagctggacatcgactgtgtccaggccatcactggctttgatttccatggcggctactcccatcccgtgactgatggatacatcgtctgcgaggaattcaaagacgtgctcctgactgcctgggaaaatgagcaggcagtcattgaaaggaaggagaaggagaaaaaggagaagcgggctctagggaactggaagttgctggccaaaggtctgctcatcagggagaggctgaagcgtcgctacgggcccaaggtcagtgcaggttctttgcagagaagacaagctcagggtcagtttcttggagatgcagctcagaaaggcctggcccagattctgccccagcctcaagtcagggatagctttgtgttaggacacctcagtcttctgtctctaaggccgcttgtttttaccttgttgggaaaggtgtccctggagtgaggcctcagctggctcttctgccccaagccctgtcccagtgtccccgtttctactgtccacatgagcaatgccatgggtctgatttggcgctgaacacatagggagggccaagtgtcctgcatttggtgcacccttccgccttccagtgttcccagtgcctgtgaccatgctgcaggcctgcagtggcccgctcagtacctctctcacagcacctgccatgtgccaggccaggcttggacacaggtgtgaatttgacatgcagccctcaagggggcccctccctggggcagatggaccctaggcccagttacatggtatagtcagtgctgtgtcagacacagcagaaactgctctggcatgttttgttccctctctccaaccctctgtgctgcctgtttgcctttcaacattttttgtcacgctcctcattccagtccctctggtggagaaaagcccttcatctgactttatgttctgaccagctccttgccgccttctccatccaaaccctccctagccatcccagctggcagggagtgccgcctcagatcttagggctccgagggctgaactgtgcatcttgcccgttcaagacatcatgtgctttggtccagaaatgaggtagcaaatgcaaggcacgaatcacaggcatccccagatgaggcagtgtgctcctagagggcagcttcctgcccagccatcatccttgtgttcccctgcactcagctcgtagcaggtgctccagtgtctgcttggatgcaccccaggctgggacggctcagtaagaagggtctgggctctctccctgccctgtcccatgcccttgtcctcccagagttacacagcttagggcaggctgggaacttgctgcctcttcatggggcttcctggtatctgattactaaccctcgcctgtgtcctcccaccactgccacctgtccagagtgaggcagcagctccccacacagatgcaggaggtggactctcttctgatgaagaggaggggaccagctctcaagcagaagcggccaggatactggctgcctcctggcctcaaaaccgagaagatgaagaaaagcagaagctgaagggtgggcccaagaagaccaaaagggaaaagaaagcagcagcttcccacctgttcccatttgagcagctgtgagctgagcgcccactagaggggcacccaccagttgctgctgccccactacaggccccacacctgccctgggcatgcccagcccctggtggtgggggcttctctgctgagaaggcaaactgaggcagcatgcacggaggcggggtcaggggagacgaggccaagctgaggaggtgctgcaggtcccgtctggctccagcccttgtcagattcacccagggtgaagccttcaaagctttttgctaccaaagcccactcaccctttgagctacagaacactttgctaggagatactcttctgcctcctagacctgttctttccatctttagaaacatcagtttttgtatggaagccaccgggagatttctggatggtggtgcatccgtgaatgcgctgatcgtttcttccagttagagtcttcatctgtccgacaagttcactcgcctcggttgcggacctaggaccatttctctgcaggccacttaccttcccctgagtcaggcttactaatgctgccctcactgcctctttgcagtaggggagagagcagagaagtacaggtcatctgctgggatctagttttccaagtaacattttgtggtgacagaagcctaaaaaaagctaaaatcaggaaagaaaaggaaaaatacgaattgaaaattaaggaaatgttagtaaaatagatcagtgttaaactagattgtattcattactagataaaatgtataaagctctctgtactaaggagaaatgacttttataacattttgagaaaataataaagcatttatctaaa

SEQ ID NO: 445168 - DNA, 2837 bp, Homo sapiens
tggccagatcctcaaccagacctacagcaagtttgacaccaacccgcaccaccatgacgcactgctcaacaactacggcctgctctaccgcttctgcaaggaacccacgcgcgtgggttccctccagagggaacggagccaatgaaactggcatcgtaatgctggattaaaacgttcttcccaggtttagggactcacaggctagtgagcaaaaaacagtcagcatctttccccggcagctgcctggttagtgagctctgttccatgatgggtgaggctggataggggctttcaccccagctttcttcggcagaatctggggaggaagaggcagtgccagcttccacaggcctgccttctgcacggaggatgtgggacactggctgacccgcgacatccttcaggacccctagtgctcagatgtggcccactgtcttccacaaactggggagggaggagaggcagagcaggcagcaggttcgagggttgacatcgcgttgtgtccccacaggactgatggatacatcgtctgcgaggaattcaaagacgtgctcctgactgcctgggaaaatgagcaggcagtcattgaaaggaaggagaaggagaaaaaggagaagcgggctctagggaactggaagttgctggccaaaggtctgctcatcagggagaggctgaagcgtcgctacgggcccaaggtcagtgcaggttctttgcagagaagacaagctcagggtcagtttcttggagatgcagctcagaaaggcctggcccagattctgccccagcctcaagtcagggatagctttgtgttaggacacctcagtcttctgtctctaaggccgcttgtttttaccttgttgggaaaggtgtccctggagtgaggcctcagctggctcttctgccccaagccctgtcccagtgtccccgtttctactgtccacatgagcaatgccatgggtctgatttggcgctgaacacatagggagggccaagtgtcctgcatttggtgcacccttccgccttccagtgttcccagtgcctgtgaccatgctgcaggcctgcagtggcccgctcagtacctctctcacagcacctgccatgtgccaggccaggcttggacacaggtgtgaatttgacatgcagccctcaagggggcccctccctggggcagatggaccctaggcccagttacatggtatagtcagtgctgtgtcagacacagcagaaactgctctggcatgttttgttccctctctccaaccctctgtgctgcctgtttgcctttcaacattttttgtcacgctcctcattccagtccctctggtggagaaaagcccttcatctgactttatgttctgaccagctccttgccgccttctccatccaaaccctccctagccatcccagctggcagggagtgccgcctcagatcttagggctccgagggctgaactgtgcatcttgcccgttcaagacatcatgtgctttggtccagaaatgaggtagcaaatgcaaggcacgaatcacaggcatccccagatgaggcagtgtgctcctagagggcagcttcctgcccagccatcatccttgtgttcccctgcactcagctcgtagcaggtgctccagtgtctgcttggatgcaccccaggctgggacggctcagtaagaagggtctgggctctctccctgccctgtcccatgcccttgtcctcccagagttacacagcttagggcaggctgggaacttgctgcctcttcatggggcttcctggtatctgattactaaccctcgcctgtgtcctcccaccactgccacctgtccagagtgaggcagcagctccccacacagatgcaggaggtggactctcttctgatgaagaggaggggaccagctctcaagcagaagcggccaggatactggctgcctcctggcctcaaaaccgagaagatgaagaaaagcagaagctgaagggtgggcccaagaagaccaaaagggaaaagaaagcagcagcttcccacctgttcccatttgagcagctgtgagctgagcgcccactagaggggcacccaccagttgctgctgccccactacaggccccacacctgccctgggcatgcccagcccctggtggtgggggcttctctgctgagaaggcaaactgaggcagcatgcacggaggcggggtcaggggagacgaggccaagctgaggaggtgctgcaggtcccgtctggctccagcccttgtcagattcacccagggtgaagccttcaaagctttttgctaccaaagcccactcaccctttgagctacagaacactttgctaggagatactcttctgcctcctagacctgttctttccatctttagaaacatcagtttttgtatggaagccaccgggagatttctggatggtggtgcatccgtgaatgcgctgatcgtttcttccagttagagtcttcatctgtccgacaagttcactcgcctcggttgcggacctaggaccatttctctgcaggccacttaccttcccctgagtcaggcttactaatgctgccctcactgcctctttgcagtaggggagagagcagagaagtacaggtcatctgctgggatctagttttccaagtaacattttgtggtgacagaagcctaaaaaaagctaaaatcaggaaagaaaaggaaaaatacgaattgaaaattaaggaaatgttagtaaaatagatcagtgttaaactagattgtattcattactagataaaatgtataaagctctctgtactaaggagaaatgacttttataacattttgagaaaataataaagcatttatctaaa

SEQ ID NO: 445169 - DNA, 1521 bp, Homo sapiens
ggattgtgtgcacactctgcattccagggacacgtggctgaagaaagcaagagtggtgaggcttggagaagtaccctacaagatggtgaaaggcttttctaaccgtgctcggaaagcccgacttgctgagccccagctgcgggaagaaaatgacctgggcctgtttggctactggcagacagaggagtatcagcccccagtggccgtggacgggaaggtgccccggaacgagtttgggaatgtgtacctcttcctgcccagcatgatgcctattggctgtgtccagctgaacctgcccaatctacaccgcgtggcccgcaagctggacatcgactgtgtccaggccatcactggctttgatttccatggcggctactcccatcccgtgactgatggatacatcgtctgcgaggaattcaaagacgtgctcctgactgcctgggaaaatgagcaggcagtcattgaaaggaaggagaaggagaggctgaagcgtcgctacgggcccaagagtgaggcagcagctccccacacagatgcaggaggtggactctcttctgatgaagaggaggggaccagctctcaagcagaagcggccaggatactggctgcctcctggcctcaaaaccgagaagatgaagaaaagcagaagctgaagggtgggcccaagaagaccaaaagggaaaagaaagcagcagcttcccacctgttcccatttgagcagctgtgagctgagcgcccactagaggggcacccaccagttgctgctgccccactacaggccccacacctgccctgggcatgcccagcccctggtggtgggggcttctctgctgagaaggcaaactgaggcagcatgcacggaggcggggtcaggggagacgaggccaagctgaggaggtgctgcaggtcccgtctggctccagcccttgtcagattcacccagggtgaagccttcaaagctttttgctaccaaagcccactcaccctttgagctacagaacactttgctaggagatactcttctgcctcctagacctgttctttccatctttagaaacatcagtttttgtatggaagccaccgggagatttctggatggtggtgcatccgtgaatgcgctgatcgtttcttccagttagagtcttcatctgtccgacaagttcactcgcctcggttgcggacctaggaccatttctctgcaggccacttaccttcccctgagtcaggcttactaatgctgccctcactgcctctttgcagtaggggagagagcagagaagtacaggtcatctgctgggatctagttttccaagtaacattttgtggtgacagaagcctaaaaaaagctaaaatcaggaaagaaaaggaaaaatacgaattgaaaattaaggaaatgttagtaaaatagatcagtgttaaactagattgtattcattactagataaaatgtataaagctctctgtactaaggagaaatgacttttataacattttgagaaaataataaagcatttatctaaa

SEQ ID NO: 445170 - DNA, 1536 bp, Homo sapiens
ggattgtgtgcacactctgcattccagggacacgtggctgaagaaagcaagagtggtgaggcttggagaagtaccctacaagatggtgaaaggcttttctaaccgtgctcggaaagcccgacttgctgagccccagctgcgggaagaaaatgacctgggcctgtttggctactggcagacagaggagtatcagcccccagtggccgtggacgggaaggtgccccggaacgagtttgggaatgtgtacctcttcctgcccagcatgatgcctattggctgtgtccagctgaacctgcccaatctacaccgcgtggcccgcaagctggacatcgactgtgtccaggccatcactggctttgatttccatggcggctactcccatcccgtgactgatggatacatcgtctgcgaggaattcaaagacgtgctcctgactgcctgggaaaatgagcaggcagtcattgaaaggaaggagaaggagaaaaaggagaagcgggctctagggaactggaagttgctggccaaaggtctgctcatcagggagaggctgaagcgtcgctacgggcccaagagtgaggcagcagctccccacacagatgcaggaggtggactctcttctgatgaagaggaggggaccagctctcaagcagaagcggccaggatactggctgcctcctggcctcaaaaccgagaagatgaagaaaagcagaagctgaagggtgggcccaagaagaccaaaagggaaaagaaagcagcagcttcccacctgttcccatttgagcagctgtgagctgccccacacctgccctgggcatgcccagcccctggtggtgggggcttctctgctgagaaggcaaactgaggcagcatgcacggaggcggggtcaggggagacgaggccaagctgaggaggtgctgcaggtcccgtctggctccagcccttgtcagattcacccagggtgaagccttcaaagctttttgctaccaaagcccactcaccctttgagctacagaacactttgctaggagatactcttctgcctcctagacctgttctttccatctttagaaacatcagtttttgtatggaagccaccgggagatttctggatggtggtgcatccgtgaatgcgctgatcgtttcttccagttagagtcttcatctgtccgacaagttcactcgcctcggttgcggacctaggaccatttctctgcaggccacttaccttcccctgagtcaggcttactaatgctgccctcactgcctctttgcagtaggggagagagcagagaagtacaggtcatctgctgggatctagttttccaagtaacattttgtggtgacagaagcctaaaaaaagctaaaatcaggaaagaaaaggaaaaatacgaattgaaaattaaggaaatgttagtaaaatagatcagtgttaaactagattgtattcattactagataaaatgtataaagctctctgtactaaggagaaatgacttttataacattttgagaaaataataaagcatttatctaaa

SEQ ID NO: 445171 - DNA, 4120 bp, Homo sapiens
ggattgtgtgcacactctgcattccagggacacgtggctgaagaaagcaagagtggtgaggcttggagaagtaccctacaagatggtgaaaggcttttctaaccgtgctcggaaagcccgacttgctgagccccagctgcgggaagaaaatgacctgggcctgtttggctactggcagacagaggagtatcagcccccagtggccgtggacgggaaggtgccccggaacgagtttgggaatgtgtacctcttcctgcccagcatgatgcctattggctgtgtccagctgaacctgcccaatctacaccgcgtggcccgcaagctggacatcgactgtgtccaggccatcactggctttgatttccatggcggctactcccatcccgtgactgatggatacatcgtctgcgaggaattcaaagacgtgctcctgactgcctgggaaaatgagcaggcagtcattgaaaggaaggagaaggagaaaaaggagaagcgggctctagggaactggaagttgctggccaaaggtctgctcatcagggagaggctgaagcgtcgctacgggcccaaggtcagtgcaggttctttgcagagaagacaagctcagggtcagtttcttggagatgcagctcagaaaggcctggcccagattctgccccagcctcaagtcagggatagctttgtgttaggacacctcagtcttctgtctctaaggccgcttgtttttaccttgttgggaaaggtgtccctggagtgaggcctcagctggctcttctgccccaagccctgtcccagtgtccccgtttctactgtccacatgagcaatgccatgggtctgatttggcgctgaacacatagggagggccaagtgtcctgcatttggtgcacccttccgccttccagtgttcccagtgcctgtgaccatgctgcaggcctgcagtggcccgctcagtacctctctcacagcacctgccatgtgccaggccaggcttggacacaggtgtgaatttgacatgcagccctcaagggggcccctccctggggcagatggaccctaggcccagttacatggtatagtcagtgctgtgtcagacacagcagaaactgctctggcatgttttgttccctctctccaaccctctgtgctgcctgtttgcctttcaacattttttgtcacgctcctcattccagtccctctggtggagaaaagcccttcatctgactttatgttctgaccagctccttgccgccttctccatccaaaccctccctagccatcccagctggcagggagtgccgcctcagatcttagggctccgagggctgaactgtgcatcttgcccgttcaagacatcatgtgctttggtccagaaatgaggtagcaaatgcaaggcacgaatcacaggcatccccagatgaggcagtgtgctcctagagggcagcttcctgcccagccatcatccttgtgttcccctgcactcagctcgtagcaggtgctccagtgtctgcttggatgcaccccaggctgggacggctcagtaagaagggtctgggctctctccctgccctgtcccatgcccttgtcctcccagagttacacagcttagggcaggctgggaacttgctgcctcttcatggggcttcctggtatctgattactaaccctcgcctgtgtcctcccaccactgccacctgtccagagtgaggcagcagctccccacacagatgcaggaggtggactctcttctgatgaagaggaggggaccagctctcaagcagaagcggccaggatactggctgcctcctggcctcaaaaccgagaagatgaagaaaagcagaagctgaagggtgggcccaagaagaccaaaagggaaaagaaagcagcagcttcccacctgttcccatttgagcagctgtgagctgagcgcccactagaggggcacccaccagttgctgctgccccactacaggccccacacctgccctgggcatgcccagcccctggtggtgggggcttctctgctgagaaggcaaactgaggcagcatgcacggaggcggggtcaggggagacgaggccaagctgaggaggtgctgcaggtcccgtctggctccagcccttgtcagattcacccagggtgaagccttcaaagctttttgctaccaaagcccactcaccctttgagctacagaacactttgctaggagatactcttctgcctcctagacctgttctttccatctttagaaacatcagtttttgtatggaagccaccgggagatttctggatggtggtgcatccgtgaatgcgctgatcgtttcttccagttagagtcttcatctgtccgacaagttcactcgcctcggttgcggacctaggaccatttctctgcaggccacttaccttcccctgagtcaggcttactaatgctgccctcactgcctctttgcagtaggggagagagcagagaagtacaggtcatctgctgggatctagttttccaagtaacattttgtggtgacagaagcctaaaaaaagctaaaatcaggaaagaaaaggaaaaatacgaattgaaaattaaggaaatgttagtaaaatagatcagtgttaaactagattgtattcattactagataaaatgtataaagctctctgtactaaggagaaatgacttttataacattttgagaaaataataaagcatttatctaaagatttggctctatattttctttcagatttttttttttttaaggggtcttactgtcttgcgcaggctggactcctgggcttgagtggtcttcctgagggctttgcctcagctggccctcacaaccaccgtgtgtggtggaaaggcattgttcgggaaacagtcccagctcctcaggactgcaggcacccacacaccactgccgtgcccagcttctttcagatttaagtcggtaataacacccaggtgacagagcaatgtattcatatgttgagacagcatgaaagagtccattttgttttcatggaggctggaaattcattacatatggaattcttctgtatttagtgaagagatgttaatctttgagaggagccattaaaaatcggagtcacttttatccaagggaaacaaacaaaacacttgagttatgactcatatgtggcaagaggctggctggaacctcttgttgagaaacagactggggttgctatggaaactggtctcacacttcctcaccagagctcggccctcctatagaggcaacttgttttctgttatttttttttttaaattattttttgagacagggagggttccactcttgcccaggctggggtgcagtggtgtgatcccagctagtggtgtgatcccagctgactgcagcctcaagcaatcctctcagcctcctgagtagctgggaccatgggtatgcaccaccacgcttgtctttctggggttttgagatgatggcattgccatgtctctgcagaaataacttcttcaggcatatgtcagctacaaggaggcattatttaaatgaaacagtaggttctgagaaacagaagagtaggtttgggaaagttctcactcacgtgcttgtaaaaaataaagcaaactgctagcatcagagtgggcagttagcagccgcctttcagaacaggaagcaaaatgaatgaaaaattaatgcctcatgtgtcaggcattctatgggcttgtctcatttggccctcacaacaactttgtgaggtggacaagtgttattcccattgtactgatgagggaacagactcaaatcgtgatttacccaacatcacagccagtatgtagcaatctttggctcagaactcaggtctcccgtgtcaactcaggatgcctctggcagtggagcacactgctgccccttccactttttctagcacattctgaagatgcatgaagcctgagtcattcactttaaatcaagccaaaacaaagtgggcttcagtgtggacttctgagtgctagatactgagttgcccttaaaaaaaaattaacttattttaagcactgaaagctcagatttccacaaaattcagttctcaataaatcctatggctgaattctttacagacattttggaaagaatgc

SEQ ID NO: 445172 - DNA, 319 bp, Homo sapiens
aaagttatctgtttttgtggctttcaggtatagtatatcactttgtaaatcagatcaattttttggaagtgagacttggtgtgaaggagaggctatattctaaagtggtgtatatatctgtctttacattcacagtttccatcttaatatttttcctgaaaatgtcagtgcttaacacttttctcccacttcatttttgcctgcagaaaaaggagaagcgggctctagggaactggaagttgctggccaaaggtctgctcatcagggagaggctgaagcgtcgctacgggcccaaggtcagtgcaggttctttgcagag

SEQ ID NO: 445173 - DNA, 1584 bp, Homo sapiens
ggattgtgtgcacactctgcattccagggacacgtggctgaagaaagcaagagtggtgaggcttggagaagtaccctacaagatggtgaaaggcttttctaaccgtgctcggaaagcccgacttgctgagccccagctgcgggaagaaaatgacctgggcctgtttggctactggcagacagaggagtatcagcccccagtggccgtggacgggaaggtgccccggaacgagtttgggaatgtgtacctcttcctgcccagcatgatgcctattggctgtgtccagctgaacctgcccaatctacaccgcgtggcccgcaagctggacatcgactgtgtccaggccatcactggctttgatttccatggcggctactcccatcccgtgactgatggatacatcgtctgcgaggaattcaaagacgtgctcctgactgcctgggaaaatgagcaggcagtcattgaaaggaaggagaaggagaaaaaggagaagcgggctctagggaactggaagttgctggccaaaggtctgctcatcagggagaggctgaagcgtcgctacgggcccaagagtgaggcagcagctccccacacagatgcaggaggtggactctcttctgatgaagaggaggggaccagctctcaagcagaagcggccaggatactggctgcctcctggcctcaaaaccgagaagatgaagaaaagcagaagctgaagggtgggcccaagaagaccaaaagggaaaagaaagcagcagcttcccacctgttcccatttgagcagctgtgagctgagcgcccactagaggggcacccaccagttgctgctgccccactacaggccccacacctgccctgggcatgcccagcccctggtggtgggggcttctctgctgagaaggcaaactgaggcagcatgcacggaggcggggtcaggggagacgaggccaagctgaggaggtgctgcaggtcccgtctggctccagcccttgtcagattcacccagggtgaagccttcaaagctttttgctaccaaagcccactcaccctttgagctacagaacactttgctaggagatactcttctgcctcctagacctgttctttccatctttagaaacatcagtttttgtatggaagccaccgggagatttctggatggtggtgcatccgtgaatgcgctgatcgtttcttccagttagagtcttcatctgtccgacaagttcactcgcctcggttgcggacctaggaccatttctctgcaggccacttaccttcccctgagtcaggcttactaatgctgccctcactgcctctttgcagtaggggagagagcagagaagtacaggtcatctgctgggatctagttttccaagtaacattttgtggtgacagaagcctaaaaaaagctaaaatcaggaaagaaaaggaaaaatacgaattgaaaattaaggaaatgttagtaaaatagatcagtgttaaactagattgtattcattactagataaaatgtataaagctctctgtactaaggagaaatgacttttataacattttgagaaaataataaagcatttatctaaa

SEQ ID NO: 445174 - DNA, 2665 bp, Homo sapiens
ggattgtgtgcacactctgcattccagggacacgtggctgaagaaagcaagagtggtgaggcttggagaagtaccctacaagatggtgaaaggcttttctaaccgtgctcggaaagcccgacttgctgagccccagctgcgggaagaaaatgacctgggcctgtttggctactggcagacagaggagtatcagcccccagtggccgtggacgggaaggtgccccggaacgagtttgggaatgtgtacctcttcctgcccagcatgatgcctattggctgtgtccagctgaacctgcccaatctacaccgcgtggcccgcaagctggacatcgactgtgtccaggccatcactggctttgatttccatggcggctactcccatcccgtgactgatggatacatcgtctgcgaggaattcaaagacgtgctcctgactgcctgggaaaatgagcaggcagtcattgaaaggaaggagaaggagaaaaaggagaagcgggctctagggaactggaagttgctggccaaaggtctgctcatcagggagaggctgaagcgtcgctacgggcccaaggtcagtgcaggttctttgcagagaagacaagctcagggtcagtttcttggagatgcagctcagaaaggcctggcccagattctgccccagcctcaagtcagggatagctttgtgttaggacacctcagtcttctgtctctaaggccgcttgtttttaccttgttgggaaaggtgtccctggagtgaggcctcagctggctcttctgccccaagccctgtcccagtgtccccgtttctactgtccacatgagcaatgccatgggtctgatttggcgctgaacacatagggagggccaagtgtcctgcatttggtgcacccttccgccttccagtgttcccagtgcctgtgaccatgctgcaggcctgcagtggcccgctcagtacctctctcacagcacctgccatgtgccaggccaggcttggacacaggtgtgaatttgacatgcagccctcaagggggcccctccctggggcagatggaccctaggcccagttacatggtatagtcagtgctgtgtcagacacagcagaaactgctctggcatgttttgttccctctctccaaccctctgtgctgcctgtttgcctttcaacattttttgtcacgctcctcattccagtccctctggtggagaaaagcccttcatctgactttatgttctgaccagctccttgccgccttctccatccaaaccctccctagccatcccagctggcagggagtgccgcctcagatcttagggctccgagggctgaactgtgcatcttgcccgttcaagacatcatgtgctttggtccagaaatgaggtagcaaatgcaaggcacgaatcacaggcatccccagatgaggcagtgtgctcctagagggcagcttcctgcccagccatcatccttgtgttcccctgcactcagctcgtagcaggtgctccagtgtctgcttggatgcaccccaggctgggacggctcagtaagaagggtctgggctctctccctgccctgtcccatgcccttgtcctcccagagttacacagcttagggcaggctgggaacttgctgcctcttcatggggcttcctggtatctgattactaaccctcgcctgtgtcctcccaccactgccacctgtccagagtgaggcagcagctccccacacagatgcaggaggtggactctcttctgatgaagaggaggggaccagctctcaagcagaagcggccaggatactggctgcctcctggcctcaaaaccgagaagatgaagaaaagcagaagctgaagggtgggcccaagaagaccaaaagggaaaagaaagcagcagcttcccacctgttcccatttgagcagctgtgagctgccccacacctgccctgggcatgcccagcccctggtggtgggggcttctctgctgagaaggcaaactgaggcagcatgcacggaggcggggtcaggggagacgaggccaagctgaggaggtgctgcaggtcccgtctggctccagcccttgtcagattcacccagggtgaagccttcaaagctttttgctaccaaagcccactcaccctttgagctacagaacactttgctaggagatactcttctgcctcctagacctgttctttccatctttagaaacatcagtttttgtatggaagccaccgggagatttctggatggtggtgcatccgtgaatgcgctgatcgtttcttccagttagagtcttcatctgtccgacaagttcactcgcctcggttgcggacctaggaccatttctctgcaggccacttaccttcccctgagtcaggcttactaatgctgccctcactgcctctttgcagtaggggagagagcagagaagtacaggtcatctgctgggatctagttttccaagtaacattttgtggtgacagaagcctaaaaaaagctaaaatcaggaaagaaaaggaaaaatacgaattgaaaattaaggaaatgttagtaaaatagatcagtgttaaactagattgtattcattactagataaaatgtataaagctctctgtactaaggagaaatgacttttataacattttgagaaaataataaagcatttatctaaa

SEQ ID NO: 445175 - DNA, 3059 bp, Homo sapiens
ggattgtgtgcacactctgcattccagggacacgtggctgaagaaagcaagagtggtgaggcttggagaagtaccctacaagatggtgaaaggcttttctaaccgtgctcggaaagcccgacttgctgagccccagctgcgggaagaaaatgacctgggcctgtttggctactggcagacagaggagtatcagcccccagtggccgtggacgggaaggtgccccggaacgagtttgggaatgtgtacctcttcctgcccagcatgatgcctattggctgtgtccagctgaacctgcccaatctacaccgcgtggcccgcaagctggacatcgactgtgtccaggccatcactggctttgatttccatggcggctactcccatcccgtgactgatggatacatcgtctgcgaggaattcaaagacgtgctcctgactgcctgggaaaatgagcaggcagtcattgaaaggaaggagaaggagaaaaaggagaagcgggctctagggaactggaagttgctggccaaaggtctgctcatcagggagaggctgaagcgtcgctacgggcccaaggtcagtgcaggttctttgcagagaagacaagctcagggtcagtttcttggagatgcagctcagaaaggcctggcccagattctgccccagcctcaagtcagggatagctttgtgttaggacacctcagtcttctgtctctaaggccgcttgtttttaccttgttgggaaaggtgtccctggagtgaggcctcagctggctcttctgccccaagccctgtcccagtgtccccgtttctactgtccacatgagcaatgccatgggtctgatttggcgctgaacacatagggagggccaagtgtcctgcatttggtgcacccttccgccttccagtgttcccagtgcctgtgaccatgctgcaggcctgcagtggcccgctcagtacctctctcacagcacctgccatgtgccaggccaggcttggacacaggtgtgaatttgacatgcagccctcaagggggcccctccctggggcagatggaccctaggcccagttacatggtatagtcagtgctgtgtcagacacagcagaaactgctctggcatgttttgttccctctctccaaccctctgtgctgcctgtttgcctttcaacattttttgtcacgctcctcattccagtccctctggtggagaaaagcccttcatctgactttatgttctgaccagctccttgccgccttctccatccaaaccctccctagccatcccagctggcagggagtgccgcctcagatcttagggctccgagggctgaactgtgcatcttgcccgttcaagacatcatgtgctttggtccagaaatgaggtagcaaatgcaaggcacgaatcacaggcatccccagatgaggcagtgtgctcctagagggcagcttcctgcccagccatcatccttgtgttcccctgcactcagctcgtagcaggtgctccagtgtctgcttggatgcaccccaggctgggacggctcagtaagaagggtctgggctctctccctgccctgtcccatgcccttgtcctcccagagttacacagcttagggcaggctgggaacttgctgcctcttcatggggcttcctggtatctgattactaaccctcgcctgtgtcctcccaccactgccacctgtccagagtgaggcagcagctccccacacagatgcaggaggtggactctcttctgatgaagaggaggggaccagctctcaagcagaagcggccaggatactggctgcctcctggcctcaaaaccgagaagatgaagaaaagcagaagctgaagggtgggcccaagaagaccaaaagggaaaagaaagcagcagcttcccacctgttcccatttgagcagctgtgagctgagcgcccactagaggggcacccaccagttgctgctgccccactacaggccccacacctgccctgggcatgcccagcccctggtggtgggggcttctctgctgagaaggcaaactgaggcagcatgcacggaggcggggtcaggggagacgaggccaagctgaggaggtgctgcaggtcccgtctggctccagcccttgtcagattcacccagggtgaagccttcaaagctttttgctaccaaagcccactcaccctttgagctacagaacactttgctaggagatactcttctgcctcctagacctgttctttccatctttagaaacatcagtttttgtatggaagccaccgggagatttctggatggtggtgcatccgtgaatgcgctgatcgtttcttccagttagagtcttcatctgtccgacaagttcactcgcctcggttgcggacctaggaccatttctctgcaggccacttaccttcccctgagtcaggcttactaatgctgccctcactgcctctttgcagtaggggagagagcagagaagtacaggtcatctgctgggatctagttttccaagtaacattttgtggtgacagaagcctaaaaaaagctaaaatcaggaaagaaaaggaaaaatacgaattgaaaattaaggaaatgttagtaaaatagatcagtgttaaactagattgtattcattactagataaaatgtataaagctctctgtactaaggagaaatgacttttataacattttgagaaaataataaagcatttatctaaaaaaaatggaaaaaaaaaaggggggggggtataaaagatcctgggggggcccaagtaagggttaccagttttggaacaagggcctaaaggaagagcgggttttataaggccagagccaaggtgcccgacgcgtattacaaccactctcggctcggtggcaaaccctgctcccctggggaacttcgtcgagcgagaaccccagccctgcggggcggcgcacattgcggcccgcacccgcagacgattaagaggctccagcggacaataacacacaaggggtctacgtgcacaacagaacttatgtcccgcgaaaacgtctcggcatatagtagcacacgacacaacgg

SEQ ID NO: 445176 - DNA, 3727 bp, Homo sapiens
ggattgtgtgcacactctgcattccagggacacgtggctgaagaaagcaagagtggtgaggcttggagaagtaccctacaagatggtgaaaggcttttctaaccgtgctcggaaagcccgacttgctgagccccagctgcgggaagaaaatgacctgggcctgtttggctactggcagacagaggagtatcagcccccagtggccgtggacgggaaggtgccccggaacgagtttgggaatgtgtacctcttcctgcccagcatgatgcctattggctgtgtccagctgaacctgcccaatctacaccgcgtggcccgcaagctggacatcgactgtgtccaggccatcactggctttgatttccatggcggctactcccatcccgtgactgatggatacatcgtctgcgaggaattcaaagacgtgctcctgactgcctgggaaaatgagcaggcagtcattgaaaggaaggagaaggagaaaaaggagaagcgggctctagggaactggaagttgctggccaaaggtctgctcatcagggagaggctgaagcgtcgctacgggcccaaggtcagtgcaggttctttgcagagaagacaagctcagggtcagtttcttggagatgcagctcagaaaggcctggcccagattctgccccagcctcaagtcagggatagctttgtgttaggacacctcagtcttctgtctctaaggccgcttgtttttaccttgttgggaaaggtgtccctggagtgaggcctcagctggctcttctgccccaagccctgtcccagtgtccccgtttctactgtccacatgagcaatgccatgggtctgatttggcgctgaacacatagggagggccaagtgtcctgcatttggtgcacccttccgccttccagtgttcccagtgcctgtgaccatgctgcaggcctgcagtggcccgctcagtacctctctcacagcacctgccatgtgccaggccaggcttggacacaggtgtgaatttgacatgcagccctcaagggggcccctccctggggcagatggaccctaggcccagttacatggtatagtcagtgctgtgtcagacacagcagaaactgctctggcatgttttgttccctctctccaaccctctgtgctgcctgtttgcctttcaacattttttgtcacgctcctcattccagtccctctggtggagaaaagcccttcatctgactttatgttctgaccagctccttgccgccttctccatccaaaccctccctagccatcccagctggcagggagtgccgcctcagatcttagggctccgagggctgaactgtgcatcttgcccgttcaagacatcatgtgctttggtccagaaatgaggtagcaaatgcaaggcacgaatcacaggcatccccagatgaggcagtgtgctcctagagggcagcttcctgcccagccatcatccttgtgttcccctgcactcagctcgtagcaggtgctccagtgtctgcttggatgcaccccaggctgggacggctcagtaagaagggtctgggctctctccctgccctgtcccatgcccttgtcctcccagagttacacagcttagggcaggctgggaacttgctgcctcttcatggggcttcctggtatctgattactaaccctcgcctgtgtcctcccaccactgccacctgtccagagtgaggcagcagctccccacacagatgcaggaggtggactctcttctgatgaagaggaggggaccagctctcaagcagaagcggccaggatactggctgcctcctggcctcaaaaccgagaagatgaagaaaagcagaagctgaagggtgggcccaagaagaccaaaagggaaaagaaagcagcagcttcccacctgttcccatttgagcagctgtgagctgagcgcccactagaggggcacccaccagttgctgctgccccactacaggccccacacctgccctgggcatgcccagcccctggtggtgggggcttctctgctgagaaggcaaactgaggcagcatgcacggaggcggggtcaggggagacgaggccaagctgaggaggtgctgcaggtcccgtctggctccagcccttgtcagattcacccagggtgaagccttcaaagctttttgctaccaaagcccactcaccctttgagctacagaacactttgctaggagatactcttctgcctcctagacctgttctttccatctttagaaacatcagtttttgtatggaagccaccgggagatttctggatggtggtgcatccgtgaatgcgctgatcgtttcttccagttagagtcttcatctgtccgacaagttcactcgcctcggttgcggacctaggaccatttctctgcaggccacttaccttcccctgagagggctttgcctcagctggccctcacaaccaccgtgtgtggtggaaaggcattgttcgggaaacagtcccagctcctcaggactgcaggcacccacacaccactgccgtgcccagcttctttcagatttaagtcggtaataacacccaggtgacagagcaatgtattcatatgttgagacagcatgaaagagtccattttgttttcatggaggctggaaattcattacatatggaattcttctgtatttagtgaagagatgttaatctttgagaggagccattaaaaatcggagtcacttttatccaagggaaacaaacaaaacacttgagttatgactcatatgtggcaagaggctggctggaacctcttgttgagaaacagactggggttgctatggaaactggtctcacacttcctcaccagagctcggccctcctatagaggcaacttgttttctgttatttttttttttaaattattttttgagacagggagggttccactcttgcccaggctggggtgcagtggtgtgatcccagctagtggtgtgatcccagctgactgcagcctcaagcaatcctctcagcctcctgagtagctgggaccatgggtatgcaccaccacgcttgtctttctggggttttgagatgatggcattgccatgtctctgcagaaataacttcttcaggcatatgtcagctacaaggaggcattatttaaatgaaacagtaggttctgagaaacagaagagtaggtttgggaaagttctcactcacgtgcttgtaaaaaataaagcaaactgctagcatcagagtgggcagttagcagccgcctttcagaacaggaagcaaaatgaatgaaaaattaatgcctcatgtgtcaggcattctatgggcttgtctcatttggccctcacaacaactttgtgaggtggacaagtgttattcccattgtactgatgagggaacagactcaaatcgtgatttacccaacatcacagccagtatgtagcaatctttggctcagaactcaggtctcccgtgtcaactcaggatgcctctggcagtggagcacactgctgccccttccactttttctagcacattctgaagatgcatgaagcctgagtcattcactttaaatcaagccaaaacaaagtgggcttcagtgtggacttctgagtgctagatactgagttgcccttaaaaaaaaattaacttattttaagcactgaaagctcagatttccacaaaattcagttctcaataaatcctatggctgaattctttacagacattttggaaagaatgc

SEQ ID NO: 445177 - DNA, 3778 bp, Homo sapiens
acattcaacaggaggaacccgcgggagaggagccccactcccccagcgccgcagccaccgcagccaccgcagcccgtgcgccccgcgccctcgagcgccatggccaaggaaggcgtggagaaggcggaggagacggagcaaatgatcgagaaggaggcaggcaaggagccggcggagggcggcggcggcgacggctcgcaccgcctcggggacgcccaggagatgcgcgcggtggtgctggctggcttcggggggctcaacaagctgcggctcttcaggaaggccatgcccgagcctcaggacggcgagctcaagatccgcgtcaaagcctgtggattaaacttcattgacttgatggtgcgacaagggaatattgacaaccctcccaagactcccctggtgccaggatttgagtgttctgggattgttgaagctctgggggacagcgtgaaaggatatgagattggagaccgtgtcatggcatttgtcaattacaatgcctgggcagaggtggtctgcacaccagtggagtttgtctacaagatcccggatgacatgagcttctccgaggctgctgcattccccatgaacttcgtcacagcctatgtgatgctgtttgaagttgccaacctccgggaagggatgtctgtgctcgtgcactcagctggtgggggcgtgggtcaagctgtggctcagctgtgttccactgtccccaacgtgactgtctttggaacagcctctactttcaagcatgaagcaatcaaagactctgtgacccacctctttgacagaaatgcagactacgtgcaagaagttaaaagaatctctgctgaaggtgtggacatcgttttggattgcctctgtggggacaacactggaaaaggtctcagtcttctcaaacccctgggaacctacattttatatggctcatccaacatggtaactggagagaccaagagcttcttcagctttgcaaaatcatggtggcaggtggagaaggtgaaccccatcaagctgtatgaggagaacaaagtcatcgcggggttttcccttttaaatctgctcttcaaacaaggccgggcgggcctcattcggggagtggtggaaaaactcatagggctctacaaccagaagaagatcaagcctgtggtggactccttgtgggctctggaggaggtgaaggaggccatgcagcggattcacgaccgagggaacattggcaagttaattctggatgtagaaaagaccccaactccactgatggccaatgacagcacagagaccagtgaagcaggggaagaggaggaggaccacgagggagacagcgagaacaaggagcggatgccctttatccagtaactgaggacccaggtgggagaatgtgaaggatggtttggaagatgaggacccggctgagaaaactcttctgtgccccagtgaacaaatgctgtagtccagtgcgtgtcgtgtttgtctgcagtcagctgagctaaaaagctgttgatcactgttgttttttgaagtgccaatcccatgccatgcagtattatgtccctctcctatctgtgtattacacattcccctctcccctgtatcaaaaccatccatctgtgggttcttcttgacagttctagaacagccttgcaaattaatacaagtcccaggcccaatgcctaagagaccagacgtgggcaaagacaagtttggatggaaaggtgttatcacagagccctgtccagctcctagaattcctcaggccagtgacacttttttgctgctggccacccatgcctctgatgagaacacttgccaatttggccagcagaaagagagtaggccggatgttttcatgagcccacaaatttagaaactctcctagtagtactttttctctctccatttaagagacaactacggtcaaaagtttgagccattctcttctaccccttcagtgtctgaccctttcactggctcttatctgtaaacacagggaggcaggtatggatttttcacagtagacaatgggtcaacagcatgagtttgaggacctgctgtgaagatttctcctccaaaatacatctcatgggcaggattcttcctgctccatatctgtttcaattttaagaaagcaccacatacaagacacattcagaagtcattcctgagcattgctggtgtttgcacacttgccacctgcattaccaattctgtaaatttcaattcctggtggaaagtgaccactttgaccatggatttcccaaagaagagttcctttgcagaccataggtggaaaagtcaatgagcatctccttccttgccaaagcatgtcccaacatgtaacaaactctagggatacaaaaggtttatattcagcatctgatgtcagatgtacagttcctcccctcccatatataaaccccggtgtagaatctgcagcgccctgctcttcggaaaccaaggaacaagccacctgctcacacaccttgttcaacttttcagctcctaaggaaccccacccccatgcaatttgactgtgcttgagaggtgaatacagttaccttcgagaaacagagggagctcctcaccccgtccttccagtccttttggctaaaatgcttaactatcactcacaaacaaatgtggagataccaggagctcatttgattcataccccaactttgtgttctgaaaaacatcagagggattttacattgcccagtttctccaccaacaagccttagggtggacccaaccctttccgcaagtggtaggaacgaatgcatcttagcaattacctgatttccaaagtccttttgtagcaaatgtcacctcattcgtggtctttttacctatcctaagcttatgatgatgagttatgtatgccaaatatttatctgaagagtttctcctcattgtgaatgtgtatgtaaaatatgaagacaagaaagggtgctttcatctgaggaaccaaggggtgggagtatcccaaaggaggacaccagcatcatcttttcttcgtactccaggacccaccaatattccagttctgggtcatttagagagataatggggcgtttattcccctattacctttgctaagtgctatattattggctgtttctcccgtaaccatgctgaaaagggggtcttagggagaactgtcatccaagtggcattcctagtaagttgggtagaaatgacattttccagagctgaaggagtgaagagcccttggccatactagggctctccttcccccggggagtgggaactcagccacattcagaattcacatcgcctttgttatgtccagaggagaggcataaaaaggcactctcccccaccacccctaccaaatctgggtttggtttggttttatttaactagcaaagttaatccagtaatcgcaaattactccagatggttaaagaaaaccctttcagaatacagaacgagaaaactagagtttgaccaataagaccaatttctgccatgaagaaccgggggacgcaagttaattgtttaacgtactctcattttaagcaccttctttcctgtctcttgattgttttttctgaaggaagtgtaaagaatgtctcagtctgccttaaaggaactgtgaaggcttctctgtaatttaagcttgattgaagtgaactgaaacattgtctaatgtctttgtggctttagagcttttgttatattgtgcctataaagcaaattatgtttacataaaaatataaataaagtattcagcatagcaaaacctcacctggca

SEQ ID NO: 445178 - DNA, 3566 bp, Homo sapiens
acattcaacaggaggaacccgcgggagaggagccccactcccccagcgccgcagccaccgcagccaccgcagcccgtgcgccccgcgccctcgagcgccatggccaaggaaggcgtggagaaggcggaggagacggagcaaatgatcgagaaggaggcaggcaaggagccggcggagggcggcggcggcgacggctcgcaccgcctcggggacgcccaggagatgcgcgcggtggtgctggctggcttcggggggctcaacaagctgcggctcttcaggaaggccatgcccgagcctcaggacggcgagctcaagatccgcgtcaaagcctgtggattaaacttcattgacttgatggtgcgacaagggaatattgacaaccctcccaagactcccctggtgccaggatttgagtgttctgggattgttgaagctctgggggacagcgtgaaaggatatgagattggagaccgtgtcatggcatttgtcaattacaatgcctgggcagaggtggtctgcacaccagtggagtttgtctacaagatcccggatgacatgagcttctccgaggctgctgcattccccatgaacttcgtcacagcctatgtgatgctgtttgaagttgccaacctccgggaagggatgtctgtgctcgtgcactcagctggtgggggcgtgggtcaagctgtggctcagctgtgttccactgtccccaacgtgactgtctttggaacagcctctactttcaagcatgaagcaatcaaagactctgtgacccacctctttgacagaaatgcagactacgtgcaagaagttaaaagaatctctgctgaaggtgtggacatcgttttggattgcctctgtggggacaacactggaaaaggtctcagtcttctcaaacccctgggaacctacattttatatggctcatccaacatggtaactggagagaccaagagcttcttcagctttgcaaaatcatggtggcaggtggagaaggtgaaccccatcaagctgtatgaggagaacaaagtcatcgcggggttttcccttttaaatctgctcttcaaacaaggccgggcgggcctcattcggggagtggtggaaaaactcatagggctctacaaccagaagaagatcaagcctgtggtggactccttgtgggctctggaggaggtgaaggaggccatgcagcggattcacgaccgagggaacattggcaagttaattctggatgtagaaaagaccccaactccactgatggccaatgacagcacagagaccagtgaagcaggggaagaggaggaggaccacgagggagacagcgagaacaaggagcggatgccctttatccagtaactgaggacccaggtgggagaatgtgaaggatggtttggaagatgaggacccggctgagaaaactcttctgtgccccagtgaacaaatgctgtagtccagtgcgtgtcgtgtttgtctgcagtcagctgagctaaaaagctgttgatcactgttgttttttgaagtgccaatcccatgccatgcagtattatgtccctctcctatctgtgtattacacattcccctctcccctgtatcaaaaccatccatctgtgggttcttcttgacagttctagaacagccttgcaaattaatacaagtcccaggcccaatgcctaagagaccagacgtgggcaaagacaagtttggatggaaaggtgttatcacagagccctgtccagctcctagaattcctcaggccagtgacacttttttgctgctggccacccatgcctctgatgagaacacttgccaatttggccagcagaaagagagtaggccggatgttttcatgagcccacaaatttagaaactctcctagtagtactttttctctctccatttaagagacaactacggtcaaaagtttgagccattctcttctaccccttcagtgtctgaccctttcactggctcttatctgtaaacacagggaggcaggtatggatttttcacagtagacaatgggtcaacagcatgagtttgaggacctgctgtgaagatttctcctccaaaatacatctcatgggcaggattcttcctgctccatatctgtttcaattttaagaaagcaccacatacaagacacattcagaagtcattcctgagcattgctggtgtttgcacacttgccacctgcattaccaattctgtaaatttcaattcctggtggaaagtgaccactttgaccatggatttcccaaagaagagttcctttgcagaccataggtggaaaagtcaatgagcatctccttccttgccaaagcatgtcccaacatgtaacaaactctagggatacaaaaggtttatattcagcatctgatgtcagatgtacagttcctcccctcccatatataaaccccggtgtagaatctgcagcgccctgctcttcggaaaccaaggaacaagccacctgctcacacaccttgttcaacttttcagctcctaaggaaccccacccccatgcaatttgactgtgcttgagaggtgaatacagttaccttcgagaaacagagggagctcctcaccccgtccttccagtccttttggctaaaatgcttaactatcactcacaaacaaatgtggagataccaggagctcatttgattcataccccaactttgtgttctgaaaaacatcagagggattttacattgcccagtttctccaccaacaagccttagggtggacccaaccctttccgcaagtggtaggaacgaatgcatcttagcaattacctgatttccaaagtccttttgtagcaaatgtcacctcattcgtggtctttttacctatcctaagcttatgatgatgagttatgtatgccaaatatttatctgaagagtttctcctcattgtgaatgtgtatgtaaaatatgaagacaagaaagggtgctttcatctgaggaaccaaggggtgggagtatcccaaaggaggacaccagcatcatcttttcttcgtactccaggacccaccaatattccagttctgggtcatttagagagataatggggcgtttattcccctattacctttgctaagtgctatattattggctgtttctcccgtaaccatgctgaaaagggggtcttagggagaactgtcatccaagtggcattcctagtaagttgggtagaaatgacattttccagagctgaaggagtgaagagcccttggccatactagggctctccttcccccggggagtgggaactcagccacattcagaattcacatcgcctttgttatgtccagaggagaggcataaaaaggcactctcccccaccacccctaccaaatctgggtttggtttggttttatttaactagcaaagttaatccagtaatcgcaaattactccagatggttaaagaaaccttagataaagagggaaactaaggttgccatagaccattttgctgaagacggggaggagtatatgtgaaggttctattagctcttcgggtggagtgtcgagaggaaaagtgcgcaaaaggaaggttttaaag

SEQ ID NO: 445179 - DNA, 3078 bp, Homo sapiens
acattcaacaggaggaacccgcgggagaggagccccactcccccagcgccgcagccaccgcagccaccgcagcccgtgcgccccgcgccctcgagcgccatggccaaggaaggcgtggagaaggcggaggagacggagcaaatgatcgagaaggaggcaggcaaggagccggcggagggcggcggcggcgacggctcgcaccgcctcggggacgcccaggagatgcgcgcggtggtgctggctggcttcggggggctcaacaagctgcggctcttcaggaaggccatgcccgagcctcaggacggcgagctcaagatccgcgtcaaagcctgtggattaaacttcattgacttgatggtgcgacaagggaatattgacaaccctcccaagactcccctggtgccaggatttgagtgttctgggattgttgaagctctgggggacagcgtgaaaggatatgagattggagaccgtgtcatggcatttgtcaattacaatgcctgggcagaggtggtctgcacaccagtggagtttgtctacaagatcccggatgacatgagcttctccgaggctgctgcattccccatgaacttcgtcacagcctatgtgatgctgtttgaagttgccaacctccgggaagggatgtctgtgctcgtgcactcagctggtgggggcgtgggtcaagctgtggctcagctgtgttccactgtccccaacgtgactgtctttggaacagcctctactttcaagcatgaagcaatcaaagactctgtgacccacctctttgacagaaatgcagactacgtgcaagaagttaaaagaatctctgctgaaggtgtggacatcgttttggattgcctctgtggggacaacactggaaaaggtctcagtcttctcaaacccctgggaacctacattttatatggctcatccaacatggtaactggagagaccaagagcttcttcagctttgcaaaatcatggtggcaggtggagaaggtgaaccccatcaagctgtatgaggagaacaaagtcatcgcggggttttcccttttaaatctgctcttcaaacaaggccgggcgggcctcattcggggagtggtggaaaaactcatagggctctacaaccagaagaagatcaagcctgtggtggactccttgtgggctctggaggaggtgaaggaggccatgcagcggattcacgaccgagggaacattggcaagttaattctggatgtagaaaagaccccaactccactgatggccaatgacagcacagagaccagtgaagcaggggaagaggaggaggaccacgagggagacagcgagaacaaggagcggatgccctttatccagtaactgaggacccaggtgggagaatgtgaaggatggtttggaagatgaggacccggctgagaaaactcttctgtgccccagtgaacaaatgctgtagtccagtgcgtgtcgtgtttgtctgcagtcagctgagctaaaaagctgttgatcactgttgttttttgaagtgccaatcccatgccatgcagtattatgtccctctcctatctgtgtattacacattcccctctcccctgtatcaaaaccatccatctgtgggttcttcttgacagttctagaacagccttgcaaattaatacaagtcccaggcccaatgcctaagagaccagacgtgggcaaagacaagtttggatggaaaggtgttatcacagagccctgtccagctcctagaattcctcaggccagtgacacttttttgctgctggccacccatgcctctgatgagaacacttgccaatttggccagcagaaagagagtaggccggatgttttcatgagcccacaaatttagaaactctcctagtagtactttttctctctccatttaagagacaactacggtcaaaagtttgagccattctcttctaccccttcagtgtctgaccctttcactggctcttatctgtaaacacagggaggcaggtatggatttttcacagtagacaatgggtcaacagcatgagtttgaggacctgctgtgaagatttctcctccaaaatacatctcatgggcaggattcttcctgctccatatctgtttcaattttaagaaagcaccacatacaagacacattcagaagtcattcctgagcattgctggtgtttgcacacttgccacctgcattaccaattctgtaaatttcaattcctggtggaaagtgaccactttgaccatggatttcccaaagaagagttcctttgcagaccataggtggaaaagtcaatgacatcatcttttcttcgtactccaggacccaccaatattccagttctgggtcatttagagagataatggggcgtttattcccctattacctttgctaagtgctatattattggctgtttctcccgtaaccatgctgaaaagggggtcttagggagaactgtcatccaagtggcattcctagtaagttgggtagaaatgacattttccagagctgaaggagtgaagagcccttggccatactagggctctccttcccccggggagtgggaactcagccacattcagaattcacatcgcctttgttatgtccagaggagaggcataaaaaggcactctcccccaccacccctaccaaatctgggtttggtttggttttatttaactagcaaagttaatccagtaatcgcaaattactccagatggttaaagaaaaccctttcagaatacagaacgagaaaactagagtttgaccaataagaccaatttctgccatgaagaaccgggggacgcaagttaattgtttaacgtactctcattttaagcaccttctttcctgtctcttgattgttttttctgaaggaagtgtaaagaatgtctcagtctgccttaaaggaactgtgaaggcttctctgtaatttaagcttgattgaagtgaactgaaacattgtctaatgtctttgtggctttagagcttttgttatattgtgcctataaagcaaattatgtttacataaaaatataaataaagtattcagcatagcaaaacctcacctggca

SEQ ID NO: 445180 - DNA, 607 bp, Homo sapiens
taagaaggtaaaagtttagatttccaccattttttgtttgtttgtttttgtttttgttttgtggagcctgggcaacatagcgaaaccccatctctacaaaaaattaaccaggcactgtggcacgcacctgtagtcccagctacttgggagactgaggcaggaggatcgcttgaacccaggaggtcgaggccgcagtgagctgtgatcccaccactgcactccaggctgggtgatagaatgagatcctgtctcaaataagaaataaaaagagaaataactattttttaaatatacatgggaacagtaatctcatgtccttacttaataaagatcatgatttttcaccagggaatatagaattacactagtatgaatttcccatcacttccctccaattgtggttttctcactaagtaaaacattgctgtatttattctagacatgcagagcagttctttgaaactattctcaagttttgaacagaaagccatgctgttaaagcgccaggcttttgctgtcttcagtggagaacttgatcaataccacctttaccttccactgatacaaggtaagacagctgtcttagtctgttttttgctgttataac

SEQ ID NO: 445181 - DNA, 582 bp, Homo sapiens
cggctggatcacgaggtcacgagttcgagaccagcccggccaacatggtgaaaccccacctctactaaaaatacaaaaattagctggcattgtggcgggcacctgtaatcccagctacttgggagactgaggcaggaggatcgcttgaacccaggaggtcgaggccgcagtgagctgtgatcccaccactgcactccaggctgggtgatagaatgagatcctgtctcaaataagaaataaaaagagaaataactattttttaaatatacatgggaacagtaatctcatgtccttacttaataaagatcatgatttttcaccagggaatatagaattacactagtatgaatttcccatcacttccctccaattgtggttttctcactaagtaaaacattgctgtatttattctagacatgcagagcagttctttgaaactattctcaagttttgaacagaaagccatgctgttaaagcgccaggcttttgctgtcttcagtggagaacttgatcaataccacctttaccttccactgatacaaggtaagacagctgtcttagtctgttttttgctgttataac

SEQ ID NO: 445182 - DNA, 7581 bp, Homo sapiens
  misc_feature (4038)..(4038): n is a, c, g, or t
ttcttgtcccacagtgcctggcccagaagccttgctaaatatttgaacaggattgcccaatacttttctgctgtgagaatgtaagatggatccagaagagcaggagctcttaaatgattacagatacagaagctactcttcagtgattgaaaaggctttgagaaattttgagtcctcgagtgaatgggcggatctcatatcttcacttggcaaactcaacaaggctcttcagagtaacctgaggtactccttgttgccaagacggctcctcatcagcaaaagattagctcagtgtttgcaccctgccctgcccagtggtgtccacttaaaagctctggaaacctacgagattatctttaaaatcgtggggaccaaatggctggccaaggacttgtttctgtacagctgcgggttatttcctctcctggcacacgcggcggtgtcggtgaggccggtgctgctcaccctgtacgagaagtacttcctcccactgcagaagctgctcctgcccagtctgcaggccttcatcgtgggcctgctgcccggccttgaagagggctccgagatctccgacagaacggatgctctgctcctgagactgtcgctggtggttggcaaagaggtgttttacaccgccctctgggggagcgtcctggccagcccgtccatccgcctccctgcctcagtcttcgtggtgggccacatcaacagggatgcccccggccgggagcagaagtacatgctggggaccaatcaccaactcacggtgaagtctttgcgtgcctccctgttggactcaaatgttcttgtgcaaagaaataatctggaaatcgttctgtttttcttcccattttatacctgtctggattccaatgagagagccatccccctcctcagatctgacatcgtgcgcattctctcagccgccacccagaccctactgagaagggacatgtccctgaacagaagactgtatgcatggttactaggctcagacataaaaggaaataccgttgtgccagaatctgaaatctcaaattcttatgaagaccagtcgtcttatttttttgaaaaatactccaaggatcttttagttgagggtttggctgagatattgcatcagaagttcatagatgctgacgtggaggaacgccatcatgcatacctgaagccttttcgcgtcctcatcagtctgcttgacaagccagaaatagggcctcaagtggttgggaatttgtttctcgaagtcatcagggccttttattcttactgcagagatgcccttggctctgatcttaaacttagctacacccagagtggaaattcgctgataagtgcaatcaaggaaaacagaaatgcctctgagattgtcaaaacggtaaatttgctgataacttctctaagcacagactttctctgggattatatgacaaggtgttttgaggaatgctttagaccagtgaagcagcgttacagcgtgaggaacagcgtcagccctccccccacggtctcggagctctgcgccctcctggtcttcctgctggatgtcattcctttggaactttactctgaggtgcatacccagtatctccctcaggtgctcggctgcctggtgcagcctcttgctgaggacatggaggccttaagtttacctgaactcacgcatgccttgaagacgtgtttcaaggtgctcagcaaagtccagatgcctccttcctacctcgacacggagtccaccagcggaacctcgagtccagtaaaaggtgaaaacggcaaaataattttggaaacaaaggcagtgattcccggtgacgaagatgcttcgtttccccctctgaagtctgaggacagtgggatcgggctcagtgcctcgtcaccggagctctctgagcacttgagggttcctcgagtttctctggaaagggacgacgtttggaagaagggcgggagcatgcagaggacgtttctttgcatccaagagctaatcgccaactttgccagcaagaacatttttggagtacagctgacagcgtcaggagaagaaagcaagtccgaggagcctgcagggaagagggacagggatgggacgcagagcctggcagccaatgattccagcaggaagaactcttgggagcccaagcccatcactgtgcctcagttcaagcagatgctgtcagacttgttcacagcacgagggtctccattcaagacaaaaagttcagagtcaccatcgtcttcgcccagcagccctgccaggaaaaacgggggagaatgggatgttgagaaggtggtcattgacctggggggttccagggaggaacgcagggaggcctttgccgccgcctgccacctgctgctggattgtgccactttccctgtctacctgtccgaggaagagaccgagcagctctgtgcaacgctcttccagctgccaggagccggtgattccagttttccatcttggctgaagtccctcatgactatttgctgctgtgtgactgactgctacctccagaacgtggccatttccactctgctggaagtgataaaccattcccagtccctggcgcttgtcattgaagacaagatgaaacgctataagagctctggacacaaccctttttttggcaagctgcagatggtgacggttcctcccattgctccagggatattgaaagtcattgcagagaaaacagatttctatcagagggtggctcgtgtgctttggaatcagctgaacaaagagacccgggagcatcacgtcacctgcgtagaattgttctaccggctgcactgcctggcccctacggccaacatctgcgaggacatcatctgccatgccctcctggaccctgacaagggaacaaggctggaagctctgtttagattttccgtgatctggcatctgacaagagagatccaaggcagtcgagtaacatctcacaatcgctcctttgataggtccttgtttgtcgtgctggacagcctggcctgcacggatggtgccatcggtgcggcagcccagggctggctggtgcgtgcgctctccctcggggacgtggctcgcatcctcgaacccgtgctcctgctgctgctgcagccaaaaacccagagaacctccatccactgcctcaagcaggagaactcggccgatgacttgcaccgttggtttaacaggaagaaaacctctttcagagaggcatgcgcagtgcccgagcctcaggagagcggctctgaagagcacctgcctctgagccagttcaccacagtggaccgtgaagccatttgggccgaagtggagaaggagcccgagaagtacccgctgcgaggcgagctgagcgaggaagagctgccctactacgtggagcttccagacaggacggcccacggcgccccggacagcagcgagcacaccgagtctgcagatacaagctccggccacacggacagcgagaacacgtcctccttctcctccccttcccacgacctgcaggagctgagcaacgaagagaactgctgtgcacccatccacatggggggcagggcgtaccccaagcgctcggccctgctggcggccttccagtcagaaagcttcaaggctggggccaagttaagcctggtgcgggtggactcggacaagacgcaggcttctgagtcgttctccagcgacgaggaggcggacttggagctccaggccctcaccacatccaggctgctaaagcagcagcgggaaaggcaggaggccgtcgaggccttgttcaagcacatcctgctctacctgcagccctacgactctcggcgggtcctctatgccttctcggtgctggaggctgtgctcaaaaccaaccctaaggaattcatcgaggctgtgtccaggactagcatggataccagctccaccgcgcacctcaacctcatctccaacctcctcgctcgccaccaggaggccctcattggccagagtttctacggaaagctccagacccaggtccccaacgtgtgcccccactctctgctcctggagctgctcacctaccnctgcctgagcttcctgcgctcctactacccttgctatttgaaggtctcgcaccgagacattctcggcaaccgggacgtgcaggtcaaaagtgtcgaggttttgatcaggataatgatgcagctggtctcagtggccaagtcttcggaagggaagaacgtggagttcatccacagcttgctgcagaggtgcaaagttcaggagtttgtcctgctctccctgtcggcgtccatgtacacgagccagaagcgctacgggctggccaccgcccaccacggcagggccctgccagaggacagcctctttgaggagagtctcattaacttgggtcaggaccagatctggagtgagcacccgctgcagattgagctgctgaagctgctgcaggtgctgattgtcttggaacaccacctgggtcgggcccatgaggaggcggaaaaccagcccgacctgtcccgggagtggcagagagccctgaacttccagcaggccatcagcgccctgcagtacgtgcagccccaccccctcacctcccagggtcttctggtctctgcggtggtgaggggtctgcagcccgcctacggttacggcatgcatccggcctgggtgagcttggtcacgcattccttgccctacttcggaaagtccctgggctggacggtgacaccctttgttgtccagatttgcaaaaacttggatgacttggtcaagcagtatgaaagcgaatctgtgaagctctctgtcagcacaacctccaagagggaaaacatttctccagattatccactcacccttctagaaggtctaacgaccattagtcatttttgtcttttggaacaagccaaccaaaacaaaaagaccatggctgcaggtgatcctgccaacttgaggaatgccagaaatgccattttggaagagctgcctcgaactgttaacaccatggcccttctctggaatgttctcagaaaggaggagactcaaaagagacctgtcgatctcctaggggccacgaagggatcctcttccgtttactttaaaaccaccaaaaccataagacaaaaaattttagacttcttaaaccccttgacggcccatcttggggttcagttgacagcggctgttgcggcagtgtggagcagaaagaaagcccagcgtcacagtaagatgaagattatcccaacggcaagtgcatcccagctaacccttgtcgacttggtgtgtgcactcagcaccctgcagactgacacgctgctgcacctggtgaaggaggtggtgaagaggccaccccaagtcaaagggggtgatgagaaatcgcccctagtggacattcctgtgttgcagttttgctatgcttttctccaaaggctcccagtaccagccttgcaagagaacttttcttcactgttgggagtattgaaagagtctgtacagttgaatctagccccacctgggtattttctgcttctcagcatgctgaatgactttgtaacaagaactcccaacctggaaaacaagaaggaccaaaaagacctgcaggaaatcactcagaaaatcctagaagctgtggggaacattgccggctcttccttggagcaaaccagctggctaagcagaaacctggaagtgaaggcccaacctcaggcctctctagaagaatctgatgctgaggaggacctgtatgatgctgctgcagcttcagcaatggtgtcttcatccgccccgtcggtgtacagcgtgcaagccctctctctcctggcagaggtactggcttccctcctggacatggtttatcgaagtgatgagaaggagaaagctgtgccgttaatctcccgtctgctttactatgtttttccatacttacgcaaccacagtgcctacaatgctcccagcttccgggctggcgctcagctgctgagctccctgagtggctatgcctacacaaagcgagcctggaggaaggaggtcctggagctgtttctcgaccccgctttctttcagatggatacttcctgtgttcattggaagtccattattgaccatcttttgactcatgagaaaacaatgtttaaggatttaatgaacatgcagagcagttctttgaaactattctcaagttttgaacagaaagccatgctgttaaagcgccaggcttttgctgtcttcagtggagaacttgatcaataccacctttaccttccactgatacaagaacgcctgacagacaatctcagagttggacagacatccatagttgctgctcagatgtttctttttttcagagttttgctgctaagaatatctcctcaacatttgacttcattgtggccaataatggtctctgaattgattcagacattcacacagcttgaagaagatctaaaagatgaagatgagtcattgagaagcaccaacaaagtaaacagaacgaaagtttcagtcccggatgcaaatggaccctcagtgggggagataccccagagtgaactcatcttgtatttatcagcttgcaaattcttggacacagcgctttcttttccacctgacaagatgccattatttcaaatttataggtgggcatttattccagaagtggacacagagggccctgccttcctgtcggatgtagaggagaatcaccaagaatgcaaaccccacactgtcaggattctagaacttctaaaattaaagtttggggaaatcagtagctctgatgagatcaccatgaagagtgaattcccgcttctgcgccaacattctgtttccagcatcaggcagttgatgccattcttcatgactctaaatggtgcatttaagacccagagacagctgcctgctgatagcccaggaactccattcttggactttcctgtcacagatagcccaaggatcttaaaacaactggaagaatgcatcgaatatgattttctggaacatccagaatgttaaccatgtgagagagaatatgtttaatccatgtattggtactttactgaaaaccaggttatattctaaagaagaaagaaggcaggatagtgcttttgaacaagcctatttccattttgaaagtagatttcaggctaggtgcggtggctcacacctgtaatctcagcactttgggaggccaaggcaggcagatcacttgaggtcaggagttcgagaccagcctgaccaacatggtgagaccctgtctctactaaaaatacaaaaattagctgggtgtggtggcggcgcctgtaatcccagctacttgggaggctaaggcatgagaattgcttgaacccaggaggtggaggctgcagtgagccgagatcacgacactgcactccagctgtgtgacagaatgagaccatctccaaaaaaaaaaaaaagtagatttcagataatttactgttcagcaacaggacacacctccctaaatgccttgtaatatatttgaatctgattctgcatttcttcctcaatttatgtaatgaaaataaaattaatatatcatctaacagtagcacaaaatttgtaatatgaagtaaagtatgaagataatgaag

SEQ ID NO: 445183 - DNA, 7173 bp, Homo sapiens
  misc_feature (3516)..(3516): n is a, c, g, or t
acactagagagatccccttgcggtctcatatcttcacttggcaaactcaacaagaacggatgctctgctcctgagactgtcgctggtggttggcaaagaggtgttttacaccgccctctgggggagcgtcctggccagcccgtccatccgcctccctgcctcagtcttcgtggtgggccacatcaacagggatgcccccggccgggagcagaagtacatgctggggaccaatcaccaactcacggtgaagtctttgcgtgcctccctgttggactcaaatgttcttgtgcaaagaaataatctggaaatcgttctgtttttcttcccattttatacctgtctggattccaatgagagagccatccccctcctcagatctgacatcgtgcgcattctctcagccgccacccagaccctactgagaagggacatgtccctgaacagaagactgtatgcatggttactaggctcagacataaaaggaaataccgttgtgccagaatctgaaatctcaaattcttatgaagaccagtcgtcttatttttttgaaaaatactccaaggatcttttagttgagggtttggctgagatattgcatcagaagttcatagatgctgacgtggaggaacgccatcatgcatacctgaagccttttcgcgtcctcatcagtctgcttgacaagccagaaatagggcctcaagtggttgggaatttgtttctcgaagtcatcagggccttttattcttactgcagagatgcccttggctctgatcttaaacttagctacacccagagtggaaattcgctgataagtgcaatcaaggaaaacagaaatgcctctgagattgtcaaaacggtaaatttgctgataacttctctaagcacagactttctctgggattatatgacaaggtgttttgaggaatgctttagaccagtgaagcagcgttacagcgtgaggaacagcgtcagccctccccccacggtctcggagctctgcgccctcctggtcttcctgctggatgtcattcctttggaactttactctgaggtgcatacccagtatctccctcaggtgctcggctgcctggtgcagcctcttgctgaggacatggaggccttaagtttacctgaactcacgcatgccttgaagacgtgtttcaaggtgctcagcaaagtccagatgcctccttcctacctcgacacggagtccaccagcggaacctcgagtccagtaaaaggtgaaaacggcaaaataattttggaaacaaaggcagtgattcccggtgacgaagatgcttcgtttccccctctgaagtctgaggacagtgggatcgggctcagtgcctcgtcaccggagctctctgagcacttgagggttcctcgagtttctctggaaagggacgacgtttggaagaagggcgggagcatgcagaggacgtttctttgcatccaagagctaatcgccaactttgccagcaagaacatttttggagtacagctgacagcgtcaggagaagaaagcaagtccgaggagcctgcagggaagagggacagggatgggacgcagagcctggcagccaatgattccagcaggaagaactcttgggagcccaagcccatcactgtgcctcagttcaagcagatgctgtcagacttgttcacagcacgagggtctccattcaagacaaaaagttcagagtcaccatcgtcttcgcccagcagccctgccaggaaaaacgggggagaatgggatgttgagaaggtggtcattgacctggggggttccagggaggaacgcagggaggcctttgccgccgcctgccacctgctgctggattgtgccactttccctgtctacctgtccgaggaagagaccgagcagctctgtgcaacgctcttccagctgccaggagccggtgattccagttttccatcttggctgaagtccctcatgactatttgctgctgtgtgactgactgctacctccagaacgtggccatttccactctgctggaagtgataaaccattcccagtccctggcgcttgtcattgaagacaagatgaaacgctataagagctctggacacaaccctttttttggcaagctgcagatggtgacggttcctcccattgctccagggatattgaaagtcattgcagagaaaacagatttctatcagagggtggctcgtgtgctttggaatcagctgaacaaagagacccgggagcatcacgtcacctgcgtagaattgttctaccggctgcactgcctggcccctacggccaacatctgcgaggacatcatctgccatgccctcctggaccctgacaagggaacaaggctggaagctctgtttagattttccgtgatctggcatctgacaagagagatccaaggcagtcgagtaacatctcacaatcgctcctttgataggtccttgtttgtcgtgctggacagcctggcctgcacggatggtgccatcggtgcggcagcccagggctggctggtgcgtgcgctctccctcggggacgtggctcgcatcctcgaacccgtgctcctgctgctgctgcagccaaaaacccagagaacctccatccactgcctcaagcaggagaactcggccgatgacttgcaccgttggtttaacaggaagaaaacctctttcagagaggcatgcgcagtgcccgagcctcaggagagcggctctgaagagcacctgcctctgagccagttcaccacagtggaccgtgaagccatttgggccgaagtggagaaggagcccgagaagtacccgctgcgaggcgagctgagcgaggaagagctgccctactacgtggagcttccagacaggacggcccacggcgccccggacagcagcgagcacaccgagtctgcagatacaagctccggccacacggacagcgagaacacgtcctccttctcctccccttcccacgacctgcaggagctgagcaacgaagagaactgctgtgcacccatccacatggggggcagggcgtaccccaagcgctcggccctgctggcggccttccagtcagaaagcttcaaggctggggccaagttaagcctggtgcgggtggactcggacaagacgcaggcttctgagtcgttctccagcgacgaggaggcggacttggagctccaggccctcaccacatccaggctgctaaagcagcagcgggaaaggcaggaggccgtcgaggccttgttcaagcacatcctgctctacctgcagccctacgactctcggcgggtcctctatgccttctcggtgctggaggctgtgctcaaaaccaaccctaaggaattcatcgaggctgtgtccaggactagcatggataccagctccaccgcgcacctcaacctcatctccaacctcctcgctcgccaccaggaggccctcattggccagagtttctacggaaagctccagacccaggtccccaacgtgtgcccccactctctgctcctggagctgctcacctaccnctgcctgagcttcctgcgctcctactacccttgctatttgaaggtctcgcaccgagacattctcggcaaccgggacgtgcaggtcaaaagtgtcgaggttttgatcaggataatgatgcagctggtctcagtggccaagtcttcggaagggaagaacgtggagttcatccacagcttgctgcagaggtgcaaagttcaggagtttgtcctgctctccctgtcggcgtccatgtacacgagccagaagcgctacgggctggccaccgcccaccacggcagggccctgccagaggacagcctctttgaggagagtctcattaacttgggtcaggaccagatctggagtgagcacccgctgcagattgagctgctgaagctgctgcaggtgctgattgtcttggaacaccacctgggtcgggcccatgaggaggcggaaaaccagcccgacctgtcccgggagtggcagagagccctgaacttccagcaggccatcagcgccctgcagtacgtgcagccccaccccctcacctcccagggtcttctggtctctgcggtggtgaggggtctgcagcccgcctacggttacggcatgcatccggcctgggtgagcttggtcacgcattccttgccctacttcggaaagtccctgggctggacggtgacaccctttgttgtccagatttgcaaaaacttggatgacttggtcaagcagtatgaaagcgaatctgtgaagctctctgtcagcacaacctccaagagggaaaacatttctccagattatccactcacccttctagaaggtctaacgaccattagtcatttttgtcttttggaacaagccaaccaaaacaaaaagaccatggctgcaggtgatcctgccaacttgaggaatgccagaaatgccattttggaagagctgcctcgaactgttaacaccatggcccttctctggaatgttctcagaaaggaggagactcaaaagagacctgtcgatctcctaggggccacgaagggatcctcttccgtttactttaaaaccaccaaaaccataagacaaaaaattttagacttcttaaaccccttgacggcccatcttggggttcagttgacagcggctgttgcggcagtgtggagcagaaagaaagcccagcgtcacagtaagatgaagattatcccaacggcaagtgcatcccagctaacccttgtcgacttggtgtgtgcactcagcaccctgcagactgacacgctgctgcacctggtgaaggaggtggtgaagaggccaccccaagtcaaagggggtgatgagaaatcgcccctagtggacattcctgtgttgcagttttgctatgcttttctccaaaggctcccagtaccagccttgcaagagaacttttcttcactgttgggagtattgaaagagtctgtacagttgaatctagccccacctgggtattttctgcttctcagcatgctgaatgactttgtaacaagaactcccaacctggaaaacaagaaggaccaaaaagacctgcaggaaatcactcagaaaatcctagaagctgtggggaacattgccggctcttccttggagcaaaccagctggctaagcagaaacctggaagtgaaggcccaacctcaggcctctctagaagaatctgatgctgaggaggacctgtatgatgctgctgcagcttcagcaatggtgtcttcatccgccccgtcggtgtacagcgtgcaagccctctctctcctggcagaggtactggcttccctcctggacatggtttatcgaagtgatgagaaggagaaagctgtgccgttaatctcccgtctgctttactatgtttttccatacttacgcaaccacagtgcctacaatgctcccagcttccgggctggcgctcagctgctgagctccctgagtggctatgcctacacaaagcgagcctggaggaaggaggtcctggagctgtttctcgaccccgctttctttcagatggatacttcctgtgttcattggaagtccattattgaccatcttttgactcatgagaaaacaatgtttaaggatttaatgaacatgcagagcagttctttgaaactattctcaagttttgaacagaaagccatgctgttaaagcgccaggcttttgctgtcttcagtggagaacttgatcaataccacctttaccttccactgatacaagaacgcctgacagacaatctcagagttggacagacatccatagttgctgctcagatgtttctttttttcagagttttgctgctaagaatatctcctcaacatttgacttcattgtggccaataatggtctctgaattgattcagacattcacacagcttgaagaagatctaaaagatgaagatgagtcattgagaagcaccaacaaagtaaacagaacgaaagtttcagtcccggatgcaaatggaccctcagtgggggagataccccagagtgaactcatcttgtatttatcagcttgcaaattcttggacacagcgctttcttttccacctgacaagatgccattatttcaaatttataggtgggcatttattccagaagtggacacagagggccctgccttcctgtcggatgtagaggagaatcaccaagaatgcaaaccccacactgtcaggattctagaacttctaaaattaaagtttggggaaatcagtagctctgatgagatcaccatgaagagtgaattcccgcttctgcgccaacattctgtttccagcatcaggcagttgatgccattcttcatgactctaaatggtgcatttaagacccagagacagctgcctgctgatagcccaggaactccattcttggactttcctgtcacagatagcccaaggatcttaaaacaactggaagaatgcatcgaatatgattttctggaacatccagaatgttaaccatgtgagagagaatatgtttaatccatgtattggtactttactgaaaaccaggttatattctaaagaagaaagaaggcaggatagtgcttttgaacaagcctatttccattttgaaagtagatttcaggctaggtgcggtggctcacacctgtaatctcagcactttgggaggccaaggcaggcagatcacttgaggtcaggagttcgagaccagcctgaccaacatggtgagaccctgtctctactaaaaatacaaaaattagctgggtgtggtggcggcgcctgtaatcccagctacttgggaggctaaggcatgagaattgcttgaacccaggaggtggaggctgcagtgagccgagatcacgacactgcactccagctgtgtgacagaatgagaccatctccaaaaaaaaaaaaaagtagatttcagataatttactgttcagcaacaggacacacctccctaaatgccttgtaatatatttgaatctgattctgcatttcttcctcaatttatgtaatgaaaataaaattaatatatcatctaacagtagcacaaaatttgtaatatgaagtaaagtatgaagataatgaagaagttgttttctttgttgaagcagttatatgggtctttctcagtatatttctcttttctctaaaagtttaaacttattaaaagaatgttatttttaacctttcacacaaatgtc

SEQ ID NO: 445184 - DNA, 6876 bp, Homo sapiens
  misc_feature (4038)..(4038): n is a, c, g, or t
  misc_feature (6248)..(6248): n is a, c, g, or t
  misc_feature (6312)..(6312): n is a, c, g, or t
ttcttgtcccacagtgcctggcccagaagccttgctaaatatttgaacaggattgcccaatacttttctgctgtgagaatgtaagatggatccagaagagcaggagctcttaaatgattacagatacagaagctactcttcagtgattgaaaaggctttgagaaattttgagtcctcgagtgaatgggcggatctcatatcttcacttggcaaactcaacaaggctcttcagagtaacctgaggtactccttgttgccaagacggctcctcatcagcaaaagattagctcagtgtttgcaccctgccctgcccagtggtgtccacttaaaagctctggaaacctacgagattatctttaaaatcgtggggaccaaatggctggccaaggacttgtttctgtacagctgcgggttatttcctctcctggcacacgcggcggtgtcggtgaggccggtgctgctcaccctgtacgagaagtacttcctcccactgcagaagctgctcctgcccagtctgcaggccttcatcgtgggcctgctgcccggccttgaagagggctccgagatctccgacagaacggatgctctgctcctgagactgtcgctggtggttggcaaagaggtgttttacaccgccctctgggggagcgtcctggccagcccgtccatccgcctccctgcctcagtcttcgtggtgggccacatcaacagggatgcccccggccgggagcagaagtacatgctggggaccaatcaccaactcacggtgaagtctttgcgtgcctccctgttggactcaaatgttcttgtgcaaagaaataatctggaaatcgttctgtttttcttcccattttatacctgtctggattccaatgagagagccatccccctcctcagatctgacatcgtgcgcattctctcagccgccacccagaccctactgagaagggacatgtccctgaacagaagactgtatgcatggttactaggctcagacataaaaggaaataccgttgtgccagaatctgaaatctcaaattcttatgaagaccagtcgtcttatttttttgaaaaatactccaaggatcttttagttgagggtttggctgagatattgcatcagaagttcatagatgctgacgtggaggaacgccatcatgcatacctgaagccttttcgcgtcctcatcagtctgcttgacaagccagaaatagggcctcaagtggttgggaatttgtttctcgaagtcatcagggccttttattcttactgcagagatgcccttggctctgatcttaaacttagctacacccagagtggaaattcgctgataagtgcaatcaaggaaaacagaaatgcctctgagattgtcaaaacggtaaatttgctgataacttctctaagcacagactttctctgggattatatgacaaggtgttttgaggaatgctttagaccagtgaagcagcgttacagcgtgaggaacagcgtcagccctccccccacggtctcggagctctgcgccctcctggtcttcctgctggatgtcattcctttggaactttactctgaggtgcatacccagtatctccctcaggtgctcggctgcctggtgcagcctcttgctgaggacatggaggccttaagtttacctgaactcacgcatgccttgaagacgtgtttcaaggtgctcagcaaagtccagatgcctccttcctacctcgacacggagtccaccagcggaacctcgagtccagtaaaaggtgaaaacggcaaaataattttggaaacaaaggcagtgattcccggtgacgaagatgcttcgtttccccctctgaagtctgaggacagtgggatcgggctcagtgcctcgtcaccggagctctctgagcacttgagggttcctcgagtttctctggaaagggacgacgtttggaagaagggcgggagcatgcagaggacgtttctttgcatccaagagctaatcgccaactttgccagcaagaacatttttggagtacagctgacagcgtcaggagaagaaagcaagtccgaggagcctgcagggaagagggacagggatgggacgcagagcctggcagccaatgattccagcaggaagaactcttgggagcccaagcccatcactgtgcctcagttcaagcagatgctgtcagacttgttcacagcacgagggtctccattcaagacaaaaagttcagagtcaccatcgtcttcgcccagcagccctgccaggaaaaacgggggagaatgggatgttgagaaggtggtcattgacctggggggttccagggaggaacgcagggaggcctttgccgccgcctgccacctgctgctggattgtgccactttccctgtctacctgtccgaggaagagaccgagcagctctgtgcaacgctcttccagctgccaggagccggtgattccagttttccatcttggctgaagtccctcatgactatttgctgctgtgtgactgactgctacctccagaacgtggccatttccactctgctggaagtgataaaccattcccagtccctggcgcttgtcattgaagacaagatgaaacgctataagagctctggacacaaccctttttttggcaagctgcagatggtgacggttcctcccattgctccagggatattgaaagtcattgcagagaaaacagatttctatcagagggtggctcgtgtgctttggaatcagctgaacaaagagacccgggagcatcacgtcacctgcgtagaattgttctaccggctgcactgcctggcccctacggccaacatctgcgaggacatcatctgccatgccctcctggaccctgacaagggaacaaggctggaagctctgtttagattttccgtgatctggcatctgacaagagagatccaaggcagtcgagtaacatctcacaatcgctcctttgataggtccttgtttgtcgtgctggacagcctggcctgcacggatggtgccatcggtgcggcagcccagggctggctggtgcgtgcgctctccctcggggacgtggctcgcatcctcgaacccgtgctcctgctgctgctgcagccaaaaacccagagaacctccatccactgcctcaagcaggagaactcggccgatgacttgcaccgttggtttaacaggaagaaaacctctttcagagaggcatgcgcagtgcccgagcctcaggagagcggctctgaagagcacctgcctctgagccagttcaccacagtggaccgtgaagccatttgggccgaagtggagaaggagcccgagaagtacccgctgcgaggcgagctgagcgaggaagagctgccctactacgtggagcttccagacaggacggcccacggcgccccggacagcagcgagcacaccgagtctgcagatacaagctccggccacacggacagcgagaacacgtcctccttctcctccccttcccacgacctgcaggagctgagcaacgaagagaactgctgtgcacccatccacatggggggcagggcgtaccccaagcgctcggccctgctggcggccttccagtcagaaagcttcaaggctggggccaagttaagcctggtgcgggtggactcggacaagacgcaggcttctgagtcgttctccagcgacgaggaggcggacttggagctccaggccctcaccacatccaggctgctaaagcagcagcgggaaaggcaggaggccgtcgaggccttgttcaagcacatcctgctctacctgcagccctacgactctcggcgggtcctctatgccttctcggtgctggaggctgtgctcaaaaccaaccctaaggaattcatcgaggctgtgtccaggactagcatggataccagctccaccgcgcacctcaacctcatctccaacctcctcgctcgccaccaggaggccctcattggccagagtttctacggaaagctccagacccaggtccccaacgtgtgcccccactctctgctcctggagctgctcacctaccnctgcctgagcttcctgcgctcctactacccttgctatttgaaggtctcgcaccgagacattctcggcaaccgggacgtgcaggtcaaaagtgtcgaggttttgatcaggataatgatgcagctggtctcagtggccaagtcttcggaagggaagaacgtggagttcatccacagcttgctgcagaggtgcaaagttcaggagtttgtcctgctctccctgtcggcgtccatgtacacgagccagaagcgctacgggctggccaccgcccaccacggcagggccctgccagaggacagcctctttgaggagagtctcattaacttgggtcaggaccagatctggagtgagcacccgctgcagattgagctgctgaagctgctgcaggtgctgattgtcttggaacaccacctgggtcgggcccatgaggaggcggaaaaccagcccgacctgtcccgggagtggcagagagccctgaacttccagcaggccatcagcgccctgcagtacgtgcagccccaccccctcacctcccagggtcttctggtctctgcggtggtgaggggtctgcagcccgcctacggttacggcatgcatccggcctgggtgagcttggtcacgcattccttgccctacttcggaaagtccctgggctggacggtgacaccctttgttgtccagatttgcaaaaacttggatgacttggtcaagcagtatgaaagcgaatctgtgaagctctctgtcagcacaacctccaagagggaaaacatttctccagattatccactcacccttctagaaggtctaacgaccattagtcatttttgtcttttggaacaagccaaccaaaacaaaaagaccatggctgcaggtgatcctgccaacttgaggaatgccagaaatgccattttggaagagctgcctcgaactgttaacaccatggcccttctctggaatgttctcagaaaggaggagactcaaaagagacctgtcgatctcctaggggccacgaagggatcctcttccgtttactttaaaaccaccaaaaccataagacaaaaaattttagacttcttaaaccccttgacggcccatcttggggttcagttgacagcggctgttgcggcagtgtggagcagaaagaaagcccagcgtcacagtaagatgaagattatcccaacggcaagtgcatcccagctaacccttgtcgacttggtgtgtgcactcagcaccctgcagactgacacgctgctgcacctggtgaaggaggtggtgaagaggccaccccaagtcaaagggggtgatgagaaatcgcccctagtggacattcctgtgttgcagttttgctatgcttttctccaaaggtaatacagtcccccgtcctccaaaaacttccttaaatacagatgctattgcagtgagcatgcataataaatatctggttttatttctagactactagagagccattgttcagaaaatatcttaaagttgtcataatttcttcccaaggtattgatctatgcttttccttctccagagagttaacatcttaaaatctgtgcagcgtactttgaacactttatatgagcgaagctttatgtgaggcctgttaaactttaaaaggcttggatttgcattaaattgatacagaaaaagaaaaaaaccacatatagggaagtgttaaagacctcttttagaaaaaggagaaatgggccaggcgcggtggctcacacctgcaatcccagcactttgggaggtggaggcaggcggatcacttgaggccaggagtttgagaccagcctagtcaacatggtgaaaccctatctctactaaaaatacaaaaattagtccggcatggtggcgtgcgcctgtaatcccagctactcgggaggctgaggcaggagaattgcatgaacccaggaggcggaggttgcagcgagccaagacctcaccactgctctccagcctgggtgacagagcaaggctctgtctcaaaaaaaaaaaaaaaaaaaaggcaaaatgattgtttctggtggcgttctcagtgtgccttcccatgttttatgtggagaggtatctgctttgatttgctaagttaatatatgtattaggtgtctcagctaagagagcattaaaggggattccgcaggtttttccccatggatgaaaaagaagctttactggacctcattcagatcttacaatggcngcatcccaggtgcagctctgtgttgcagaaaatgagggtgaggtggctgggtgcggtggctcancgcctgtaatcccagcactttgggaggctagagtgggtgagtcacttgaggccaggagtttgagaccagcctggccaacgtggtaaaaccctatgtctactaaaactacaaaaaattagccagggcttggtggcagcatgcctgtagtcccagtgggaggctaaggcatgagaattgcttgaacccaggaggtggaggctgcagtgagccgagatcacgacactgcactccagctgtgtgacagaatgagaccatctccaaaaaaaaaaaaaagtagatttcagataatttactgttcagcaacaggacacacctccctaaatgccttgtaatatatttgaatctgattctgcatttcttcctcaatttatgtaatgaaaataaaattaatatatcatctaacagtagcacaaaatttgtaatatgaagtaaagtatgaagataatgaagaagttgttttctttgttgaagcagttatatgggtctttctcagtatatttctcttttctctaaaagtttaaacttattaaaagaatgttatttttaacctttcacacaaatgtc

SEQ ID NO: 445185 - DNA, 6599 bp, Homo sapiens
  misc_feature (4038)..(4038): n is a, c, g, or t
ttcttgtcccacagtgcctggcccagaagccttgctaaatatttgaacaggattgcccaatacttttctgctgtgagaatgtaagatggatccagaagagcaggagctcttaaatgattacagatacagaagctactcttcagtgattgaaaaggctttgagaaattttgagtcctcgagtgaatgggcggatctcatatcttcacttggcaaactcaacaaggctcttcagagtaacctgaggtactccttgttgccaagacggctcctcatcagcaaaagattagctcagtgtttgcaccctgccctgcccagtggtgtccacttaaaagctctggaaacctacgagattatctttaaaatcgtggggaccaaatggctggccaaggacttgtttctgtacagctgcgggttatttcctctcctggcacacgcggcggtgtcggtgaggccggtgctgctcaccctgtacgagaagtacttcctcccactgcagaagctgctcctgcccagtctgcaggccttcatcgtgggcctgctgcccggccttgaagagggctccgagatctccgacagaacggatgctctgctcctgagactgtcgctggtggttggcaaagaggtgttttacaccgccctctgggggagcgtcctggccagcccgtccatccgcctccctgcctcagtcttcgtggtgggccacatcaacagggatgcccccggccgggagcagaagtacatgctggggaccaatcaccaactcacggtgaagtctttgcgtgcctccctgttggactcaaatgttcttgtgcaaagaaataatctggaaatcgttctgtttttcttcccattttatacctgtctggattccaatgagagagccatccccctcctcagatctgacatcgtgcgcattctctcagccgccacccagaccctactgagaagggacatgtccctgaacagaagactgtatgcatggttactaggctcagacataaaaggaaataccgttgtgccagaatctgaaatctcaaattcttatgaagaccagtcgtcttatttttttgaaaaatactccaaggatcttttagttgagggtttggctgagatattgcatcagaagttcatagatgctgacgtggaggaacgccatcatgcatacctgaagccttttcgcgtcctcatcagtctgcttgacaagccagaaatagggcctcaagtggttgggaatttgtttctcgaagtcatcagggccttttattcttactgcagagatgcccttggctctgatcttaaacttagctacacccagagtggaaattcgctgataagtgcaatcaaggaaaacagaaatgcctctgagattgtcaaaacggtaaatttgctgataacttctctaagcacagactttctctgggattatatgacaaggtgttttgaggaatgctttagaccagtgaagcagcgttacagcgtgaggaacagcgtcagccctccccccacggtctcggagctctgcgccctcctggtcttcctgctggatgtcattcctttggaactttactctgaggtgcatacccagtatctccctcaggtgctcggctgcctggtgcagcctcttgctgaggacatggaggccttaagtttacctgaactcacgcatgccttgaagacgtgtttcaaggtgctcagcaaagtccagatgcctccttcctacctcgacacggagtccaccagcggaacctcgagtccagtaaaaggtgaaaacggcaaaataattttggaaacaaaggcagtgattcccggtgacgaagatgcttcgtttccccctctgaagtctgaggacagtgggatcgggctcagtgcctcgtcaccggagctctctgagcacttgagggttcctcgagtttctctggaaagggacgacgtttggaagaagggcgggagcatgcagaggacgtttctttgcatccaagagctaatcgccaactttgccagcaagaacatttttggagtacagctgacagcgtcaggagaagaaagcaagtccgaggagcctgcagggaagagggacagggatgggacgcagagcctggcagccaatgattccagcaggaagaactcttgggagcccaagcccatcactgtgcctcagttcaagcagatgctgtcagacttgttcacagcacgagggtctccattcaagacaaaaagttcagagtcaccatcgtcttcgcccagcagccctgccaggaaaaacgggggagaatgggatgttgagaaggtggtcattgacctggggggttccagggaggaacgcagggaggcctttgccgccgcctgccacctgctgctggattgtgccactttccctgtctacctgtccgaggaagagaccgagcagctctgtgcaacgctcttccagctgccaggagccggtgattccagttttccatcttggctgaagtccctcatgactatttgctgctgtgtgactgactgctacctccagaacgtggccatttccactctgctggaagtgataaaccattcccagtccctggcgcttgtcattgaagacaagatgaaacgctataagagctctggacacaaccctttttttggcaagctgcagatggtgacggttcctcccattgctccagggatattgaaagtcattgcagagaaaacagatttctatcagagggtggctcgtgtgctttggaatcagctgaacaaagagacccgggagcatcacgtcacctgcgtagaattgttctaccggctgcactgcctggcccctacggccaacatctgcgaggacatcatctgccatgccctcctggaccctgacaagggaacaaggctggaagctctgtttagattttccgtgatctggcatctgacaagagagatccaaggcagtcgagtaacatctcacaatcgctcctttgataggtccttgtttgtcgtgctggacagcctggcctgcacggatggtgccatcggtgcggcagcccagggctggctggtgcgtgcgctctccctcggggacgtggctcgcatcctcgaacccgtgctcctgctgctgctgcagccaaaaacccagagaacctccatccactgcctcaagcaggagaactcggccgatgacttgcaccgttggtttaacaggaagaaaacctctttcagagaggcatgcgcagtgcccgagcctcaggagagcggctctgaagagcacctgcctctgagccagttcaccacagtggaccgtgaagccatttgggccgaagtggagaaggagcccgagaagtacccgctgcgaggcgagctgagcgaggaagagctgccctactacgtggagcttccagacaggacggcccacggcgccccggacagcagcgagcacaccgagtctgcagatacaagctccggccacacggacagcgagaacacgtcctccttctcctccccttcccacgacctgcaggagctgagcaacgaagagaactgctgtgcacccatccacatggggggcagggcgtaccccaagcgctcggccctgctggcggccttccagtcagaaagcttcaaggctggggccaagttaagcctggtgcgggtggactcggacaagacgcaggcttctgagtcgttctccagcgacgaggaggcggacttggagctccaggccctcaccacatccaggctgctaaagcagcagcgggaaaggcaggaggccgtcgaggccttgttcaagcacatcctgctctacctgcagccctacgactctcggcgggtcctctatgccttctcggtgctggaggctgtgctcaaaaccaaccctaaggaattcatcgaggctgtgtccaggactagcatggataccagctccaccgcgcacctcaacctcatctccaacctcctcgctcgccaccaggaggccctcattggccagagtttctacggaaagctccagacccaggtccccaacgtgtgcccccactctctgctcctggagctgctcacctaccnctgcctgagcttcctgcgctcctactacccttgctatttgaaggtctcgcaccgagacattctcggcaaccgggacgtgcaggtcaaaagtgtcgaggttttgatcaggataatgatgcagctggtctcagtggccaagtcttcggaagggaagaacgtggagttcatccacagcttgctgcagaggtgcaaagttcaggagtttgtcctgctctccctgtcggcgtccatgtacacgagccagaagcgctacgggctggccaccgcccaccacggcagggccctgccagaggacagcctctttgaggagagtctcattaacttgggtcaggaccagatctggagtgagcacccgctgcagattgagctgctgaagctgctgcaggtgctgattgtcttggaacaccacctgggtcgggcccatgaggaggcggaaaaccagcccgacctgtcccgggagtggcagagagccctgaacttccagcaggccatcagcgccctgcagtacgtgcagccccaccccctcacctcccagggtcttctggtctctgcggtggtgaggggtctgcagcccgcctacggttacggcatgcatccggcctgggtgagcttggtcacgcattccttgccctacttcggaaagtccctgggctggacggtgacaccctttgttgtccagatttgcaaaaacttggatgacttggtcaagcagtatgaaagcgaatctgtgaagctctctgtcagcacaacctccaagagggaaaacatttctccagattatccactcacccttctagaaggtctaacgaccattagtcatttttgtcttttggaacaagccaaccaaaacaaaaagaccatggctgcaggtgatcctgccaacttgaggaatgccagaaatgccattttggaagagctgcctcgaactgttaacaccatggcccttctctggaatgttctcagaaaggaggagactcaaaagagacctgtcgatctcctaggggccacgaagggatcctcttccgtttactttaaaaccaccaaaaccataagacaaaaaattttagacttcttaaaccccttgacggcccatcttggggttcagttgacagcggctgttgcggcagtgtggagcagaaagaaagcccagcgtcacagtaagatgaagattatcccaacggcaagtgcatcccagctaacccttgtcgacttggtgtgtgcactcagcaccctgcagactgacacgctgctgcacctggtgaaggaggtggtgaagaggccaccccaagtcaaagggggtgatgagaaatcgcccctagtggacattcctgtgttgcagttttgctatgcttttctccaaaggctcccagtaccagccttgcaagagaacttttcttcactgttgggagtattgaaagagtctgtacagttgaatctagccccacctgggtattttctgcttctcagcatgctgaatgactttgtaacaagaactcccaacctggaaaacaagaaggaccaaaaagacctgcaggaaatcactcagaaaatcctagaagctgtggggaacattgccggctcttccttggagcaaaccagctggctaagcagaaacctggaagtgaaggcccaacctcaggcctctctagaagaatctgatgctgaggaggacctgtatgatgctgctgcagcttcagcaatggtgtcttcatccgccccgtcggtgtacagcgtgcaagccctctctctcctggcagaggtactggcttccctcctggacatggtttatcgaagtgatgagaaggagaaagctgtgccgttaatctcccgtctgctttactatgtttttccatacttacgcaaccacagtgcctacaatgctcccagcttccgggctggcgctcagctgctgagctccctgagtggctatgcctacacaaagcgagcctggaggaaggaggtcctggagctgtttctcgaccccgctttctttcagatggatacttcctgtgttcattggaagtccattattgaccatcttttgactcatgagaaaacaatgtttaaggatttaatgaacatgcagagcagttctttgaaactattctcaagttttgaacagaaagccatgctgttaaagcgccaggcttttgctgtcttcagtggagaacttgatcaataccacctttaccttccactgatacaagaacgcctgacagacaatctcagagttggacagacatccatagttgctgctcagatgtttctttttttcagagttttgctgctaagaatatctcctcaacatttgacttcattgtggccaataatggtctctgaattgattcagacattcacacagcttgaagaagatctaaaagatgaagatgagtcattgagaagcacccaccaagtaaacagaacgaaagtttcagtccggagtaatccaggtcggtttctatctacttcaaattcctccctgtacgataggacagagaaataaagcctacttcaccaagcgccttcccccgagtgtcttcttgaggtcctctaatcagccc

SEQ ID NO: 445186 - DNA, 509 bp, Homo sapiens
tccttcctgttcttcaagcccagctttcccgtggagcatcattgttctctgcagttgaaagagctctcctcttctgaactctgagcgtttgtctgtggctctaatttcttatgcatctctagtctacctatctgtattcagaaaagacactcagaatatctactgaattgatcaggaattattttcccatgtgtcttcagagctttagtttaaggttcctgttggatcctttctgggatcgtagaatttgagatcatagaacccggccatctggtccaaacccctccggctctcacgtggaacagtgaggtctgcagctgaacgtcttctccgatgtcacgcagcctgtggcctcgagagctagaacccacaccctcctgacctgtggctgctggttctcttctgagtgatataacgcaggagtttcaagattcccgggaaaggttactttcgtttttatgatcataaagagtagcctgaaaatgctagtgccgtttgatcgtttacag

SEQ ID NO: 445187 - DNA, 333 bp, Homo sapiens
aataatctggaaatcgttctgtttttcttcccattttatacctgtctggtaagtaatttgtactcttctggtaagtcactggtgtttcccaaggggtgggatatagatctcaagcagttctgtcgtacgaggacagctcagccactcatgggcattatttgctggtagccagtgaaaagtccttgttcatttttgcaaggatagcgttttcattgcacgtattgaatagcttctttccatgggtaatgtgtaaggaaccagcccattttgagatagagctttgcagaccagcaaggaagggctgcgtgtcaaaaagtcagcaatctgccctat

SEQ ID NO: 445188 - DNA, 193 bp, Homo sapiens
atgctgctgcagcttcagcaatggtgtcttcatccgccccgtcggtgtacagcgtgcaagccctctctctcctggcagaggtaaatacacacctgacctgtcgtcctttatggaaatgagcgccatcacgaattgttgcaaagacatttgttcattcccaggtgccagtgagcgtgggccgcaccctcccagg

SEQ ID NO: 445189 - DNA, 692 bp, Homo sapiens
cgtggttctgcttgtttctgcctctccggctggcttcctttcaggagccggtgattccagttttccatcttggctgaagtccctcatgactatttgctgctgtgtgactgactgctacctccagaacgtggccatttccactctgctggaagtgataaaccattcccagtccctggcgcttgtcattgaagacaagatgaaacgctataagagctctggacacaaccctttttttggcaagctgcagatggtgacggttcctcccattgctccagggatattgaaagtcattgcagagaaaacagatttctatcaggtatttcccactgggaacactcttcttatggcctccttctccccctgagcaaaactcagaaccgtattgctggggatgggggcagtggcccacttctctgagagtgatattctatagggcactgggcagaggcagtagcctttggtcttcctctcccagcatgtaactttcaccctccaggaaagctacagtgagagcaactggggccccagtattctgggcctgccaggactgagtggaacccctgcctgggagtggggtctgggtggaggcagggagcccatgactcctccactgcactcacctggatttagcctctgccacatccagcagaggggtgggaaggtgacgtgctggtggcctgcccctcccagga

SEQ ID NO: 445190 - DNA, 7695 bp, Homo sapiens
  misc_feature (4038)..(4038): n is a, c, g, or t
ttcttgtcccacagtgcctggcccagaagccttgctaaatatttgaacaggattgcccaatacttttctgctgtgagaatgtaagatggatccagaagagcaggagctcttaaatgattacagatacagaagctactcttcagtgattgaaaaggctttgagaaattttgagtcctcgagtgaatgggcggatctcatatcttcacttggcaaactcaacaaggctcttcagagtaacctgaggtactccttgttgccaagacggctcctcatcagcaaaagattagctcagtgtttgcaccctgccctgcccagtggtgtccacttaaaagctctggaaacctacgagattatctttaaaatcgtggggaccaaatggctggccaaggacttgtttctgtacagctgcgggttatttcctctcctggcacacgcggcggtgtcggtgaggccggtgctgctcaccctgtacgagaagtacttcctcccactgcagaagctgctcctgcccagtctgcaggccttcatcgtgggcctgctgcccggccttgaagagggctccgagatctccgacagaacggatgctctgctcctgagactgtcgctggtggttggcaaagaggtgttttacaccgccctctgggggagcgtcctggccagcccgtccatccgcctccctgcctcagtcttcgtggtgggccacatcaacagggatgcccccggccgggagcagaagtacatgctggggaccaatcaccaactcacggtgaagtctttgcgtgcctccctgttggactcaaatgttcttgtgcaaagaaataatctggaaatcgttctgtttttcttcccattttatacctgtctggattccaatgagagagccatccccctcctcagatctgacatcgtgcgcattctctcagccgccacccagaccctactgagaagggacatgtccctgaacagaagactgtatgcatggttactaggctcagacataaaaggaaataccgttgtgccagaatctgaaatctcaaattcttatgaagaccagtcgtcttatttttttgaaaaatactccaaggatcttttagttgagggtttggctgagatattgcatcagaagttcatagatgctgacgtggaggaacgccatcatgcatacctgaagccttttcgcgtcctcatcagtctgcttgacaagccagaaatagggcctcaagtggttgggaatttgtttctcgaagtcatcagggccttttattcttactgcagagatgcccttggctctgatcttaaacttagctacacccagagtggaaattcgctgataagtgcaatcaaggaaaacagaaatgcctctgagattgtcaaaacggtaaatttgctgataacttctctaagcacagactttctctgggattatatgacaaggtgttttgaggaatgctttagaccagtgaagcagcgttacagcgtgaggaacagcgtcagccctccccccacggtctcggagctctgcgccctcctggtcttcctgctggatgtcattcctttggaactttactctgaggtgcatacccagtatctccctcaggtgctcggctgcctggtgcagcctcttgctgaggacatggaggccttaagtttacctgaactcacgcatgccttgaagacgtgtttcaaggtgctcagcaaagtccagatgcctccttcctacctcgacacggagtccaccagcggaacctcgagtccagtaaaaggtgaaaacggcaaaataattttggaaacaaaggcagtgattcccggtgacgaagatgcttcgtttccccctctgaagtctgaggacagtgggatcgggctcagtgcctcgtcaccggagctctctgagcacttgagggttcctcgagtttctctggaaagggacgacgtttggaagaagggcgggagcatgcagaggacgtttctttgcatccaagagctaatcgccaactttgccagcaagaacatttttggagtacagctgacagcgtcaggagaagaaagcaagtccgaggagcctgcagggaagagggacagggatgggacgcagagcctggcagccaatgattccagcaggaagaactcttgggagcccaagcccatcactgtgcctcagttcaagcagatgctgtcagacttgttcacagcacgagggtctccattcaagacaaaaagttcagagtcaccatcgtcttcgcccagcagccctgccaggaaaaacgggggagaatgggatgttgagaaggtggtcattgacctggggggttccagggaggaacgcagggaggcctttgccgccgcctgccacctgctgctggattgtgccactttccctgtctacctgtccgaggaagagaccgagcagctctgtgcaacgctcttccagctgccaggagccggtgattccagttttccatcttggctgaagtccctcatgactatttgctgctgtgtgactgactgctacctccagaacgtggccatttccactctgctggaagtgataaaccattcccagtccctggcgcttgtcattgaagacaagatgaaacgctataagagctctggacacaaccctttttttggcaagctgcagatggtgacggttcctcccattgctccagggatattgaaagtcattgcagagaaaacagatttctatcagagggtggctcgtgtgctttggaatcagctgaacaaagagacccgggagcatcacgtcacctgcgtagaattgttctaccggctgcactgcctggcccctacggccaacatctgcgaggacatcatctgccatgccctcctggaccctgacaagggaacaaggctggaagctctgtttagattttccgtgatctggcatctgacaagagagatccaaggcagtcgagtaacatctcacaatcgctcctttgataggtccttgtttgtcgtgctggacagcctggcctgcacggatggtgccatcggtgcggcagcccagggctggctggtgcgtgcgctctccctcggggacgtggctcgcatcctcgaacccgtgctcctgctgctgctgcagccaaaaacccagagaacctccatccactgcctcaagcaggagaactcggccgatgacttgcaccgttggtttaacaggaagaaaacctctttcagagaggcatgcgcagtgcccgagcctcaggagagcggctctgaagagcacctgcctctgagccagttcaccacagtggaccgtgaagccatttgggccgaagtggagaaggagcccgagaagtacccgctgcgaggcgagctgagcgaggaagagctgccctactacgtggagcttccagacaggacggcccacggcgccccggacagcagcgagcacaccgagtctgcagatacaagctccggccacacggacagcgagaacacgtcctccttctcctccccttcccacgacctgcaggagctgagcaacgaagagaactgctgtgcacccatccacatggggggcagggcgtaccccaagcgctcggccctgctggcggccttccagtcagaaagcttcaaggctggggccaagttaagcctggtgcgggtggactcggacaagacgcaggcttctgagtcgttctccagcgacgaggaggcggacttggagctccaggccctcaccacatccaggctgctaaagcagcagcgggaaaggcaggaggccgtcgaggccttgttcaagcacatcctgctctacctgcagccctacgactctcggcgggtcctctatgccttctcggtgctggaggctgtgctcaaaaccaaccctaaggaattcatcgaggctgtgtccaggactagcatggataccagctccaccgcgcacctcaacctcatctccaacctcctcgctcgccaccaggaggccctcattggccagagtttctacggaaagctccagacccaggtccccaacgtgtgcccccactctctgctcctggagctgctcacctaccnctgcctgagcttcctgcgctcctactacccttgctatttgaaggtctcgcaccgagacattctcggcaaccgggacgtgcaggtcaaaagtgtcgaggttttgatcaggataatgatgcagctggtctcagtggccaagtcttcggaagggaagaacgtggagttcatccacagcttgctgcagaggtgcaaagttcaggagtttgtcctgctctccctgtcggcgtccatgtacacgagccagaagcgctacgggctggccaccgcccaccacggcagggccctgccagaggacagcctctttgaggagagtctcattaacttgggtcaggaccagatctggagtgagcacccgctgcagattgagctgctgaagctgctgcaggtgctgattgtcttggaacaccacctgggtcgggcccatgaggaggcggaaaaccagcccgacctgtcccgggagtggcagagagccctgaacttccagcaggccatcagcgccctgcagtacgtgcagccccaccccctcacctcccagggtcttctggtctctgcggtggtgaggggtctgcagcccgcctacggttacggcatgcatccggcctgggtgagcttggtcacgcattccttgccctacttcggaaagtccctgggctggacggtgacaccctttgttgtccagatttgcaaaaacttggatgacttggtcaagcagtatgaaagcgaatctgtgaagctctctgtcagcacaacctccaagagggaaaacatttctccagattatccactcacccttctagaaggtctaacgaccattagtcatttttgtcttttggaacaagccaaccaaaacaaaaagaccatggctgcaggtgatcctgccaacttgaggaatgccagaaatgccattttggaagagctgcctcgaactgttaacaccatggcccttctctggaatgttctcagaaaggaggagactcaaaagagacctgtcgatctcctaggggccacgaagggatcctcttccgtttactttaaaaccaccaaaaccataagacaaaaaattttagacttcttaaaccccttgacggcccatcttggggttcagttgacagcggctgttgcggcagtgtggagcagaaagaaagcccagcgtcacagtaagatgaagattatcccaacggcaagtgcatcccagctaacccttgtcgacttggtgtgtgcactcagcaccctgcagactgacacgctgctgcacctggtgaaggaggtggtgaagaggccaccccaagtcaaagggggtgatgagaaatcgcccctagtggacattcctgtgttgcagttttgctatgcttttctccaaaggctcccagtaccagccttgcaagagaacttttcttcactgttgggagtattgaaagagtctgtacagttgaatctagccccacctgggtattttctgcttctcagcatgctgaatgactttgtaacaagaactcccaacctggaaaacaagaaggaccaaaaagacctgcaggaaatcactcagaaaatcctagaagctgtggggaacattgccggctcttccttggagcaaaccagctggctaagcagaaacctggaagtgaaggcccaacctcaggcctctctagaagaatctgatgctgaggaggacctgtatgatgctgctgcagcttcagcaatggtgtcttcatccgccccgtcggtgtacagcgtgcaagccctctctctcctggcagaggtactggcttccctcctggacatggtttatcgaagtgatgagaaggagaaagctgtgccgttaatctcccgtctgctttactatgtttttccatacttacgcaaccacagtgcctacaatgctcccagcttccgggctggcgctcagctgctgagctccctgagtggctatgcctacacaaagcgagcctggaggaaggaggtcctggagctgtttctcgaccccgctttctttcagatggatacttcctgtgttcattggaagtccattattgaccatcttttgactcatgagaaaacaatgtttaaggatttaatgaacatgcagagcagttctttgaaactattctcaagttttgaacagaaagccatgctgttaaagcgccaggcttttgctgtcttcagtggagaacttgatcaataccacctttaccttccactgatacaagaacgcctgacagacaatctcagagttggacagacatccatagttgctgctcagatgtttctttttttcagagttttgctgctaagaatatctcctcaacatttgacttcattgtggccaataatggtctctgaattgattcagacattcacacagcttgaagaagatctaaaagatgaagatgagtcattgagaagcaccaacaaagtaaacagaacgaaagtttcagtcccggatgcaaatggaccctcagtgggggagataccccagagtgaactcatcttgtatttatcagcttgcaaattcttggacacagcgctttcttttccacctgacaagatgccattatttcaaatttataggtgggcatttattccagaagtggacacagagggccctgccttcctgtcggatgtagaggagaatcaccaagaatgcaaaccccacactgtcaggattctagaacttctaaaattaaagtttggggaaatcagtagctctgatgagatcaccatgaagagtgaattcccgcttctgcgccaacattctgtttccagcatcaggcagttgatgccattcttcatgactctaaatggtgcatttaagacccagagacagctgcctgctgatagcccaggaactccattcttggactttcctgtcacagatagcccaaggatcttaaaacaactggaagaatgcatcgaatatgattttctggaacatccagaatgttaaccatgtgagagagaatatgtttaatccatgtattggtactttactgaaaaccaggttatattctaaagaagaaagaaggcaggatagtgcttttgaacaagcctatttccattttgaaagtagatttcaggctaggtgcggtggctcacacctgtaatctcagcactttgggaggccaaggcaggcagatcacttgaggtcaggagttcgagaccagcctgaccaacatggtgagaccctgtctctactaaaaatacaaaaattagctgggtgtggtggcggcgcctgtaatcccagctacttgggaggctaaggcatgagaattgcttgaacccaggaggtggaggctgcagtgagccgagatcacgacactgcactccagctgtgtgacagaatgagaccatctccaaaaaaaaaaaaaagtagatttcagataatttactgttcagcaacaggacacacctccctaaatgccttgtaatatatttgaatctgattctgcatttcttcctcaatttatgtaatgaaaataaaattaatatatcatctaacagtagcacaaaatttgtaatatgaagtaaagtatgaagataatgaagaagttgttttctttgttgaagcagttatatgggtctttctcagtatatttctcttttctctaaaagtttaaacttattaaaagaatgttatttttaacctttcacacaaatgtc

SEQ ID NO: 445191 - DNA, 7560 bp, Homo sapiens
  misc_feature (4038)..(4038): n is a, c, g, or t
ttcttgtcccacagtgcctggcccagaagccttgctaaatatttgaacaggattgcccaatacttttctgctgtgagaatgtaagatggatccagaagagcaggagctcttaaatgattacagatacagaagctactcttcagtgattgaaaaggctttgagaaattttgagtcctcgagtgaatgggcggatctcatatcttcacttggcaaactcaacaaggctcttcagagtaacctgaggtactccttgttgccaagacggctcctcatcagcaaaagattagctcagtgtttgcaccctgccctgcccagtggtgtccacttaaaagctctggaaacctacgagattatctttaaaatcgtggggaccaaatggctggccaaggacttgtttctgtacagctgcgggttatttcctctcctggcacacgcggcggtgtcggtgaggccggtgctgctcaccctgtacgagaagtacttcctcccactgcagaagctgctcctgcccagtctgcaggccttcatcgtgggcctgctgcccggccttgaagagggctccgagatctccgacagaacggatgctctgctcctgagactgtcgctggtggttggcaaagaggtgttttacaccgccctctgggggagcgtcctggccagcccgtccatccgcctccctgcctcagtcttcgtggtgggccacatcaacagggatgcccccggccgggagcagaagtacatgctggggaccaatcaccaactcacggtgaagtctttgcgtgcctccctgttggactcaaatgttcttgtgcaaagaaataatctggaaatcgttctgtttttcttcccattttatacctgtctggattccaatgagagagccatccccctcctcagatctgacatcgtgcgcattctctcagccgccacccagaccctactgagaagggacatgtccctgaacagaagactgtatgcatggttactaggctcagacataaaaggaaataccgttgtgccagaatctgaaatctcaaattcttatgaagaccagtcgtcttatttttttgaaaaatactccaaggatcttttagttgagggtttggctgagatattgcatcagaagttcatagatgctgacgtggaggaacgccatcatgcatacctgaagccttttcgcgtcctcatcagtctgcttgacaagccagaaatagggcctcaagtggttgggaatttgtttctcgaagtcatcagggccttttattcttactgcagagatgcccttggctctgatcttaaacttagctacacccagagtggaaattcgctgataagtgcaatcaaggaaaacagaaatgcctctgagattgtcaaaacggtaaatttgctgataacttctctaagcacagactttctctgggattatatgacaaggtgttttgaggaatgctttagaccagtgaagcagcgttacagcgtgaggaacagcgtcagccctccccccacggtctcggagctctgcgccctcctggtcttcctgctggatgtcattcctttggaactttactctgaggtgcatacccagtatctccctcaggtgctcggctgcctggtgcagcctcttgctgaggacatggaggccttaagtttacctgaactcacgcatgccttgaagacgtgtttcaaggtgctcagcaaagtccagatgcctccttcctacctcgacacggagtccaccagcggaacctcgagtccagtaaaaggtgaaaacggcaaaataattttggaaacaaaggcagtgattcccggtgacgaagatgcttcgtttccccctctgaagtctgaggacagtgggatcgggctcagtgcctcgtcaccggagctctctgagcacttgagggttcctcgagtttctctggaaagggacgacgtttggaagaagggcgggagcatgcagaggacgtttctttgcatccaagagctaatcgccaactttgccagcaagaacatttttggagtacagctgacagcgtcaggagaagaaagcaagtccgaggagcctgcagggaagagggacagggatgggacgcagagcctggcagccaatgattccagcaggaagaactcttgggagcccaagcccatcactgtgcctcagttcaagcagatgctgtcagacttgttcacagcacgagggtctccattcaagacaaaaagttcagagtcaccatcgtcttcgcccagcagccctgccaggaaaaacgggggagaatgggatgttgagaaggtggtcattgacctggggggttccagggaggaacgcagggaggcctttgccgccgcctgccacctgctgctggattgtgccactttccctgtctacctgtccgaggaagagaccgagcagctctgtgcaacgctcttccagctgccaggagccggtgattccagttttccatcttggctgaagtccctcatgactatttgctgctgtgtgactgactgctacctccagaacgtggccatttccactctgctggaagtgataaaccattcccagtccctggcgcttgtcattgaagacaagatgaaacgctataagagctctggacacaaccctttttttggcaagctgcagatggtgacggttcctcccattgctccagggatattgaaagtcattgcagagaaaacagatttctatcagagggtggctcgtgtgctttggaatcagctgaacaaagagacccgggagcatcacgtcacctgcgtagaattgttctaccggctgcactgcctggcccctacggccaacatctgcgaggacatcatctgccatgccctcctggaccctgacaagggaacaaggctggaagctctgtttagattttccgtgatctggcatctgacaagagagatccaaggcagtcgagtaacatctcacaatcgctcctttgataggtccttgtttgtcgtgctggacagcctggcctgcacggatggtgccatcggtgcggcagcccagggctggctggtgcgtgcgctctccctcggggacgtggctcgcatcctcgaacccgtgctcctgctgctgctgcagccaaaaacccagagaacctccatccactgcctcaagcaggagaactcggccgatgacttgcaccgttggtttaacaggaagaaaacctctttcagagaggcatgcgcagtgcccgagcctcaggagagcggctctgaagagcacctgcctctgagccagttcaccacagtggaccgtgaagccatttgggccgaagtggagaaggagcccgagaagtacccgctgcgaggcgagctgagcgaggaagagctgccctactacgtggagcttccagacaggacggcccacggcgccccggacagcagcgagcacaccgagtctgcagatacaagctccggccacacggacagcgagaacacgtcctccttctcctccccttcccacgacctgcaggagctgagcaacgaagagaactgctgtgcacccatccacatggggggcagggcgtaccccaagcgctcggccctgctggcggccttccagtcagaaagcttcaaggctggggccaagttaagcctggtgcgggtggactcggacaagacgcaggcttctgagtcgttctccagcgacgaggaggcggacttggagctccaggccctcaccacatccaggctgctaaagcagcagcgggaaaggcaggaggccgtcgaggccttgttcaagcacatcctgctctacctgcagccctacgactctcggcgggtcctctatgccttctcggtgctggaggctgtgctcaaaaccaaccctaaggaattcatcgaggctgtgtccaggactagcatggataccagctccaccgcgcacctcaacctcatctccaacctcctcgctcgccaccaggaggccctcattggccagagtttctacggaaagctccagacccaggtccccaacgtgtgcccccactctctgctcctggagctgctcacctaccnctgcctgagcttcctgcgctcctactacccttgctatttgaaggtctcgcaccgagacattctcggcaaccgggacgtgcaggtcaaaagtgtcgaggttttgatcaggataatgatgcagctggtctcagtggccaagtcttcggaagggaagaacgtggagttcatccacagcttgctgcagaggtgcaaagttcaggagtttgtcctgctctccctgtcggcgtccatgtacacgagccagaagcgctacgggctggccaccgcccaccacggcagggccctgccagaggacagcctctttgaggagagtctcattaacttgggtcaggaccagatctggagtgagcacccgctgcagattgagctgctgaagctgctgcaggtgctgattgtcttggaacaccacctgggtcgggcccatgaggaggcggaaaaccagcccgacctgtcccgggagtggcagagagccctgaacttccagcaggccatcagcgccctgcagtacgtgcagccccaccccctcacctcccagggtcttctggtctctgcggtggtgaggggtctgcagcccgcctacggttacggcatgcatccggcctgggtgagcttggtcacgcattccttgccctacttcggaaagtccctgggctggacggtgacaccctttgttgtccagatttgcaaaaacttggatgacttggtcaagcagtatgaaagcgaatctgtgaagctctctgtcagcacaacctccaagagggaaaacatttctccagattatccactcacccttctagaaggtctaacgaccattagtcatttttgtcttttggaacaagccaaccaaaacaaaaagaccatggctgcaggtgatcctgccaacttgaggaatgccagaaatgccattttggaagagctgcctcgaactgttaacaccatggcccttctctggaatgttctcagaaaggaggagactcaaaagagacctgtcgatctcctaggggccacgaagggatcctcttccgtttactttaaaaccaccaaaaccataagacaaaaaattttagacttcttaaaccccttgacggcccatcttggggttcagttgacagcggctgttgcggcagtgtggagcagaaagaaagcccagcgtcacagtaagatgaagattatcccaacggcaagtgcatcccagctaacccttgtcgacttggtgtgtgcactcagcaccctgcagactgacacgctgctgcacctggtgaaggaggtggtgaagaggccaccccaagtcaaagggggtgatgagaaatcgcccctagtggacattcctgtgttgcagttttgctatgcttttctccaaaggctcccagtaccagccttgcaagagaacttttcttcactgttgggagtattgaaagagtctgtacagttgaatctagccccacctgggtattttctgcttctcagcatgctgaatgactttgtaacaagaactcccaacctggaaaacaagaaggaccaaaaagacctgcaggaaatcactcagaaaatcctagaagctgtggggaacattgccggctcttccttggagcaaaccagctggctaagcagaaacctggaagtgaaggcccaacctcaggcctctctagaagaatctgatgctgctgcagcttcagcaatggtgtcttcatccgccccgtcggtgtacagcgtgcaagccctctctctcctggcagaggtactggcttccctcctggacatggtttatcgaagtgatgagaaggagaaagctgtgccgttaatctcccgtctgctttactatgtttttccatacttacgcaaccacagtgcctacaatgctcccagcttccgggctggcgctcagctgctgagctccctgagtggctatgcctacacaaagcgagcctggaggaaggaggtcctggagctgtttctcgaccccgctttctttcagatggatacttcctgtgttcattggaagtccattattgaccatcttttgactcatgagaaaacaatgtttaaggatttaatgaacatgcagagcagttctttgaaactattctcaagttttgaacagaaagccatgctgttaaagcgccaggcttttgctgtcttcagtggagaacttgatcaataccacctttaccttccactgatacaagaacgcctgacagacaatctcagagttggacagacatccatagttgctgctcagatgtttctttttttcagagttttgctgctaagaatatctcctcaacatttgacttcattgtggccaataatggtctctgaattgattcagacattcacacagcttgaagaagatctaaaagatgaagatgagtcattgagaagcaccaacaaagtaaacagaacgaaagtttcagtcccggatgcaaatggaccctcagtgggggagataccccagagtgaactcatcttgtatttatcagcttgcaaattcttggacacagcgctttcttttccacctgacaagatgccattatttcaaatttataggtgggcatttattccagaagtggacacagagggccctgccttcctgtcggatgtagaggagaatcaccaagaatgcaaaccccacactgtcaggattctagaacttctaaaattaaagtttggggaaatcagtagctctgatgagatcaccatgaagagtgaattcccgcttctgcgccaacattctgtttccagcatcaggcagttgatgccattcttcatgactctaaatggtgcatttaagacccagagacagctgcctgctgatagcccaggaactccattcttggactttcctgtcacagatagcccaaggatcttaaaacaactggaagaatgcatcgaatatgattttctggaacatccagaatgttaaccatgtgagagagaatatgtttaatccatgtattggtactttactgaaaaccaggttatattctaaagaagaaagaaggcaggatagtgcttttgaacaagcctatttccattttgaaagtagatttcaggctaggtgcggtggctcacacctgtaatctcagcactttgggaggccaaggcaggcagatcacttgaggtcaggagttcgagaccagcctgaccaacatggtgagaccctgtctctactaaaaatacaaaaattagctgggtgtggtggcggcgcctgtaatcccagctacttgggaggctaaggcatgagaattgcttgaacccaggaggtggaggctgcagtgagccgagatcacgacactgcactccagctgtgtgacagaatgagaccatctccaaaaaaaaaaaaaagtagatttcagataatttactgttcagcaacaggacacacctccctaaatgccttgtaatatatttgaatctgattctgcatttcttcctcaatttatgtaatgaaaataaaattaatatatcatctaacagtagcacaaaatttgtaatatgaagtaaagtatgaagataatgaag

SEQ ID NO: 445192 - DNA, 7567 bp, Homo sapiens
  misc_feature (4038)..(4038): n is a, c, g, or t
ttcttgtcccacagtgcctggcccagaagccttgctaaatatttgaacaggattgcccaatacttttctgctgtgagaatgtaagatggatccagaagagcaggagctcttaaatgattacagatacagaagctactcttcagtgattgaaaaggctttgagaaattttgagtcctcgagtgaatgggcggatctcatatcttcacttggcaaactcaacaaggctcttcagagtaacctgaggtactccttgttgccaagacggctcctcatcagcaaaagattagctcagtgtttgcaccctgccctgcccagtggtgtccacttaaaagctctggaaacctacgagattatctttaaaatcgtggggaccaaatggctggccaaggacttgtttctgtacagctgcgggttatttcctctcctggcacacgcggcggtgtcggtgaggccggtgctgctcaccctgtacgagaagtacttcctcccactgcagaagctgctcctgcccagtctgcaggccttcatcgtgggcctgctgcccggccttgaagagggctccgagatctccgacagaacggatgctctgctcctgagactgtcgctggtggttggcaaagaggtgttttacaccgccctctgggggagcgtcctggccagcccgtccatccgcctccctgcctcagtcttcgtggtgggccacatcaacagggatgcccccggccgggagcagaagtacatgctggggaccaatcaccaactcacggtgaagtctttgcgtgcctccctgttggactcaaatgttcttgtgcaaagaaataatctggaaatcgttctgtttttcttcccattttatacctgtctggattccaatgagagagccatccccctcctcagatctgacatcgtgcgcattctctcagccgccacccagaccctactgagaagggacatgtccctgaacagaagactgtatgcatggttactaggctcagacataaaaggaaataccgttgtgccagaatctgaaatctcaaattcttatgaagaccagtcgtcttatttttttgaaaaatactccaaggatcttttagttgagggtttggctgagatattgcatcagaagttcatagatgctgacgtggaggaacgccatcatgcatacctgaagccttttcgcgtcctcatcagtctgcttgacaagccagaaatagggcctcaagtggttgggaatttgtttctcgaagtcatcagggccttttattcttactgcagagatgcccttggctctgatcttaaacttagctacacccagagtggaaattcgctgataagtgcaatcaaggaaaacagaaatgcctctgagattgtcaaaacggtaaatttgctgataacttctctaagcacagactttctctgggattatatgacaaggtgttttgaggaatgctttagaccagtgaagcagcgttacagcgtgaggaacagcgtcagccctccccccacggtctcggagctctgcgccctcctggtcttcctgctggatgtcattcctttggaactttactctgaggtgcatacccagtatctccctcaggtgctcggctgcctggtgcagcctcttgctgaggacatggaggccttaagtttacctgaactcacgcatgccttgaagacgtgtttcaaggtgctcagcaaagtccagatgcctccttcctacctcgacacggagtccaccagcggaacctcgagtccagtaaaaggtgaaaacggcaaaataattttggaaacaaaggcagtgattcccggtgacgaagatgcttcgtttccccctctgaagtctgaggacagtgggatcgggctcagtgcctcgtcaccggagctctctgagcacttgagggttcctcgagtttctctggaaagggacgacgtttggaagaagggcgggagcatgcagaggacgtttctttgcatccaagagctaatcgccaactttgccagcaagaacatttttggagtacagctgacagcgtcaggagaagaaagcaagtccgaggagcctgcagggaagagggacagggatgggacgcagagcctggcagccaatgattccagcaggaagaactcttgggagcccaagcccatcactgtgcctcagttcaagcagatgctgtcagacttgttcacagcacgagggtctccattcaagacaaaaagttcagagtcaccatcgtcttcgcccagcagccctgccaggaaaaacgggggagaatgggatgttgagaaggtggtcattgacctggggggttccagggaggaacgcagggaggcctttgccgccgcctgccacctgctgctggattgtgccactttccctgtctacctgtccgaggaagagaccgagcagctctgtgcaacgctcttccagctgccaggagccggtgattccagttttccatcttggctgaagtccctcatgactatttgctgctgtgtgactgactgctacctccagaacgtggccatttccactctgctggaagtgataaaccattcccagtccctggcgcttgtcattgaagacaagatgaaacgctataagagctctggacacaaccctttttttggcaagctgcagatggtgacggttcctcccattgctccagggatattgaaagtcattgcagagaaaacagatttctatcagagggtggctcgtgtgctttggaatcagctgaacaaagagacccgggagcatcacgtcacctgcgtagaattgttctaccggctgcactgcctggcccctacggccaacatctgcgaggacatcatctgccatgccctcctggaccctgacaagggaacaaggctggaagctctgtttagattttccgtgatctggcatctgacaagagagatccaaggcagtcgagtaacatctcacaatcgctcctttgataggtccttgtttgtcgtgctggacagcctggcctgcacggatggtgccatcggtgcggcagcccagggctggctggtgcgtgcgctctccctcggggacgtggctcgcatcctcgaacccgtgctcctgctgctgctgcagccaaaaacccagagaacctccatccactgcctcaagcaggagaactcggccgatgacttgcaccgttggtttaacaggaagaaaacctctttcagagaggcatgcgcagtgcccgagcctcaggagagcggctctgaagagcacctgcctctgagccagttcaccacagtggaccgtgaagccatttgggccgaagtggagaaggagcccgagaagtacccgctgcgaggcgagctgagcgaggaagagctgccctactacgtggagcttccagacaggacggcccacggcgccccggacagcagcgagcacaccgagtctgcagatacaagctccggccacacggacagcgagaacacgtcctccttctcctccccttcccacgacctgcaggagctgagcaacgaagagaactgctgtgcacccatccacatggggggcagggcgtaccccaagcgctcggccctgctggcggccttccagtcagaaagcttcaaggctggggccaagttaagcctggtgcgggtggactcggacaagacgcaggcttctgagtcgttctccagcgacgaggaggcggacttggagctccaggccctcaccacatccaggctgctaaagcagcagcgggaaaggcaggaggccgtcgaggccttgttcaagcacatcctgctctacctgcagccctacgactctcggcgggtcctctatgccttctcggtgctggaggctgtgctcaaaaccaaccctaaggaattcatcgaggctgtgtccaggactagcatggataccagctccaccgcgcacctcaacctcatctccaacctcctcgctcgccaccaggaggccctcattggccagagtttctacggaaagctccagacccaggtccccaacgtgtgcccccactctctgctcctggagctgctcacctaccnctgcctgagcttcctgcgctcctactacccttgctatttgaaggtctcgcaccgagacattctcggcaaccgggacgtgcaggtcaaaagtgtcgaggttttgatcaggataatgatgcagctggtctcagtggccaagtcttcggaagggaagaacgtggagttcatccacagcttgctgcagaggtgcaaagttcaggagtttgtcctgctctccctgtcggcgtccatgtacacgagccagaagcgctacgggctggccaccgcccaccacggcagggccctgccagaggacagcctctttgaggagagtctcattaacttgggtcaggaccagatctggagtgagcacccgctgcagattgagctgctgaagctgctgcaggtgctgattgtcttggaacaccacctgggtcgggcccatgaggaggcggaaaaccagcccgacctgtcccgggagtggcagagagccctgaacttccagcaggccatcagcgccctgcagtacgtgcagccccaccccctcacctcccagggtcttctggtctctgcggtggtgaggggtctgcagcccgcctacggttacggcatgcatccggcctgggtgagcttggtcacgcattccttgccctacttcggaaagtccctgggctggacggtgacaccctttgttgtccagatttgcaaaaacttggatgacttggtcaagcagtatgaaagcgaatctgtgaagctctctgtcagcacaacctccaagagggaaaacatttctccagattatccactcacccttctagaaggtctaacgaccattagtcatttttgtcttttggaacaagccaaccaaaacaaaaagaccatggctgcaggtgatcctgccaacttgaggaatgccagaaatgccattttggaagagctgcctcgaactgttaacaccatggcccttctctggaatgttctcagaaaggaggagactcaaaagagacctgtcgatctcctaggggccacgaagggatcctcttccgtttactttaaaaccaccaaaaccataagacaaaaaattttagacttcttaaaccccttgacggcccatcttggggttcagttgacagcggctgttgcggcagtgtggagcagaaagaaagcccagcgtcacagtaagatgaagattatcccaacggcaagtgcatcccagctaacccttgtcgacttggtgtgtgcactcagcaccctgcagactgacacgctgctgcacctggtgaaggaggtggtgaagaggccaccccaagtcaaagggggtgatgagaaatcgcccctagtggacattcctgtgttgcagttttgctatgcttttctccaaaggctcccagtaccagccttgcaagagaacttttcttcactgttgggagtattgaaagagtctgtacagttgaatctagccccacctgggtattttctgcttctcagcatgctgaatgactttgtaacaagaactcccaacctggaaaacaagaaggaccaaaaagacctgcaggaaatcactcagaaaatcctagaagctgtggggaacattgccggctcttccttggagcaaaccagctggctaagcagaaacctggaagtgaaggcccaacctcaggcctctctagaagaatctgatgctgaggaggacctgtatgatgctgctgcagcttcagcaatggtgtcttcatccgccccgtcggtgtacagcgtgcaagccctctctctcctggcagaggtactggcttccctcctggacatggtttatcgaagtgatgagaaggagaaagctgtgccgttaatctcccgtctgctttactatgtttttccatacttacgcaaccacagtgcctacaatgctcccagcttccgggctggcgctcagctgctgagctccctgagtggctatgcctacacaaagcgagcctggaggaaggaggtcctggagctgtttctcgaccccgctttctttcagatggatacttcctgtgttcattggaagtccattattgaccatcttttgactcatgagaaaacaatgtttaaggatttaatgaacatgcagagcagttctttgaaactattctcaagttttgaacagaaagccatgctgttaaagcgccaggcttttgctgtcttcagtggagaacttgatcaataccacctttaccttccactgatacaagaacgcctgacagacaatctcagagttggacagacatccatagttgctgctcagatgtttctttttttcagagttttgctgctaagaatatctcctcaacatttgacttcattgtggccaataatggtctctgaattgattcagacattcacacagcttgaagaagatctaaaagatgaagatgagtcattgagaagcaccaacaaagtaaacagaacgaaagtttcagtcccggatgcaaatggaccctcagtgggggagataccccagagtgaactcatcttgtatttatcagcttgcaaattcttggacacagcgctttcttttccacctgacaagatgccattatttcaaatttataggtgggcatttattccagaagtggacacagagggccctgccttcctgtcggatgtagaggagaatcaccaagaatgcaaaccccacactgtcaggattctagaacttctaaaattaaagtttggggaaatcagtagctctgatgagatcaccatgaagagtgaattcccgcttctgcgccaacattctgtttccagcatcaggcagttgatgccattcttcatgactctaaatggtgcatttaagacccagagacagctgcctgctgatagcccaggaactccattcttggactttcctgtcacagatagcccaaggatcttaaaacaactggaagaatgcatcgaatatgattttctggaacatccagaatgttaaccatgtgagagagaatatgtttaatccatgtattggtactttactgaaaaccaggttatattctaaagaagaaagaaggcaggatagtgcttttgaacaagcctatttccattttgaaagtagatttcaggctaggtgcggtggctcacacctgtaatctcagcactttgggagtgggaggctaaggcatgagaattgcttgaacccaggaggtggaggctgcagtgagccgagatcacgacactgcactccagctgtgtgacagaatgagaccatctccaaaaaaaaaaaaaagtagatttcagataatttactgttcagcaacaggacacacctccctaaatgccttgtaatatatttgaatctgattctgcatttcttcctcaatttatgtaatgaaaataaaattaatatatcatctaacagtagcacaaaatttgtaatatgaagtaaagtatgaagataatgaagaagttgttttctttgttgaagcagttatatgggtctttctcagtatatttctcttttctctaaaagtttaaacttattaaaagaatgttatttttaacctttcacacaaatgtc

SEQ ID NO: 445193 - DNA, 5700 bp, Homo sapiens
  misc_feature (4038)..(4038): n is a, c, g, or t
  misc_feature (5419)..(5420): n is a, c, g, or t
  misc_feature (5587)..(5587): n is a, c, g, or t
  misc_feature (5591)..(5591): n is a, c, g, or t
  misc_feature (5593)..(5594): n is a, c, g, or t
ttcttgtcccacagtgcctggcccagaagccttgctaaatatttgaacaggattgcccaatacttttctgctgtgagaatgtaagatggatccagaagagcaggagctcttaaatgattacagatacagaagctactcttcagtgattgaaaaggctttgagaaattttgagtcctcgagtgaatgggcggatctcatatcttcacttggcaaactcaacaaggctcttcagagtaacctgaggtactccttgttgccaagacggctcctcatcagcaaaagattagctcagtgtttgcaccctgccctgcccagtggtgtccacttaaaagctctggaaacctacgagattatctttaaaatcgtggggaccaaatggctggccaaggacttgtttctgtacagctgcgggttatttcctctcctggcacacgcggcggtgtcggtgaggccggtgctgctcaccctgtacgagaagtacttcctcccactgcagaagctgctcctgcccagtctgcaggccttcatcgtgggcctgctgcccggccttgaagagggctccgagatctccgacagaacggatgctctgctcctgagactgtcgctggtggttggcaaagaggtgttttacaccgccctctgggggagcgtcctggccagcccgtccatccgcctccctgcctcagtcttcgtggtgggccacatcaacagggatgcccccggccgggagcagaagtacatgctggggaccaatcaccaactcacggtgaagtctttgcgtgcctccctgttggactcaaatgttcttgtgcaaagaaataatctggaaatcgttctgtttttcttcccattttatacctgtctggattccaatgagagagccatccccctcctcagatctgacatcgtgcgcattctctcagccgccacccagaccctactgagaagggacatgtccctgaacagaagactgtatgcatggttactaggctcagacataaaaggaaataccgttgtgccagaatctgaaatctcaaattcttatgaagaccagtcgtcttatttttttgaaaaatactccaaggatcttttagttgagggtttggctgagatattgcatcagaagttcatagatgctgacgtggaggaacgccatcatgcatacctgaagccttttcgcgtcctcatcagtctgcttgacaagccagaaatagggcctcaagtggttgggaatttgtttctcgaagtcatcagggccttttattcttactgcagagatgcccttggctctgatcttaaacttagctacacccagagtggaaattcgctgataagtgcaatcaaggaaaacagaaatgcctctgagattgtcaaaacggtaaatttgctgataacttctctaagcacagactttctctgggattatatgacaaggtgttttgaggaatgctttagaccagtgaagcagcgttacagcgtgaggaacagcgtcagccctccccccacggtctcggagctctgcgccctcctggtcttcctgctggatgtcattcctttggaactttactctgaggtgcatacccagtatctccctcaggtgctcggctgcctggtgcagcctcttgctgaggacatggaggccttaagtttacctgaactcacgcatgccttgaagacgtgtttcaaggtgctcagcaaagtccagatgcctccttcctacctcgacacggagtccaccagcggaacctcgagtccagtaaaaggtgaaaacggcaaaataattttggaaacaaaggcagtgattcccggtgacgaagatgcttcgtttccccctctgaagtctgaggacagtgggatcgggctcagtgcctcgtcaccggagctctctgagcacttgagggttcctcgagtttctctggaaagggacgacgtttggaagaagggcgggagcatgcagaggacgtttctttgcatccaagagctaatcgccaactttgccagcaagaacatttttggagtacagctgacagcgtcaggagaagaaagcaagtccgaggagcctgcagggaagagggacagggatgggacgcagagcctggcagccaatgattccagcaggaagaactcttgggagcccaagcccatcactgtgcctcagttcaagcagatgctgtcagacttgttcacagcacgagggtctccattcaagacaaaaagttcagagtcaccatcgtcttcgcccagcagccctgccaggaaaaacgggggagaatgggatgttgagaaggtggtcattgacctggggggttccagggaggaacgcagggaggcctttgccgccgcctgccacctgctgctggattgtgccactttccctgtctacctgtccgaggaagagaccgagcagctctgtgcaacgctcttccagctgccaggagccggtgattccagttttccatcttggctgaagtccctcatgactatttgctgctgtgtgactgactgctacctccagaacgtggccatttccactctgctggaagtgataaaccattcccagtccctggcgcttgtcattgaagacaagatgaaacgctataagagctctggacacaaccctttttttggcaagctgcagatggtgacggttcctcccattgctccagggatattgaaagtcattgcagagaaaacagatttctatcagagggtggctcgtgtgctttggaatcagctgaacaaagagacccgggagcatcacgtcacctgcgtagaattgttctaccggctgcactgcctggcccctacggccaacatctgcgaggacatcatctgccatgccctcctggaccctgacaagggaacaaggctggaagctctgtttagattttccgtgatctggcatctgacaagagagatccaaggcagtcgagtaacatctcacaatcgctcctttgataggtccttgtttgtcgtgctggacagcctggcctgcacggatggtgccatcggtgcggcagcccagggctggctggtgcgtgcgctctccctcggggacgtggctcgcatcctcgaacccgtgctcctgctgctgctgcagccaaaaacccagagaacctccatccactgcctcaagcaggagaactcggccgatgacttgcaccgttggtttaacaggaagaaaacctctttcagagaggcatgcgcagtgcccgagcctcaggagagcggctctgaagagcacctgcctctgagccagttcaccacagtggaccgtgaagccatttgggccgaagtggagaaggagcccgagaagtacccgctgcgaggcgagctgagcgaggaagagctgccctactacgtggagcttccagacaggacggcccacggcgccccggacagcagcgagcacaccgagtctgcagatacaagctccggccacacggacagcgagaacacgtcctccttctcctccccttcccacgacctgcaggagctgagcaacgaagagaactgctgtgcacccatccacatggggggcagggcgtaccccaagcgctcggccctgctggcggccttccagtcagaaagcttcaaggctggggccaagttaagcctggtgcgggtggactcggacaagacgcaggcttctgagtcgttctccagcgacgaggaggcggacttggagctccaggccctcaccacatccaggctgctaaagcagcagcgggaaaggcaggaggccgtcgaggccttgttcaagcacatcctgctctacctgcagccctacgactctcggcgggtcctctatgccttctcggtgctggaggctgtgctcaaaaccaaccctaaggaattcatcgaggctgtgtccaggactagcatggataccagctccaccgcgcacctcaacctcatctccaacctcctcgctcgccaccaggaggccctcattggccagagtttctacggaaagctccagacccaggtccccaacgtgtgcccccactctctgctcctggagctgctcacctaccnctgcctgagcttcctgcgctcctactacccttgctatttgaaggtctcgcaccgagacattctcggcaaccgggacgtgcaggtcaaaagtgtcgaggttttgatcaggataatgatgcagctggtctcagtggccaagtcttcggaagggaagaacgtggagttcatccacagcttgctgcagaggtgcaaagttcaggagtttgtcctgctctccctgtcggcgtccatgtacacgagccagaagcgctacgggctggccaccgcccaccacggcagggccctgccagaggacagcctctttgaggagagtctcattaacttgggtcaggaccagatctggagtgagcacccgctgcagattgagctgctgaagctgctgcaggtgctgattgtcttggaacaccacctgggtcgggcccatgaggaggcggaaaaccagcccgacctgtcccgggagtggcagagagccctgaacttccagcaggccatcagcgccctgcagtacgtgcagccccaccccctcacctcccagggtcttctggtctctgcggtggtgaggggtctgcagcccgcctacggttacggcatgcatccggcctgggtgagcttggtcacgcattccttgccctacttcggaaagtccctgggctggacggtgacaccctttgttgtccagatttgcaaaaacttggatgacttggtcaagcagtatgaaagcgaatctgtgaagctctctgtcagcacaacctccaagagggaaaacatttctccagattatccactcacccttctagaaggtctaacgaccattagtcatttttgtcttttggaacaagccaaccaaaacaaaaagaccatggctgcaggtgatcctgccaacttgaggaatgccagaaatgccattttggaagagctgcctcgaactgttaacaccatggcccttctctggaatgttctcagaaaggaggagactcaaaagagacctgtcgatctcctaggggccacgaagggatcctcttccgtttactttaaaaccaccaaaaccataagacaaaaaattttagacttcttaaaccccttgacggcccatcttggggttcagttgacagcggctgttgcggcagtgtggagcagaaagaaagcccagcgtcacagtaagatgaagattatcccaacggcaagtgcatcccagctaacccttgtcgacttggtgtgtgcactcagcaccctgcagactgacacgctgctgcacctggtgaaggaggtggtgaagaggccaccccaagtcaaagggggtgatgagaaatcgcccctagtggacattcctgtgttgcagttttgctatgcttttctccaaagcgtcttcacccttcccccnncgacactcttccgctcccatttggcaatgtcgctgacattatgacccactagccacggctaggaaaactccaaggtaagaagtatttggatcccaagaaagaagccttgctctcaaattccttctaactctcatctaggaggagaagcaagagctcctgccctcatnggcngnnttggtgacttttccttctctgagcaaaaacgggccacatgtcactgtcatccctctcccggcaggtccagggctgccaagactggaactagcacaaaacaggggtg

SEQ ID NO: 445194 - DNA, 3348 bp, Homo sapiens
cgggagccaggccgcgcggcgccgcgccggccgagagggggccggatcccggaccatggcggcggcggggggcgccgaggggcggcgcgcggccctggaggcggcggcggcggcagctcctgagcggggaggcgggagctgcgtgctgtgctgcggagacctggaggccacggcgctgggccgctgcgaccacccggtgtgctaccgctgctctaccaagatgcgggtgctctgcgagcagcgctactgcgccgtgtgccgcgaggagctgcgccaggtggtctttgggaagaagcttcctgcctttgccaccatccccatccaccagctgcagcatgagaagaaatatgatatctactttgcagatggaaaggtgtacgcattgtacaggcagctgctgcagcacgagtgcccgcggtgccccgagctgccacctttcagcctcttcggggacctggagcagcacatgcggaggcagcatgagctcttctgctgccgtctgtgcctccagcacctccagatcttcacatatgagcgcaagtggtactcgcgcaaggacctggcccggcatcgcatgcagggtgaccccgatgacacgtcgcaccgtgggcacccgctctgcaagttctgtgacgagcgctacctggacaatgatgagctgcttaagcacctgcgccgcgaccactacttctgccacttctgcgactcggacggggcccaggactactacagcgactatgcctacctgcgtgagcacttccgggagaagcactttctgtgtgaggaaggccgctgcagcacggagcagttcacccacgccttccgcaccgagatcgacctcaaggcccacaggacggcctgccacagtcgcagccgcgccgaggcacgccagaaccgccacatcgacctgcagttcagctacgcgccacggcactcgcgccggaacgagggggtcgttggtggcgaagactacgaggaggtggacaggtacagccgccagggccgagtggcccgggctggcactcgcggagcccagcagagccgccgaggaagctggaggtacaaaagggaagaagaggaccgagaagtagcagctgctgtccgggcctccgtggccgcacagcagcaggaggaggctcgcaggagtgaggatcaggaggaaggcggtaggcccaagaaggaggaggcagcggcgcggggacctgaggatccccgtggcccccggcgctcaccccggactcagggcgaaggcccaggccccaaggaaacctcgacaaatggtcctgtaagccaagaagccttctcggtgacaggcccagccgccccaggcgccctcccaccacccagcccgaagctcaaggacgaagacttccccagcctctctgcctccacttcctcctcctgctccactgcagcaaccccgggccctgtggggttggcgctgccgtacgccatccctgccagaggcaggagtgccttccaggaggaggacttccccgccctggtgtcctcggtgcccaagcctggcaccgcccccaccagccttgtctctgcctggaacagcagcagtagcagcaagaaggtagcacagcccccactctcggcgcaggctaccggcagcggccagcccaccaggaaggctgggaaggggagcaggggcggcaggaagggcggcccgcccttcacacaggaggaggaggaggacggcggcccggccctgcaggagcttctgagcacacgccccacgggctccgtctcctccacactggggctggcctccatccaaccctctaaagttgggaagaagaagaaagtgggctcggagaagccaggcaccacattgccacagcccccgcccgctacctgtcccccaggggctttgcaggccccggaagctcctgccagcagagccgaggggccagttgccgtcgtcgttaatggacacacggagggcccggcccctgctcggagtgcccccaaggaaccccctgggctcccaaggcccctggggtccttcccctgccccacgccacaggaggacttcccagcgctcggcggcccctgcccaccccggatgccgccgcccccaggcttcagcgctgtggtgctcctgaagggcacgcctcccccacccccgccgggcctggtgcccccaatcagcaagccgccccctggcttctctggccttctgcctagcccccacccggcctgtgtccccagccccgccaccaccaccaccacaaaagcacccaggctgctgcctgccccacgggcgtacctagtccccgagaacttccgggagaggaaccttcagctcatccagtccatcagggacttcctgcagagcgacgaggcccgcttcagcgagttcaagagccactcaggggagttcagacagggcctgatctccgcagcccagtattacaagagttgccgggacctgctgggggagaatttccagaaggtctttaatgagctgctggtcctgctgcccgacacggccaagcagcaggagctcctgtctgcacacacggacttctgcaaccgcgagaagcctctgagcaccaagtccaagaagaacaagaagagcgcgtggcaggccaccacccagcaggcgggcctggactgccgtgtgtgccccacctgccagcaggtgctcgcgcatggcgatgccagcagccaccaggcgctgcatgctgcccgggacgacgacttcccctccctgcaagccatcgccaggatcatcacgtagctcccgccagcgtggccagagctgtcgcaccgtgagcgtccttcctccttcctctccgggctgccaggcagccaggtaaggcctggtgaggccacttggcctcttggttggccaggcccaccaggaagtcaccaggacagtccacccgccctgttggcacactcaagcgggagtccacccctgcctcagtggtgggccagtctcggtttgcattcttgtgcttttgggaggtgccaggggagggaagggctgggatgctgggacctgttgttgctggcaaagccagaggtcacagtggcctgatctgggccctcccaaagctgagggctgcagcccgtggggcctcagagctgaaagctgcggcgccactggtgccagagtcagatgtcacagatgtgttgtgtaaacagttggctgtttcgtgcttcaagaatgttcaggattaaaagcagacaagaaattgtgctacttgaagttgaatctttttatgagacaagctgaatctgggatctcaaattgcctctgaccttttataagacagtttatcttcaaataaatttattttgcaataccacgcaaaacatagacatctgagc

SEQ ID NO: 445195 - DNA, 4567 bp, Homo sapiens
cgggagccaggccgcgcggcgccgcgccggccgagagggggccggatcccggaccatggcggcggcggggggcgccgaggggcggcgcgcggccctggaggcggcggcggcggcagctcctgagcggggaggcgggagctgcgtgctgtgctgcggagacctggaggccacggcgctgggccgctgcgaccacccggtgtgctaccgctgctctaccaagatgcgggtgctctgcgagcagcgctactgcgccgtgtgccgcgaggagctgcgccaggtggtctttgggaagaagcttcctgcctttgccaccatccccatccaccagctgcagcatgagaagaaatatgatatctactttgcagatggaaaggtgtacgcattgtacaggtgagcagggcctctccctgggtcctggcctccctgtggttgtggcccttcacgtcccactctcctcacaaccggaggcacttcgggggccacctggtgcaccaatgctggggccaggcacctgggtttccatcctgtgactggggaggcttaccaggccctcctgggggtagagctggtggttgtgctggggaaaggcatgcccaggtggtgcagcacctgcctcgggggcaccttgaggggcacacgaggtgtgtgagccaggcccgtggcctgaaaatcctataaagggtacagctgtcccagggctggtctctcagaggaggggcagctcatgggctcagggctagagccaggcttctgacccaggccatgtgcacagccatggccttgcatctgtcctgggtcacgggcctggggcctggtgagtggccctgctcccggcggtgacactgaatgtcctggggccgtgggcggctctcggtgtcttcctaggcagctgctgcagcacgagtgcccgcggtgccccgagctgccacctttcagcctcttcggggacctggagcagcacatgcggaggcagcatgagctcttctgctgccgtctgtgcctccagcacctccaggtgtgcccccccagcgaccccggagagagcctaggcggtgggtggtgcaagggatgtggccacacggctgggaggggcttgtccacctgctgcttctggccccggatggccccctgagggtcaggctgcacgtggcagggaggcctctggctgctggcggggccctctcccgccccttgctgctccgccactggcctgtgggaagaggcaggaggcttggggtcccccagcctgtgcccagcctcctgtgccttgtagatcttcacatatgagcgcaagtggtactcgcgcaaggacctggcccggcatcgcatgcagggtgaccccgatgacacgtcgcaccgtgggcacccgctctgcaagttctgtgacgagcgctacctggacaatgatgagctgcttaagcacctgcgccgcgaccactacttctgccacttctgcgactcggacggggcccaggactactacagcgactatgcctacctgcgtgagcacttccgggagaagcactttctgtgtgaggaaggccgctgcagcacggagcagttcacccacgccttccgcaccgagatcgacctcaaggcccacaggacggcctgccacagtcgcagccgcgccgaggcacgccagaaccgccacatcgacctgcagttcagctacgcgccacggcactcgcgccggaacgagggggtcgttggtggcgaagactacgaggaggtggacaggtacagccgccagggccgagtggcccgggctggcactcgcggagcccagcagagccgccgaggaagctggaggtacaaaagggaagaagaggaccgagaagtagcagctgctgtccgggcctccgtggccgcacagcagcaggaggaggctcgcaggagtgaggatcaggaggaaggcggtaggcccaagaaggaggaggcagcggcgcggggacctgaggatccccgtggcccccggcgctcaccccggactcagggcgaaggcccaggccccaaggaaacctcgacaaatggtcctgtaagccaagaagccttctcggtgacaggcccagccgccccagggtgtgtgggggtgccagggtgagagtatgggcgcccaggggtgaatggtgcatggtgggcgggtgcgggcagccacaggtgggtgccgggagggcaggtatggagccacggggcctgatagctgttgaccagctgtgcttccctgcacccagcgccctcccaccacccagcccgaagctcaaggacgaagacttccccagcctctctgcctccacttcctcctcctgctccactgcagcaaccccgggccctgtggggttggcgctgccgtacgccatccctgccagaggcaggagtgccttccaggaggaggacttccccgccctggtgtcctcggtgcccaagcctggcaccgcccccaccagccttgtctctgcctggaacagcagcagtagcagcaagaaggtagcacagcccccactctcggcgcaggctaccggcagcggccagcccaccaggaaggctgggaaggggagcaggggcggcaggaagggcggcccgcccttcacacaggaggaggaggaggacggcggcccggccctgcaggagcttctgagcacacgccccacgggctccgtctcctccacactggggctggcctccatccaaccctctaaagttgggaagaagaagaaagtgggctcggagaagccaggcaccacattgccacagcccccgcccgctacctgtcccccaggggctttgcaggccccggaagctcctgccagcagagccgaggggccagttgccgtcgtcgttaatggacacacggagggcccggcccctgctcggagtgcccccaaggaaccccctgggctcccaaggcccctggggtccttcccctgccccacgccacaggaggacttcccagcgctcggcggcccctgcccaccccggatgccgccgcccccaggcttcagcgctgtggtgctcctgaagggcacgcctcccccacccccgccgggcctggtgcccccaatcagcaagccgccccctggcttctctggccttctgcctagcccccacccggcctgtgtccccagccccgccaccaccaccaccacaaaagcgtaagtgtgggtgagctgcctggtgtccaccgggggtggaggaacggtaccctccccttgggccactgtgaaggctgaagcctccacctcctctttaccttctgacccccagacccaggctgctgcctgccccacgggcgtacctagtccccgagaacttccgggagaggaaccttcagctcatccagtccatcagggacttcctgcagagcgacgaggcccgcttcagcgagttcaagagccactcaggggagttcagacaggtcaggcgggcccggggagtccagatgggtcaggcgggcccggggcggggtgccagcccgtcttcatccagggcccgggccagaggggatgactgagtccggctctccggtggcagggcctgatctccgcagcccagtattacaagagttgccgggacctgctgggggagaatttccagaaggtctttaatgagctgctggtcctgctgcccgacacggccaagcagcaggagctcctgtctgcacacacggacttctgcaaccgcgagaagcctctgagcaccaagtccaagaagaacaagaagagcgcgtggcaggccaccacccagcaggcgggcctggactgccgtgtgtgccccacctgccagcaggtgctcgcgcatggcgatgccagcagccaccaggcgctgcatgctgcccgggacgacgacttcccctccctgcaagccatcgccaggatcatcacgtagctcccgccagcgtggccagagctgtcgcaccgtgagcgtccttcctccttcctctccgggctgccaggcagccaggtaaggcctggtgaggccacttggcctcttggttggccaggcccaccaggaagtcaccaggacagtccacccgccctgttggcacactcaagcgggagtccacccctgcctcagtggtgggccagtctcggtttgcattcttgtgcttttgggaggtgccaggggagggaagggctgggatgctgggacctgttgttgctggcaaagccagaggtcacagtggcctgatctgggccctcccaaagctgagggctgcagcccgtggggcctcagagctgaaagctgcggcgccactggtgccagagtcagatgtcacagatgtgttgtgtaaacagttggctgtttcgtgcttcaagaatgttcaggattaaaagcagacaagaaattgtgctacttgaagttgaatctttttatgagacaagctgaatctgggatctcaaattgcctctgaccttttataagacagtttatcttcaaataaatttattttagaaacggaagactctggtagcagtccttgaaatcttgatgccattgctattttctgcattgtattgtatcttcgttttagtagtgctccaataaaaagacctgctactagcaaaaa

SEQ ID NO: 445196 - DNA, 2201 bp, Homo sapiens
  misc_feature (8)..(8): n is a, c, g, or t
  misc_feature (18)..(18): n is a, c, g, or t
  misc_feature (22)..(22): n is a, c, g, or t
aaggctangtacgaggcngggngtgaatcggccgaggctgaggatccccgtggcccccggcgctcaccccggactcagggcgaaggcccaggccccaaggaaacctcgacaaatggtcctgtaagccaagaagccttctcggtgacaggcccagccgccccagggtgtgtgggggtgccaggcgccctcccaccacccagcccgaagctcaaggacgaagacttccccagcctctctgcctccacttcctcctcctgctccactgcagcaaccccgggccctgtggggttggcgctgccgtacgccatccctgccagaggcaggagtgccttccaggaggaggacttccccgccctggtgtcctcggtgcccaagcctggcaccgcccccaccagccttgtctctgcctggaacagcagcagtagcagcaagaaggtagcacagcccccactctcggcgcaggctaccggcagcggccagcccaccaggaaggctgggaaggggagcaggggcggcaggaagggcggcccgcccttcacacaggaggaggaggaggacggcggcccggccctgcaggagcttctgagcacacgccccacgggctccgtctcctccacactggggctggcctccatccaaccctctaaagttgggaagaagaagaaagtgggctcggagaagccaggcaccacattgccacagcccccgcccgctacctgtcccccaggggctttgcaggccccggaagctcctgccagcagagccgaggggccagttgccgtcgtcgttaatggacacacggagggcccggcccctgctcggagtgcccccaaggaaccccctgggctcccaaggcccctggggtccttcccctgccccacgccacaggaggacttcccagcgctcggcggcccctgcccaccccggatgccgccgcccccaggcttcagcgctgtggtgctcctgaagggcacgcctcccccacccccgccgggcctggtgcccccaatcagcaagccgccccctggcttctctggccttctgcctagcccccacccggcctgtgtccccagccccgccaccaccaccaccacaaaagcacccaggctgctgcctgccccacgggcgtacctagtccccgagaacttccgggagaggaaccttcagctcatccagtccatcagggacttcctgcagagcgacgaggcccgcttcagcgagttcaagagccactcaggggagttcagacagggcctgatctccgcagcccagtattacaagagttgccgggacctgctgggggagaatttccagaaggtctttaatgagctgctggtcctgctgcccgacacggccaagcagcaggagctcctgtctgcacacacggacttctgcaaccgcgagaagcctctgagcaccaagtccaagaagaacaagaagagcgcgtggcaggccaccacccagcaggcgggcctggactgccgtgtgtgccccacctgccagcaggtgctcgcgcatggcgatgccagcagccaccaggcgctgcatgctgcccgggacgacgacttcccctccctgcaagccatcgccaggatcatcacgtagctcccgccagcgtggccagagctgtcgcaccgtgagcgtccttcctccttcctctccgggctgccaggcagccaggtaaggcctggtgaggccacttggcctcttggttggccaggcccaccaggaagtcaccaggacagtccacccgccctgttggcacactcaagcgggagtccacccctgcctcagtggtgggccagtctcggtttgcattcttgtgcttttgggaggtgccaggggagggaagggctgggatgctgggacctgttgttgctggcaaagccagaggtcacagtggcctgatctgggccctcccaaagctgagggctgcagcccgtggggcctcagagctgaaagctgcggcgccactggtgccagagtcagatgtcacagatgtgttgtgtaaacagttggctgtttcgtgcttcaagaatgttcaggattaaaagcagacaagaaattgtgctacttgaagttgaatctttttatgagacaagctgaatctgggatctcaaattgcctctgaccttttataagacagtttatcttcaaataaatttattttgcaataccacgcaaaacatagacatctgagc

SEQ ID NO: 445197 - DNA, 1332 bp, Homo sapiens
gaagctggccctggaggccaggcagcccgcagtcagcgagggtcctctctgggtcttgtcctgccacccctcaggcttcagcgctgtggtgctcctgaagggcacgcctcccccacccccgccgggcctggtgcccccaatcagcaagccgccccctggcttctctggccttctgcctagcccccacccggcctgtgtccccagccccgccaccaccaccaccacaaaagcacccaggctgctgcctgccccacgggcgtacctagtccccgagaacttccgggagaggaaccttcagctcatccagtccatcagggacttcctgcagagcgacgaggcccgcttcagcgagttcaagagccactcaggggagttcagacagggcctgatctccgcagcccagtattacaagagttgccgggacctgctgggggagaatttccagaaggtctttaatgagctgctggtcctgctgcccgacacggccaagcagcaggagctcctgtctgcacacacggacttctgcaaccgcgagaagcctctgagcaccaagtccaagaagaacaagaagagcgcgtggcaggccaccacccagcaggcgggcctggactgccgtgtgtgccccacctgccagcaggtgctcgcgcatggcgatgccagcagccaccaggcgctgcatgctgcccgggacgacgacttcccctccctgcaagccatcgccaggatcatcacgtagctcccgccagcgtggccagagctgtcgcaccgtgagcgtccttcctccttcctctccgggctgccaggcagccaggtaaggcctggtgaggccacttggcctcttggttggccaggcccaccaggaagtcaccaggacagtccacccgccctgttggcacactcaagcgggagtccacccctgcctcagtggtgggccagtctcggtttgcattcttgtgcttttgggaggtgccaggggagggaagggctgggatgctgggacctgttgttgctggcaaagccagaggtcacagtggcctgatctgggccctcccaaagctgagggctgcagcccgtggggcctcagagctgaaagctgcggcgccactggtgccagagtcagatgtcacagatgtgttgtgtaaacagttggctgtttcgtgcttcaagaatgttcaggattaaaagcagacaagaaattgtgctacttgaagttgaatctttttatgagacaagctgaatctgggatctcaaattgcctctgaccttttataagacagtttatcttcaaataaatttattttgcaataccacgcaaaacatagacatctgagc

SEQ ID NO: 445198 - DNA, 1033 bp, Homo sapiens
gctgaagcgggcctcgtcgctctgcaggaagtccctcagggacttcctgaagcgggcctcgtcgctctggggagttcagacagggcctgatctccgcagcccagtattacaagagttgccgggacctgctgggggagaatttccagaaggtctttaatgagctgctggtcctgctgcccgacacggccaagcagcaggagctcctgtctgcacacacggacttctgcaaccgcgagaagcctctgagcaccaagtccaagaagaacaagaagagcgcgtggcaggccaccacccagcaggcgggcctggactgccgtgtgtgccccacctgccagcaggtgctcgcgcatggcgatgccagcagccaccaggcgctgcatgctgcccgggacgacgacttcccctccctgcaagccatcgccaggatcatcacgtagctcccgccagcgtggccagagctgtcgcaccgtgagcgtccttcctccttcctctccgggctgccaggcagccaggtaaggcctggtgaggccacttggcctcttggttggccaggcccaccaggaagtcaccaggacagtccacccgccctgttggcacactcaagcgggagtccacccctgcctcagtggtgggccagtctcggtttgcattcttgtgcttttgggaggtgccaggggagggaagggctgggatgctgggacctgttgttgctggcaaagccagaggtcacagtggcctgatctgggccctcccaaagctgagggctgcagcccgtggggcctcagagctgaaagctgcggcgccactggtgccagagtcagatgtcacagatgtgttgtgtaaacagttggctgtttcgtgcttcaagaatgttcaggattaaaagcagacaagaaattgtgctacttgaagttgaatctttttatgagacaagctgaatctgggatctcaaattgcctctgaccttttataagacagtttatcttcaaataaatttattttgcaataccacgcaaaacatagacatctgagc

SEQ ID NO: 445199 - DNA, 2514 bp, Homo sapiens
cgggagccaggccgcgcggcgccgcgccggccgagagggggccggatcccggaccatggcggcggcggggggcgccgaggggcggcgcgcggccctggaggcggcggcggcggcagctcctgagcggggaggcgggagctgcgtgctgtgctgcggagacctggaggccacggcgctgggccgctgcgaccacccggtgtgctaccgctgctctaccaagatgcgggtgctctgcgagcagcgctactgcgccgtgtgccgcgaggagctgcgccaggtggtctttgggaagaagcttcctgcctttgccaccatccccatccaccagctgcagcatgagaagaaatatgatatctactttgcagatggaaaggtgtacgcattgtacaggcagctgctgcagcacgagtgcccgcggtgccccgagctgccacctttcagcctcttcggggacctggagcagcacatgcggaggcagcatgagctcttctgctgccgtctgtgcctccagcacctccagatcttcacatatgagcgcaagtggtactcgcgcaaggacctggcccggcatcgcatgcagggtgaccccgatgacacgtcgcaccgtgggcacccgctctgcaagttctgtgacgagcgctacctggacaatgatgagctgcttaagcacctgcgccgcgaccactacttctgccacttctgcgactcggacggggcccaggactactacagcgactatgcctacctgcgtgagcacttccgggagaagcactttctgtgtgaggaaggccgctgcagcacggagcagttcacccacgccttccgcaccgagatcgacctcaaggcccacaggacggcctgccacagtcgcagccgcgccgaggcacgccagaaccgccacatcgacctgcagttcagctacgcgccacggcactcgcgccggaacgagggggtcgttggtggcgaagactacgaggaggtggacaggtacagccgccagggccgagtggcccgggctggcactcgcggagcccagcagagccgccgaggaagctggaggtacaaaagggaagaagaggaccgagaagtagcagctgctgtccgggcctccgtggccgcacagcagcaggaggaggctcgcaggagtgaggatcaggaggaaggcggtaggcccaagaaggaggaggcagcggcgcggggacctgaggatccccgtggcccccggcgctcaccccggactcagggcgaaggcccaggccccaaggaaacctcgacaaatggtcctgtaagccaagaagccttctcggtgacaggcccagccgccccaggcgccctcccaccacccagcccgaagctcaaggacgaagacttccccagcctctctgcctccacttcctcctcctgctccactgcagcaaccccgggccctgtggggttggcgctgccgtacgccatccctgccagaggcaggagtgccttccaggaggaggacttccccgccctggtgtcctcggtgcccaagcctggcaccgcccccaccagccttgtctctgcctggaacagcagcagtagcagcaagaaggtagcacagcccccactctcggcgcaggctaccggcagcggccagcccaccaggaaggctgggaaggggagcaggggcggcaggaagggcggcccgcccttcacacaggaggaggaggaggacggcggcccggccctgcaggagcttctgagcacacgccccacgggctccgtctcctccacactggggctggcctccatccaaccctctaaagttgggaagaagaagaaagtgggctcggagaagccaggcaccacattgccacagcccccgcccgctacctgtcccccaggggctttgcaggccccggaagctcctgccagcagagccgaggggccagttgccgtcgtcgttaatggacacacggagggcccggcccctgctcggagtgcccccaaggaaccccctgggctcccaaggcccctggggtccttcccctgccccacgccacaggaggacttcccagcgctcggcggcccctgcccaccccggatgccgccgcccccaggacttcagcagctgtggtgctcctgaagggcacgcctgcgcaagagacagagaggggaacaggagaggggcgcagagcgggggagcgagcggagcgggaagcgaggaagggacagagacgaggaaaaagcgagaggcgaagagaacgaagaaagaaggagaagaagcagggagagagaggaagaagagagagagcggacggagcgcgagaacggaggagacgagaagagaggaagcagagaacagcacgcgcggagaagaagggagggagggaagagggagaagagaggcagggaaagagccgagagggcaggacaggagaagcaaggaggagaggacaaggcgaagacagcggagggagcagagccggcgaccgagcgaaggacgcgcagcacgagaggacgaggcgaaaggagggaaaacgg

SEQ ID NO: 445200 - DNA, 722 bp, Homo sapiens
  misc_feature (594)..(594): n is a, c, g, or t
cgggagccaggccgcgcggcgccgcgccggccgagagggggccggatcccggaccatggcggcggcggggggcgccgaggggcggcgcgcggccctggaggcggcggcggcggcagctcctgagcggggaggcgggagctgcgtgctgtgctgcggagacctggaggccacggcgctgggccgctgcgaccacccggtgtgctaccgctgctctaccaagatgcgggtgctctgcgagcagcgctactgcgccgtgtgccgcgaggagctgcgccaggtggtctttgggaagaagcttcctgcctttgccaccatccccatccaccagctgcagcatgagaagaaatatgatatctactttgcagatggaaaggtgtacgcattgtacaggcagcctgctgcgaggcacgtagtgcccgcgtgtgcgcccgagctgtccacctgtatcaggtcctcttcgggagacctggagtcagacgagcatgcgtgatggcagccactgaggcatcgtatctgctgcccgttgctgatgcgcattccgagggcaaccgcattcgccaacgaagtccctgtccgaccagtaagtggacgccngcaaaacggttggggtatcctccgccggcgaatgggacgccgtggtcctctggcctatcagctatgctaggggttgtagcaccgcagatgacgacggtcgtctaccagtgtggcacccggctcttgca

SEQ ID NO: 445201 - DNA, 589 bp, Homo sapiens
cgggagccaggccgcgcggcgccgcgccggccgagagggggccggatcccggaccatggcggcggcggggggcgccgaggggcggcgcgcggcgctgccgtacgccatccctgccagaggcaggagtgccttccaggaggaggacttccccgccctggtgtcctcggtgcccaagcctggcaccgaggacaccaggctggtgctcgtgcctagcccccccgggaacacggagccacctcgtgtgaccctccaggacccgcggccatgccagccatacgacccagcacaaagaggccgacccaacacccgcaggcccacccacaccaacacctcccactccactgaagccacccgaagcacacgccaccaagcgaccgacacacccccgcaagcatcaccccagtatgcaacaaagccgagcgttccagcgaggaaaccgcaccgatggcggcagcaggaccaacgcaactcccacacgcagacgcagccatagaagaagtctcgcgacacagagaactcaagaactcccgaccccaccaccgaatcccaactcacggcccggcaggccaaccaccaggtcaggaacaaa

SEQ ID NO: 445202 - DNA, 4481 bp, Homo sapiens
cgggagccaggccgcgcggcgccgcgccggccgagagggggccggatcccggaccatggcggcggcggggggcgccgaggggcggcgcgcggccctggaggcggcggcggcggcagctcctgagcggggaggcgggagctgcgtgctgtgctgcggagacctggaggccacggcgctgggccgctgcgaccacccggtgtgctaccgctgctctaccaagatgcgggtgctctgcgagcagcgctactgcgccgtgtgccgcgaggagctgcgccaggtggtctttgggaagaagcttcctgcctttgccaccatccccatccaccagctgcagcatgagaagaaatatgatatctactttgcagatggaaaggtgtacgcattgtacaggtgagcagggcctctccctgggtcctggcctccctgtggttgtggcccttcacgtcccactctcctcacaaccggaggcacttcgggggccacctggtgcaccaatgctggggccaggcacctgggtttccatcctgtgactggggaggcttaccaggccctcctgggggtagagctggtggttgtgctggggaaaggcatgcccaggtggtgcagcacctgcctcgggggcaccttgaggggcacacgaggtgtgtgagccaggcccgtggcctgaaaatcctataaagggtacagctgtcccagggctggtctctcagaggaggggcagctcatgggctcagggctagagccaggcttctgacccaggccatgtgcacagccatggccttgcatctgtcctgggtcacgggcctggggcctggtgagtggccctgctcccggcggtgacactgaatgtcctggggccgtgggcggctctcggtgtcttcctaggcagctgctgcagcacgagtgcccgcggtgccccgagctgccacctttcagcctcttcggggacctggagcagcacatgcggaggcagcatgagctcttctgctgccgtctgtgcctccagcacctccaggtgtgcccccccagcgaccccggagagagcctaggcggtgggtggtgcaagggatgtggccacacggctgggaggggcttgtccacctgctgcttctggccccggatggccccctgagggtcaggctgcacgtggcagggaggcctctggctgctggcggggccctctcccgccccttgctgctccgccactggcctgtgggaagaggcaggaggcttggggtcccccagcctgtgcccagcctcctgtgccttgtagatcttcacatatgagcgcaagtggtactcgcgcaaggacctggcccggcatcgcatgcagggtgaccccgatgacacgtcgcaccgtgggcacccgctctgcaagttctgtgacgagcgctacctggacaatgatgagctgcttaagcacctgcgccgcgaccactacttctgccacttctgcgactcggacggggcccaggactactacagcgactatgcctacctgcgtgagcacttccgggagaagcactttctgtgtgaggaaggccgctgcagcacggagcagttcacccacgccttccgcaccgagatcgacctcaaggcccacaggacggcctgccacagtcgcagccgcgccgaggcacgccagaaccgccacatcgacctgcagttcagctacgcgccacggcactcgcgccggaacgagggggtcgttggtggcgaagactacgaggaggtggacaggtacagccgccagggccgagtggcccgggctggcactcgcggagcccagcagagccgccgaggaagctggaggtacaaaagggaagaagaggaccgagaagtagcagctgctgtccgggcctccgtggccgcacagcagcaggaggaggctcgcaggagtgaggatcaggaggaaggcggtaggcccaagaaggaggaggcagcggcgcggggacctgaggatccccgtggcccccggcgctcaccccggactcagggcgaaggcccaggccccaaggaaacctcgacaaatggtcctgtaagccaagaagccttctcggtgacaggcccagccgccccagggtgtgtgggggtgccagggtgagagtatgggcgcccaggggtgaatggtgcatggtgggcgggtgcgggcagccacaggtgggtgccgggagggcaggtatggagccacggggcctgatagctgttgaccagctgtgcttccctgcacccagcgccctcccaccacccagcccgaagctcaaggacgaagacttccccagcctctctgcctccacttcctcctcctgctccactgcagcaaccccgggccctgtggggttggcgctgccgtacgccatccctgccagaggcaggagtgccttccaggaggaggacttccccgccctggtgtcctcggtgcccaagcctggcaccgcccccaccagccttgtctctgcctggaacagcagcagtagcagcaagaaggtagcacagcccccactctcggcgcaggctaccggcagcggccagcccaccaggaaggctgggaaggggagcaggggcggcaggaagggcggcccgcccttcacacaggaggaggaggaggacggcggcccggccctgcaggagcttctgagcacacgccccacgggctccgtctcctccacactggggctggcctccatccaaccctctaaagttgggaagaagaagaaagtgggctcggagaagccaggcaccacattgccacagcccccgcccgctacctgtcccccaggggctttgcaggccccggaagctcctgccagcagagccgaggggccagttgccgtcgtcgttaatggacacacggagggcccggcccctgctcggagtgcccccaaggaaccccctgggctcccaaggcccctggggtccttcccctgccccacgccacaggaggacttcccagcgctcggcggcccctgcccaccccggatgccgccgcccccaggcttcagcgctgtggtgctcctgaagggcacgcctcccccacccccgccgggcctggtgcccccaatcagcaagccgccccctggcttctctggccttctgcctagcccccacccggcctgtgtccccagccccgccaccaccaccaccacaaaagcgtaagtgtgggtgagctgcctggtgtccaccgggggtggaggaacggtaccctccccttgggccactgtgaaggctgaagcctccacctcctctttaccttctgacccccagacccaggctgctgcctgccccacgggcgtacctagtccccgagaacttccgggagaggaaccttcagctcatccagtccatcagggacttcctgcagagcgacgaggcccgcttcagcgagttcaagagccactcaggggagttcagacaggtcaggcgggcccggggagtccagatgggtcaggcgggcccggggcggggtgccagcccgtcttcatccagggcccgggccagaggggatgactgagtccggctctccggtggcagggcctgatctccgcagcccagtattacaagagttgccgggacctgctgggggagaatttccagaaggtctttaatgagctgctggtcctgctgcccgacacggccaagcagcaggagctcctgtctgcacacacggacttctgcaaccgcgagaagcctctgagcaccaagtccaagaagaacaagaagagcgcgtggcaggccaccacccagcaggcgggcctggactgccgtgtgtgccccacctgccagcaggtgctcgcgcatggcgatgccagcagccaccaggcgctgcatgctgcccgggacgacgacttcccctccctgcaagccatcgccaggatcatcacgtagctcccgccagcgtggccagagctgtcgcaccgtgagcgtccttcctccttcctctccgggctgccaggcagccaggtaaggcctggtgaggccacttggcctcttggttggccaggcccaccaggaagtcaccaggacagtccacccgccctgttggcacactcaagcgggagtccacccctgcctcagtggtgggccagtctcggtttgcattcttgtgcttttgggaggtgccaggggagggaagggctgggatgctgggacctgttgttgctggcaaagccagaggtcacagtggcctgatctgggccctcccaaagctgagggctgcagcccgtggggcctcagagctgaaagctgcggcgccactggtgccagagtcagatgtcacagatgtgttgtgtaaacagttggctgtttcgtgcttcaagaatgttcaggattaaaagcagacaagaaattgtgctacttgaagttgaatctttttatgagacaagctgaatctgggatctcaaattgcctctgaccttttataagacagtttatcttcaaataaatttattttgcaataccacgcaaaacatagacatctgagc

SEQ ID NO: 445203 - DNA, 3366 bp, Homo sapiens
cgggagccaggccgcgcggcgccgcgccggccgagagggggccggatcccggaccatggcggcggcggggggcgccgaggggcggcgcgcggccctggaggcggcggcggcggcagctcctgagcggggaggcgggagctgcgtgctgtgctgcggagacctggaggccacggcgctgggccgctgcgaccacccggtgtgctaccgctgctctaccaagatgcgggtgctctgcgagcagcgctactgcgccgtgtgccgcgaggagctgcgccaggtggtctttgggaagaagcttcctgcctttgccaccatccccatccaccagctgcagcatgagaagaaatatgatatctactttgcagatggaaaggtgtacgcattgtacaggcagctgctgcagcacgagtgcccgcggtgccccgagctgccacctttcagcctcttcggggacctggagcagcacatgcggaggcagcatgagctcttctgctgccgtctgtgcctccagcacctccagatcttcacatatgagcgcaagtggtactcgcgcaaggacctggcccggcatcgcatgcagggtgaccccgatgacacgtcgcaccgtgggcacccgctctgcaagttctgtgacgagcgctacctggacaatgatgagctgcttaagcacctgcgccgcgaccactacttctgccacttctgcgactcggacggggcccaggactactacagcgactatgcctacctgcgtgagcacttccgggagaagcactttctgtgtgaggaaggccgctgcagcacggagcagttcacccacgccttccgcaccgagatcgacctcaaggcccacaggacggcctgccacagtcgcagccgcgccgaggcacgccagaaccgccacatcgacctgcagttcagctacgcgccacggcactcgcgccggaacgagggggtcgttggtggcgaagactacgaggaggtggacaggtacagccgccagggccgagtggcccgggctggcactcgcggagcccagcagagccgccgaggaagctggaggtacaaaagggaagaagaggaccgagaagtagcagctgctgtccgggcctccgtggccgcacagcagcaggaggaggctcgcaggagtgaggatcaggaggaaggcggtaggcccaagaaggaggaggcagcggcgcggggacctgaggatccccgtggcccccggcgctcaccccggactcagggcgaaggcccaggccccaaggaaacctcgacaaatggtcctgtaagccaagaagccttctcggtgacaggcccagccgccccagggtgtgtgggggtgccaggcgccctcccaccacccagcccgaagctcaaggacgaagacttccccagcctctctgcctccacttcctcctcctgctccactgcagcaaccccgggccctgtggggttggcgctgccgtacgccatccctgccagaggcaggagtgccttccaggaggaggacttccccgccctggtgtcctcggtgcccaagcctggcaccgcccccaccagccttgtctctgcctggaacagcagcagtagcagcaagaaggtagcacagcccccactctcggcgcaggctaccggcagcggccagcccaccaggaaggctgggaaggggagcaggggcggcaggaagggcggcccgcccttcacacaggaggaggaggaggacggcggcccggccctgcaggagcttctgagcacacgccccacgggctccgtctcctccacactggggctggcctccatccaaccctctaaagttgggaagaagaagaaagtgggctcggagaagccaggcaccacattgccacagcccccgcccgctacctgtcccccaggggctttgcaggccccggaagctcctgccagcagagccgaggggccagttgccgtcgtcgttaatggacacacggagggcccggcccctgctcggagtgcccccaaggaaccccctgggctcccaaggcccctggggtccttcccctgccccacgccacaggaggacttcccagcgctcggcggcccctgcccaccccggatgccgccgcccccaggcttcagcgctgtggtgctcctgaagggcacgcctcccccacccccgccgggcctggtgcccccaatcagcaagccgccccctggcttctctggccttctgcctagcccccacccggcctgtgtccccagccccgccaccaccaccaccacaaaagcacccaggctgctgcctgccccacgggcgtacctagtccccgagaacttccgggagaggaaccttcagctcatccagtccatcagggacttcctgcagagcgacgaggcccgcttcagcgagttcaagagccactcaggggagttcagacagggcctgatctccgcagcccagtattacaagagttgccgggacctgctgggggagaatttccagaaggtctttaatgagctgctggtcctgctgcccgacacggccaagcagcaggagctcctgtctgcacacacggacttctgcaaccgcgagaagcctctgagcaccaagtccaagaagaacaagaagagcgcgtggcaggccaccacccagcaggcgggcctggactgccgtgtgtgccccacctgccagcaggtgctcgcgcatggcgatgccagcagccaccaggcgctgcatgctgcccgggacgacgacttcccctccctgcaagccatcgccaggatcatcacgtagctcccgccagcgtggccagagctgtcgcaccgtgagcgtccttcctccttcctctccgggctgccaggcagccaggtaaggcctggtgaggccacttggcctcttggttggccaggcccaccaggaagtcaccaggacagtccacccgccctgttggcacactcaagcgggagtccacccctgcctcagtggtgggccagtctcggtttgcattcttgtgcttttgggaggtgccaggggagggaagggctgggatgctgggacctgttgttgctggcaaagccagaggtcacagtggcctgatctgggccctcccaaagctgagggctgcagcccgtggggcctcagagctgaaagctgcggcgccactggtgccagagtcagatgtcacagatgtgttgtgtaaacagttggctgtttcgtgcttcaagaatgttcaggattaaaagcagacaagaaattgtgctacttgaagttgaatctttttatgagacaagctgaatctgggatctcaaattgcctctgaccttttataagacagtttatcttcaaataaatttattttgcaataccacgcaaaacatagacatctgagc

SEQ ID NO: 445204 - DNA, 1071 bp, Homo sapiens
  misc_feature (8)..(8): n is a, c, g, or t
  misc_feature (18)..(18): n is a, c, g, or t
  misc_feature (22)..(22): n is a, c, g, or t
aaggctangtacgaggcngggngtgaatcggccgaggctcatccagtccatcagggacttcctgcagagcgacgaggcccgcttcagcgagttcaagagccactcaggggagttcagacagggcctgatctccgcagcccagtattacaagagttgccgggacctgctgggggagaatttccagaaggtctttaatgagctgctggtcctgctgcccgacacggccaagcagcaggagctcctgtctgcacacacggacttctgcaaccgcgagaagcctctgagcaccaagtccaagaagaacaagaagagcgcgtggcaggccaccacccagcaggcgggcctggactgccgtgtgtgccccacctgccagcaggtgctcgcgcatggcgatgccagcagccaccaggcgctgcatgctgcccgggacgacgacttcccctccctgcaagccatcgccaggatcatcacgtagctcccgccagcgtggccagagctgtcgcaccgtgagcgtccttcctccttcctctccgggctgccaggcagccaggtaaggcctggtgaggccacttggcctcttggttggccaggcccaccaggaagtcaccaggacagtccacccgccctgttggcacactcaagcgggagtccacccctgcctcagtggtgggccagtctcggtttgcattcttgtgcttttgggaggtgccaggggagggaagggctgggatgctgggacctgttgttgctggcaaagccagaggtcacagtggcctgatctgggccctcccaaagctgagggctgcagcccgtggggcctcagagctgaaagctgcggcgccactggtgccagagtcagatgtcacagatgtgttgtgtaaacagttggctgtttcgtgcttcaagaatgttcaggattaaaagcagacaagaaattgtgctacttgaagttgaatctttttatgagacaagctgaatctgggatctcaaattgcctctgaccttttataagacagtttatcttcaaataaatttattttgcaataccacgcaaaacatagacatctgagc

SEQ ID NO: 445205 - DNA, 3131 bp, Homo sapiens
cgggagccaggccgcgcggcgccgcgccggccgagagggggccggatcccggaccatggcggcggcggggggcgccgaggggcggcgcgcggccctggaggcggcggcggcggcagctcctgagcggggaggcgggagctgcgtgctgtgctgcggagacctggaggccacggcgctgggccgctgcgaccacccggtgtgctaccgctgctctaccaagatgcgggtgctctgcgagcagcgctactgcgccgtgtgccgcgaggagctgcgccaggtggtctttgggaagaagcttcctgcctttgccaccatccccatccaccagctgcagcatgagaagaaatatgatatctactttgcagatggaaaggtgtacgcattgtacaggcagctgctgcagcacgagtgcccgcggtgccccgagctgccacctttcagcctcttcggggacctggagcagcacatgcggaggcagcatgagctcttctgctgccgtctgtgcctccagcacctccagatcttcacatatgagcgcaagtggtactcgcgcaaggacctggcccggcatcgcatgcagggtgaccccgatgacacgtcgcaccgtgggcacccgctctgcaagttctgtgacgagcgctacctggacaatgatgagctgcttaagcacctgcgccgcgaccactacttctgccacttctgcgactcggacggggcccaggactactacagcgactatgcctacctgcgtgagcacttccgggagaagcactttctgtgtgaggaaggccgctgcagcacggagcagttcacccacgccttccgcaccgagatcgacctcaaggcccacaggacggcctgccacagtcgcagccgcgccgaggcacgccagaaccgccacatcgacctgcagttcagctacgcgccacggcactcgcgccggaacgagggggtcgttggtggcgaagactacgaggaggtggacaggtacagccgccagggccgagtggcccgggctggcactcgcggagcccagcagagccgccgaggaagctggaggtacaaaagggaagaagaggaccgagaagtagcagctgctgtccgggcctccgtggccgcacagcagcaggaggaggctcgcaggagtgaggatcaggaggaaggcggtaggcccaagaaggaggaggcagcggcgcggggacctgaggatccccgtggcccccggcgctcaccccggactcagggcgaaggcccaggccccaaggaaacctcgacaaatggtcctgtaagccaagaagccttctcggtgacaggcccagccgccccaggcgccctcccaccacccagcccgaagctcaaggacgaagacttccccagcctctctgcctccacttcctcctcctgctccactgcagcaaccccgggccctgtggggttggcgctgccgtacgccatccctgccagaggcaggagtgccttccaggaggaggacttccccgccctggtgtcctcggtgcccaagcctggcaccgcccccaccagccttgtctctgcctggaacagcagcagtagcagcaagaaggtagcacagcccccactctcggcgcaggctaccggcagcggccagcccaccaggaaggctgggaaggggagcaggggcggcaggaagggcggcccgcccttcacacaggaggaggaggaggacggcggcccggccctgcaggagcttctgagcacacgccccacgggctccgtctcctccacactggggctggcctccatccaaccctctaaagttgggaagaagaagaaagtgggctcggagaagccaggcaccacattgccacagcccccgcccgctacctgtcccccaggggctttgcaggccccggaagctcctgccagcagagccgaggggccagttgccgtcgtcgttaatggacacacggagggcccggcccctgctcggagtgcccccaaggaaccccctgggctcccaaggcccctggggtccttcccctgccccacgccacaggaggacttcccagcgctcggcggcccctgcccaccccggatgccgccgcccccaggcttcagcgctgtggtgctcctgaagggcacgcctcccccacccccgccgggcctggtgcccccaatcagcaagccgccccctggcttctctggccttctgcctagcccccacccggcctgtgtccccagccccgccaccaccaccaccacaaaagcacccaggctgctgcctgccccacgggcgtacctagtccccgagaacttccgggagaggaaccttcagctcatccagtccatcagggacttcctgcagagcgacgaggcccgcttcagcgagttcaagagccactcaggggagttcagacagggcctgatctccgcagcccagtattacaagagttgccgggacctgctgggggagaatttccagaaggtctttaatgagctgctggtcctgctgcccgacacggccaagcagcaggagctcctgtctgcacacacggacttctgcaaccgcgagaagcctctgagcaccaagtccaagaagaacaagaagagcgcgtggcaggccaccacccagcaggcgggcctggactgccgtgtgtgccccacctgccagcaggtgctcgcgcatggcgatgccagcagccaccaggcgctgcatgctgcccgggacgacgacttcccctccctgcaagccatcgccaggatcatcacgtagctcccgccagcgtggccagagctgtcgcaccgtgagcgtccttcctccttcctctccgggctgccaggcagccaggtaaggcctgatctgggccctcccaaagctgagggctgcagcccgtggggcctcagagctgaaagctgcggcgccactggtgccagagtcagatgtcacagatgtgttgtgtaaacagttggctgtttcgtgcttcaagaatgttcaggattaaaagcagacaagaaattgtgctacttgaagttgaatctttttatgagacaagctgaatctgggatctcaaattgcctctgaccttttataagacagtttatcttcaaataaatttattttgcaataccacgcaaaacatagacatctgagc

SEQ ID NO: 445206 - DNA, 2355 bp, Homo sapiens
cgggagccaggccgcgcggcgccgcgccggccgagagggggccggatcccggaccatggcggcggcggggggcgccgaggggcggcgcgcggccctggaggcggcggcggcggcagctcctgagcggggaggcgggagctgcgtgctgtgctgcggagacctggaggccacggcgctgggccgctgcgaccacccggtgtgctaccgctgctctaccaagatgcgggtgctctgcgagcagcgctactgcgccgtgtgccgcgaggagctgcgccaggtggtctttgggaagaagcttcctgcctttgccaccatccccatccaccagctgcagcatgagaagaaatatgatatctactttgcagatggaaaggtgtacgcattgtacaggcagctgctgcagcacgagtgcccgcggtgccccgagctgccacctttcagcctcttcggggacctggagcagcacatgcggaggcagcatgagctcttctgctgccgtctgtgcctccagcacctccagatcttcacatatgagcgcaagtggtactcgcgcaaggacctggcccggcatcgcatgcagggtgaccccgatgacacgtcgcaccgtgggcacccgctctgcaagttctgtgacgagcgctacctggacaatgatgagctgcttaagcacctgcgccgcgaccactacttctgccacttctgcgactcggacggggcccaggactactacagcgactatgcctacctgcgtgagcacttccgggagaagcactttctgtgtgaggaaggccgctgcagcacggagcagttcacccacgccttccgcaccgagatcgacctcaaggcccacaggacggcctgccacagtcgcagccgcgccgaggcacgccagaaccgccacatcgacctgcagttcagctacgcgccacggcactcgcgccggaacgagggggtcgttggtggcgaagactacgaggaggtggacaggtacagccgccagggccgagtggcccgggctggcactcgcggagcccagcagagccgccgaggaagctggaggtacaaaagggaagaagaggaccgagaagtagcagctgctgtccgggcctccgtggccgcacagcagcaggaggaggctcgcaggagtgaggatcaggaggaaggcggtaggcccaagaaggaggaggcagcggcgcggggacctgaggatccccgtggcccccggcgctcaccccggactcagggcgaaggcccaggccccaaggaaacctcgacaaatggtcctgtaagccaagaagccttctcggtgacaggcccagccgccccaggcgccctcccaccacccagcccgaagctcaaggacgaagacttccccagcctctctgcctccacttcctcctcctgctccactgcagcaaccccgggccctgtggggttggcgctgccgtacgccatccctgccagaggcaggagtgccttccaggaggaggacttccccgccctggtgtcctcggtgcccaagcctggcaccgcccccaccagccttgtctctgcctggaacagcagcagtagcagcaagaaggtagcacagcccccactctcggcgcaggctaccggcagcggccagcccaccaggaaggctgggaaggggagcaggggcggcaggaagggcggcccgcccttcacacaggaggaggaggaggacggcggcccggccctgcaggagcttctgagcacacgccccacgggctccgtctcctccacactggggctggcctccatccaaccctctaaagttgggaagaagaagaaagtgggctcggagaagccaggcaccacattgccacagcccccgcccgctacctgtcccccaggggctttgcaggccccggaagctcctgccagcagagccgaggggccagttgccgtcgtcgttaatggacacacggagggcccggcccctgctcggagtgcccccaaggaaccccctgggctcccaaggcccctggggtccttcccctgccccacgccacaggaggacttcccagcgctcggcggcccctgcccaccccggatgccgccgcccccagctccctaagggcacgcctctcccaaggatacatctagcagtcgggccgcaccatgaataaaagaggatgcttacaccggactacgacgtgaaaaaaacacgacatttaattatgcaaaactaaagatgtctatattcaaacaggatcaaagggaagtatgtgaaacatacccaaagaacatagagtacataaaaagagagagttccagctaaatattacgacaaaaaatatgatagaattaaaagatccataacaaatcaattaa

SEQ ID NO: 445207 - DNA, 538 bp, Homo sapiens
accccgccacgcagagattgatgaagaggaggaggatgtgaaacgagaacctgaagtattggtagaaagttgtgaagatggatcgagacaggaccaatgtaacctcatgaggttaaaacgatgaaacccgaaattgtagagtatttgtcatgctttagattttcagaacaaattaagaaaacaaaaaattagttcaagttccaacgaagaggcaaggtgagaaattgaagtcagtgccttaactgaggccattttaaagagaactagttaaagtcagtttgtcaaaatcaaaacttttagttttgacctagaaatttttttcttagctcttttaagaaagtttaataatttgaagttgaaaatagtttaatagcctaaaaatagtttgagataggtgagatagttgaaaataggtgaaaggttgctaagaaaataacagataataagaattacaaataccttattaaaaatataaaaatatacccaggctcacaaataattaaaggaaaggaataaaaacaatagtaatatatcattt

SEQ ID NO: 445208 - DNA, 384 bp, Homo sapiens
gagtgaggctgtggatggcaagctctcgatatttatccacaagcgggaagaccagtcatcccatgaagtcctccagccattgctaagtagttcagaaggacggcccttccgacttggtactggcgccaacatggagaaagttgtgaagatggatcgagacaggaccaatggtggctgttgcgaagtgattacagaagaggctgcagccgccctgcggaaagccaccaagtgggcacagtcaggcctcatcgtcagcattgggccacctgtagagtctatcaacccagagactgtgagtggactatccacaggcgacaaaaagaaaactgcccaaacttccatttgccgagagaggaactcggagcttgcaaggtaaaccttcca

SEQ ID NO: 445209 - DNA, 480 bp, Homo sapiens
gagtgaggctgtggatggcaagctctcgatatttatccacaagcgggaagaccagtcatcccatgaagtcctccagccattgctaaggtgaccataatgattgtgatagctacacatcctcaagcaccacccatgtcacaggcactgtgctaagtaagccctgtacatgtatcgactgcctcggccctctttacacccctttcaggtagacactgtcactgtgattcctgtggtgacacagaaagaaactgaggcagagctgaaatgcagatgtagtcttctctgaccatagaacccaagctctgaaccacaacttggtactgtctctctaagtgcaactgagagctaaagccatgtggacgatgtattattgtctatgggaagcctccagtgtgacttgggctttgagaaggaataatgccatttgatttttagttgttggcatccttcagctgttggtaaatttaggtaaactccaac

SEQ ID NO: 445210 - DNA, 147 bp, Homo sapiens
agacacttttttaaatctttaattagttgaagtatgaaatggtgtgattactcaagaagaaagtaaaaatatagtcattgcccaaatattacaaacctgcagggctttgttagtgggatccagggcaacaggaaggcttgccacata

SEQ ID NO: 445211 - DNA, 416 bp, Homo sapiens
ctgtgctaagtaagccctgtacatgtatcgactgcctcggccctctttacacccctttcaggtagacactgtcactgtgattcctgtggtgacacagaaagaaactgaggcagagctgaaatgcagatgtagtcttctctgaccatagaacccaagctctgaaccacaacttggtactgtctctctaagtgcaactgagagctaaagccatgtggacgatgtattattgtctatgggaagcctccagtgtgacttgggctttgagaaggaataatgccatttgatttttagttgttggcatccttcagctgttggtaaatttaggtaaactccaactcattgactgtgagttggagaaacaagagacacttttttaaatctttaattagttgaagtatgaaatggtgtgattactc

SEQ ID NO: 445212 - DNA, 772 bp, Homo sapiens
cgctaggtcgaggctgggtttgcggcgcaggcaggagtttctctcggtgactactatcgctgtcatgtctggtcgtggcaagcaaggaggcaaggcccgcgccaaggccaagtcgcgctcgtcccgcgctggccttcagttcccggtagggcgagtgcatcgcttgctgcgcaaaggcaactacgcggagcgagtgggggccggcgcgcccgtctacatggctgcggtcctcgagtatctgaccgccgagatcctggagctggcgggcaacgcggctcgggacaacaagaagacgcgcatcatccctcgtcacctccagctggccatccgcaacgacgaggaactgaacaagctgctgggcaaagtcaccatcgcccagggcggcgtcttgcctaacatccaggccgtactgctccctaagaagacggagagtcaccacaaggcaaagggcaagtgaggctgacgtccggcccaagtgggcccagcccggcccgcgtctcgaaggggcacctgtgaactcaaaaggctcttttcagagccacccacgttttcaaataaaagagttgttaatgcaaaaaaaaaaaaaaaaaaaaataaaaaaaaaaaaagaagataaaatgaaaaaaaaaaaaaatccggggggttattttgggggggggggagaaagaggttattaagggggcggggggtaatgggttttgtggcaccttttgtttaagagggggagagatgggggggcccaaaggggggggaaaattaagggcgggtcgta

SEQ ID NO: 445213 - DNA, 1004 bp, Homo sapiens
agcctattagtaatataaccccccttaattttttcttttctgccctgagttctggcaggcaggagtttctctcggtgactactatcgctgtcatgtctggtcgtggcaagcaaggaggcaaggcccgcgccaaggccaagtcgcgctcgtcccgcgctggccttcagttcccggtagggcgagtgcatcgcttgctgcgcaaaggcaactacgcggagcgagtgggggccggcgcgcccgtctacatggctgcggtcctcgagtatctgaccgccgagatcctggagctggcgggcaacgcggctcgggacaacaagaagacgcgcatcatccctcgtcacctccagctggccatccgcaacgacgaggaactgaacaagctgctgggcaaagtcaccatcgcccagggcggcgtcttgcctaacatccaggccgtactgctccctaagaagacggagagtcaccacaaggcaaagggcaagtgaggctgacgtccggcccaagtgggcccagcccggcccgcgtctcgaaggggcacctgtgaactcaaaaggctcttttcagagccacccacgttttcaaataaaagagttgttaatgctggccactctcagtccagcgttcctcaaaaaaaaaaacgaaagaacaacgactcgaaagagtaaaaaaggggcgcacgaaaagaaaagaaccccagtgaggagcacaaaaggcagcaggacccacagtagtgtggcaagagggggcccccaaagggtggcgcgacacaaaaaccggcggcgagcgcgagctgataccacagcgagacgacgcggaaacaggagtccatgggaacatcggagagacgcaccacactagtaggtgaaacaatagtggggcacacaccagcacacgataaaacgcgcaaaaggcaaataacaagaaccagcgggacaaggcggacacccgggacgatacagcagggcagcaagagggcgacaggtaagagagaacaatatccgcgg

SEQ ID NO: 445214 - DNA, 793 bp, Homo sapiens
gcagcggcgttttcggcgactttcccgatcgccaggcaggagtttctctcggtgactactatcgctgtcatgtctggtcgtggcaagcaaggaggcaaggcccgcgccaaggccaagtcgcgctcgtcccgcgctggccttcagttcccggtagggcgagtgcatcgcttgctgcgcaaaggcaactacgcggagcgagtgggggccggcgcgcccgtctacatggctgcggtcctcgagtatctgaccgccgagatcctggagctggcgggcaacgcggctcgggacaacaagaagacgcgcatcatccctcgtcacctccagctggccatccgcaacgacgaggaactgaacaagctgctgggcaaagtcaccatcgcccagggcggcgtcttgcctaacatccaggccgtactgctccctaagaagacggagagtcaccacaaggcaaagggcaagtgaggctgacgtccggcccaagtgggcccagcccggcccgcgtctcgaaggggcacctgtgaactcaaaaggctcttttcagagccacccacgttttcaaataaaagagttgttaatgcaaataaaaaattccaaacgtactttattttataatatatcatatttgtttgggattgttttgccttgtctatatatgtgcaaatgctcatattttatacagtagatttcctattaatatttgaatttttttttgtacctttttatgctatattttaaattgtctcttcttccctggccctcttttttgccttctactcgccacagttgcgttgtt

SEQ ID NO: 445215 - DNA, 681 bp, Homo sapiens
ctctagagtatcccccagtgaaggtgtgtcatccgcaacgacgaggaactgaacaagctgctgggcaaagtcaccatcgcccagggcggcgtcttgcctaacatccaggccgtactgctccctaagaagacggagagtcaccacaaggcaaagggcaagtgaggctgacgtccggcccaagtgggcccagcccggcccgcgtctcgaaggggcacctgtgaactcaaaaggctcttttcagagccacccacgttttcaaataaaagagttgttaatgctggccactctcagtccagcgttcctcaaaaaaaaaaacgaaagaacaacgactcgaaagagtaaaaaaggggcgcacgaaaagaaaagaaccccagtgaggagcacaaaaggcagcaggacccacagtagtgtggcaagagggggcccccaaagggtggcgcgacacaaaaaccggcggcgagcgcgagctgataccacagcgagacgacgcggaaacaggagtccatgggaacatcggagagacgcaccacactagtaggtgaaacaatagtggggcacacaccagcacacgataaaacgcgcaaaaggcaaataacaagaaccagcgggacaaggcggacacccgggacgatacagcagggcagcaagagggcgacaggtaagagagaacaatatccgcgg

SEQ ID NO: 445216 - DNA, 981 bp, Homo sapiens
gcagcggcgttttcggcgactttcccgatcgccaggcaggagtttctctcggtgactactatcgctgtcatgtctggtcgtggcaagcaaggaggcaaggcccgcgccaaggccaagtcgcgctcgtcccgcgctggccttcagttcccggtagggcgagtgcatcgcttgctgcgcaaaggcaactacgcggagcgagtgggggccggcgcgcccgtctacatggctgcggtcctcgagtatctgaccgccgagatcctggagctggcgggcaacgcggctcgggacaacaagaagacgcgcatcatccctcgtcacctccagctggccatccgcaacgacgaggaactgaacaagctgctgggcaaagtcaccatcgcccagggcggcgtcttgcctaacatccaggccgtactgctccctaagaagacggagagtcaccacaaggcaaagggcaagtgaggctgacgtccggcccaagtgggcccagcccggcccgcgtctcgaaggggcacctgtgaactcaaaaggctcttttcagagccacccacgttttcaaataaaagagttgttaatgctggccactctcagtccagcgttcctcaaaaaaaaaaacgaaagaacaacgactcgaaagagtaaaaaaggggcgcacgaaaagaaaagaaccccagtgaggagcacaaaaggcagcaggacccacagtagtgtggcaagagggggcccccaaagggtggcgcgacacaaaaaccggcggcgagcgcgagctgataccacagcgagacgacgcggaaacaggagtccatgggaacatcggagagacgcaccacactagtaggtgaaacaatagtggggcacacaccagcacacgataaaacgcgcaaaaggcaaataacaagaaccagcgggacaaggcggacacccgggacgatacagcagggcagcaagagggcgacaggtaagagagaacaatatccgcgg

SEQ ID NO: 445217 - DNA, 777 bp, Homo sapiens
gcagcggcgttttcggcgactttcccgatcgccaggcaggagtttctctcggtgactactatcgctgtcatgtctggtcgtggcaagcaaggaggcaaggcccgcgccaaggccaagtcgcgctcgtcccgcgctggccttcagttcccggtagggcgagtgcatcgcttgctgcgcaaaggcaactacgcggagcgagtgggggccggcgcgcccgtctacatggctgcggtcctcgagtatctgaccgccgagatcctggagctggcgggcaacgcggctcgggacaacaagaagacgcgcatcatccctcgtcacctccagctggccatccgcaacgacgaggaactgaacaagctgctgggcaaagtcaccatcgcccagggcggcgtcttgcctaacatccaggccgtactgctccctaagaagacggagagtcaccacaaggcaaagggcaagtgaggctgacgtccggcccaagtgggcccagcccggcccgcgtctcgaaggggcacctgtgaactcaaaaggctcttttcagagccacccacgttttcaaataaaagagttgttaatgcaaaaaaaaaaaaaaaaaaaaataaaaaaaaaaaaagaagataaaatgaaaaaaaaaaaaaatccggggggttattttgggggggggggagaaagaggttattaagggggcggggggtaatgggttttgtggcaccttttgtttaagagggggagagatgggggggcccaaaggggggggaaaattaagggcgggtcgta

SEQ ID NO: 445218 - DNA, 909 bp, Homo sapiens
cgctaggtcgaggctgggtttgcggcgcaggcaggagtttctctcggtgactactatcgctgtcatgtctggtcgtggcaagcaaggaggcaaggcccgcgccaaggccaagtcgcgctcgtcccgcgctggccttcagttcccggtagggcgagtgcatcgcttgctgcgcaaaggcaactacgcggagcgagtgggggccggcgcgcccgtctacatggctgcggtcctcgagtatctgaccgccgagatcctggagctggcgggcaacgcggctcgggacaacaagaagacgcgcatcatccctcgtcacctccagctggccatccgcaacgacgaggaactgaacaagctgctgggcaaagtcaccataaggcaaagggcaagtgaggctgacgtccggcccaagtgggcccagcccggcccgcgtctcgaaggggcacctgtgaactcaaaaggctcttttcagagccacccacgttttcaaataaaagagttgttaatgctggccactctcagtccagcgttcctcaaaaaaaaaaacgaaagaacaacgactcgaaagagtaaaaaaggggcgcacgaaaagaaaagaaccccagtgaggagcacaaaaggcagcaggacccacagtagtgtggcaagagggggcccccaaagggtggcgcgacacaaaaaccggcggcgagcgcgagctgataccacagcgagacgacgcggaaacaggagtccatgggaacatcggagagacgcaccacactagtaggtgaaacaatagtggggcacacaccagcacacgataaaacgcgcaaaaggcaaataacaagaaccagcgggacaaggcggacacccgggacgatacagcagggcagcaagagggcgacaggtaagagagaacaatatccgcgg

SEQ ID NO: 445219 - DNA, 212 bp, Homo sapiens
cttttcttttggaaatggctacctctctcaggctcctaagcccagcaagaaaacctatagtagggcccaagctggtcagcagcagaaagcccccaggggacatggaggccagctggggttggagaagacagagatgagtcctgaggccacctgtccaggacagacacctttccctcttgctgtccagttcagggtcaaggggacaggaggcc

SEQ ID NO: 445220 - DNA, 4461 bp, Homo sapiens
ggcacgcccggaggcggggccgggtgcgtcctggcggggggattggcggagccggagagtggcagcgggcatggggcggggctgtctccagggaaacgcgacgctctccgtaggcgcagggctggcaagcagtcgggacgggagcgcgggcgtccgcggtggctgcagtcccgtcggtctccctgctgtccggcgcgagctcttcgagtcttgcttggtgcggtctcgcgacaggagcgctgggagccggggctagggggatcccggagctccgtggggcggcgggtgctggcggggctgccggggccgggactgggggagccgggcccgcgggccgcctgctgcctccgcccgcgccggggtccccagccgcccccgctgccgtgtcccctgcggccggccagccgcgtcccccagccccggcctcccgcggacccatgcccgcccgtatcggctactacgagatcgaccgcaccatcggcaagggcaacttcgcggtggtcaagcgggccacgcacctcgtcaccaaggccaaggttgctatcaagatcatagataagacccagctggatgaagaaaacttgaagaagattttccgggaagttcaaattatgaagatgctttgccacccccatatcatcaggctctaccaggttatggagacagaacggatgatttatctggtgacagaatatgctagtggaggggaaatatttgaccacctggtggcccatggtagaatggcagaaaaggaggcacgtcggaagttcaaacagatcgtcacagctgtctatttttgtcactgtcggaacattgttcatcgtgatttaaaagctgaaaatttacttctggatgccaatctgaatatcaaaatagcagattttggtttcagtaacctcttcactcctgggcagctgctgaagacctggtgtggcagccctccctatgctgcacctgaactctttgaaggaaaagaatatgatgggcccaaagtggacatctggagccttggagttgtcctctacgtgcttgtgtgcggtgccctgccatttgatggaagcacactgcagaatctgcgggcccgcgtgctgagtggaaagttccgcatcccattttttatgtccacagaatgtgagcatttgatccgccatatgttggtgttagatcccaataagcgcctctccatggagcagatctgcaagcacaagtggatgaagctaggggacgccgatcccaactttgacaggttaatagctgaatgccaacaactaaaggaagaaagacaggtggaccccctgaatgaggatgtcctcttggccatggaggacatgggactggacaaagaacagacactgcagtcattaagatcagatgcctatgatcactatagtgcaatctacagcctgctgtgtgatcgacataagagacataaaaccctgcgtctcggagcacttcctagcatgccccgagccctggcctttcaagcaccagtcaatatccaggcggagcaggcaggtactgctatgaacatcagcgttccccaggtgcagctgatcaacccagagaaccaaattgtggagccggatgggacactgaatttggacagtgatgagggtgaagagccttcccctgaagcattggtgcgctatttgtcaatgaggaggcacacagtgggtgtggctgacccacgcacggaagttatggaagatctgcagaagctcctacctggctttcctggagtcaacccccaggctccattcctgcaggtggcccctaatgtgaacttcatgcacaacctgttgcctatgcaaaacttgcaaccaaccgggcaacttgagtacaaggagcagtctctcctacagccgcccacgctacagctgttgaatggaatgggcccccttggccggagggcatcagatggaggagccaacatccaactgcatgcccagcagctgctgaagcgcccacggggaccctctccgcttgtcaccatgacaccagcagtgccagcagttacccctgtggacgaggagagctcagacggggagccagaccaggaagctgtgcagagctctacctacaaggactccaacactctgcacctccctacggagcgtttctcccctgtgcgccggttctcagatggggctgcgagcatccaggccttcaaagctcacctggaaaaaatgggcaacaacagcagcatcaaacagctgcagcaggagtgtgagcagctgcagaagatgtacggggggcagattgatgaaagaaccctggagaagacccagcagcagcatatgttataccagcaggagcagcaccatcaaattctccagcaacaaattcaagactctatctgtcctcctcagccatctccacctcttcaggctgcatgtgaaaatcagccagccctccttacccatcagctccagaggttaaggattcagccttcaagcccaccccccaaccaccccaacaaccatctcttcaggcagcccagtaatagtcctccccccatgagcagtgccatgatccagcctcacggggctgcatcttcttcccagtttcaaggcttaccttcccgcagtgcaatctttcagcagcaacctgagaactgttcctctcctcccaacgtggcactaacctgcttgggtatgcagcagcctgctcagtcacagcaggtcaccatccaagtccaagagcctgttgacatgctcagcaacatgccaggcacagctgcaggctccagtgggcgcggcatctccatcagccccagtgctggtcagatgcagatgcagcaccgtaccaacctgatggccaccctcagctatgggcaccgtcccttgtccaagcagctgagtgctgacagtgcagaggctcacagcttgaacgtgaatcggttctcccctgctaactacgaccaggcgcatttacacccccatctgttttcggaccagtcccggggttcccccagcagctacagcccttcaacaggagtggggttctctccaacccaagccctgaaagtccctccacttgaccaattccccaccttccctcccagtgcacatcagcagccgccacactataccacgtcggcactacagcaggccctgctgtctcccacgccgccagactatacaagacaccagcaggtaccccacatccttcaaggactgctttctccccggcattcgctcaccggccactcggacatccggctgcccccaacagagtttgcacagctcattaaaaggcagcagcaacaacggcagcagcagcagcaacagcagcaacagcaagaataccaggaactgttcaggcacatgaaccaaggggatgcggggagtctggctcccagccttgggggacagagcatgacagagcgccaggctttatcttatcaaaatgctgactcttatcaccatcacaccagcccccagcatctgctacaaatcagggcacaagaatgtgtctcacaggcttcctcacccaccccgccccacgggtatgctcaccagccggcactgatgcattcagagagcatggaggaggactgctcgtgtgagggggccaaggatggcttccaagacagtaagagttcaagtacattgaccaaaggttgccatgacagccctctgctcttgagtaccggtggacctggggaccctgaatctttgctaggaactgtgagtcatgcccaagaattggggatacatccctatggtcatcagccaactgctgcattcagtaaaaataaggtgcccagcagagagcctgtcatagggaactgcatggatagaagttctccaggacaagcagtggagctgccggatcacaatgggctcgggtacccagcacgcccctccgtccatgagcaccacaggccccgggccctccagagacaccacacgatccagaacagcgacgatgcttatgtacagctggataacttgccaggaatgagtctcgtggctgggaaagcacttagctctgcccggatgtcggatgcagttctcagtcagtcttcgctcatgggcagccagcagtttcaggatggggaaaatgaggaatgtggggcaagcctgggaggtcatgagcacccagacctgagtgatggcagccagcatttaaactcctcttgctatccatctacgtgtattacagacattctgctcagctacaagcaccccgaagtctccttcagcatggagcaggcaggcgtgtaacaagaaacagagagttttgtgtacagcttgggaatgaaaaggttgattgtaaacccacagtatctagcagcgttgtgccaaattgcccttgtgtttctctccacccaaaatatcacagctgctttcctcacatttggttcatccgtgtgctgttcttttgggttctgagagggttttgccatgtttgcttgtatgaccaagtcaccaaggaaataaacaggaaggaaatcca

SEQ ID NO: 445221 - DNA, 483 bp, Homo sapiens
ctatttcattgagtgctttggattaacttctaatgcttcttgtggaggaatattcctgtctgtcttttttactatgaaatgtgctcctgcttgttgcaggtacttggcaaataggtccaaaagacatacactggccatgaccaaccctacagctgagatcccaccggacctacaacggcagctaggacagcagcctttccgttcccgggtctggcctcctcacctggtacctgatcagcatcggtgagtagccacatgagctgtgcgagctccttgaggctcatcggacaggcacccttctgattagtctcacagcgacggtgactagcatcgtggctttaaatagaagccagctgtcatcctgaactcacatcttctcagctccttgcagtaagcaatgcacagggcaaaggttttatactgcgccctggagcaatgcgagattcctctctcccattaccttgcagacctgtttattgtctg

SEQ ID NO: 445222 - DNA, 209 bp, Homo sapiens
accgggaagagatgcgtgaaactgggaagaagatgcagcccgtgaggctggatcatggcactgctcatgggagcagcaccatcaaattctccagcaacaaattcaagactctatctgtcctcctcagccatctccacctcttcaggctgcatgtgaaaatcagccagccctccttacccatcagctccagaggtatgagtcattttgtg

SEQ ID NO: 445223 - DNA, 6183 bp, Homo sapiens
caacaagatggcggcggcggcggcgagcggagctggcggggctgccggggccgggactgggggagccgggcccgcgggccgcctgctgcctccgcccgcgccggggtccccagccgcccccgctgccgtgtcccctgcggccggccagccgcgtcccccagccccggcctcccgcggacccatgcccgcccgtatcggctactacgagatcgaccgcaccatcggcaagggcaacttcgcggtggtcaagcgggccacgcacctcgtcaccaaggccaaggttgctatcaagatcatagataagacccagctggatgaagaaaacttgaagaagattttccgggaagttcaaattatgaagatgctttgccacccccatatcatcaggctctaccaggttatggagacagaacggatgatttatctggtgacagaatatgctagtggaggggaaatatttgaccacctggtggcccatggtagaatggcagaaaaggaggcacgtcggaagttcaaacagatcgtcacagctgtctatttttgtcactgtcggaacattgttcatcgtgatttaaaagctgaaaatttacttctggatgccaatctgaatatcaaaatagcagattttggtttcagtaacctcttcactcctgggcagctgctgaagacctggtgtggcagccctccctatgctgcacctgaactctttgaaggaaaagaatatgatgggcccaaagtggacatctggagccttggagttgtcctctacgtgcttgtgtgcggtgccctgccatttgatggaagcacactgcagaatctgcgggcccgcgtgctgagtggaaagttccgcatcccattttttatgtccacagaatgtgagcatttgatccgccatatgttggtgttagatcccaataagcgcctctccatggagcagatctgcaagcacaagtggatgaagctaggggacgccgatcccaactttgacaggttaatagctgaatgccaacaactaaaggaagaaagacaggtggaccccctgaatgaggatgtcctcttggccatggaggacatgggactggacaaagaacagacactgcagtcattaagatcagatgcctatgatcactatagtgcaatctacagcctgctgtgtgatcgacataagagacataaaaccctgcgtctcggagcacttcctagcatgccccgagccctggcctttcaagcaccagtcaatatccaggcggagcaggcaggtactgctatgaacatcagcgttccccaggtgcagctgatcaacccagagaaccaaattgtggagccggatgggacactgaatttggacagtgatgagggtgaagagccttcccctgaagcattggtgcgctatttgtcaatgaggaggcacacagtgggtgtggctgacccacgcacggaagttatggaagatctgcagaagctcctacctggctttcctggagtcaacccccaggctccattcctgcaggtggcccctaatgtgaacttcatgcacaacctgttgcctatgcaaaacttgcaaccaaccgggcaacttgagtacaaggagcagtctctcctacagccgcccacgctacagctgttgaatggaatgggcccccttggccggagggcatcagatggaggagccaacatccaactgcatgcccagcagctgctgaagcgcccacggggaccctctccgcttgtcaccatgacaccagcagtgccagcagttacccctgtggacgaggagagctcagacggggagccagaccaggaagctgtgcagaggtacttggcaaataggtccaaaagacatacactggccatgaccaaccctacagctgagatcccaccggacctacaacggcagctaggacagcagcctttccgttcccgggtctggcctcctcacctggtacctgatcagcatcgctctacctacaaggactccaacactctgcacctccctacggagcgtttctcccctgtgcgccggttctcagatggggctgcgagcatccaggccttcaaagctcacctggaaaaaatgggcaacaacagcagcatcaaacagctgcagcaggagtgtgagcagctgcagaagatgtacggggggcagattgatgaaagaaccctggagaagacccagcagcagcatatgttataccagcaggagcagcaccatcaaattctccagcaacaaattcaagactctatctgtcctcctcagccatctccacctcttcaggctgcatgtgaaaatcagccagccctccttacccatcagctccagaggttaaggattcagccttcaagcccaccccccaaccaccccaacaaccatctcttcaggcagcccagtaatagtcctccccccatgagcagtgccatgatccagcctcacggggctgcatcttcttcccagtttcaaggcttaccttcccgcagtgcaatctttcagcagcaacctgagaactgttcctctcctcccaacgtggcactaacctgcttgggtatgcagcagcctgctcagtcacagcaggtcaccatccaagtccaagagcctgttgacatgctcagcaacatgccaggcacagctgcaggctccagtgggcgcggcatctccatcagccccagtgctggtcagatgcagatgcagcaccgtaccaacctgatggccaccctcagctatgggcaccgtcccttgtccaagcagctgagtgctgacagtgcagaggctcacagtgcacatcagcagccgccacactataccacgtcggcactacagcaggccctgctgtctcccacgccgccagactatacaagacaccagcaggtaccccacatccttcaaggactgctttctccccggcattcgctcaccggccactcggacatccggctgcccccaacagagtttgcacagctcattaaaaggcagcagcaacaacggcagcagcagcagcaacagcagcaacagcaagaataccaggaactgttcaggcacatgaaccaaggggatgcggggagtctggctcccagccttgggggacagagcatgacagagcgccaggctttatcttatcaaaatgctgactcttatcaccatcacaccagcccccagcatctgctacaaatcagggcacaagaatgtgtctcacaggcttcctcacccaccccgccccacgggtatgctcaccagccggcactgatgcattcagagagcatggaggaggactgctcgtgtgagggggccaaggatggcttccaagacagtaagagttcaagtacattgaccaaaggttgccatgacagccctctgctcttgagtaccggtggacctggggaccctgaatctttgctaggaactgtgagtcatgcccaagaattggggatacatccctatggtcatcagccaactgctgcattcagtaaaaataaggtgcccagcagagagcctgtcatagggaactgcatggatagaagttctccaggacaagcagtggagctgccggatcacaatgggctcgggtacccagcacgcccctccgtccatgagcaccacaggccccgggccctccagagacaccacacgatccagaacagcgacgatgcttatgtacagctggataacttgccaggaatgagtctcgtggctgggaaagcacttagctctgcccggatgtcggatgcagttctcagtcagtcttcgctcatgggcagccagcagtttcaggatggggaaaatgaggaatgtggggcaagcctgggaggtcatgagcacccagacctgagtgatggcagccagcatttaaactcctcttgctatccatctacgtgtattacagacattctgctcagctacaagcaccccgaagtctccttcagcatggagcaggcaggcgtgtaacaagaaacagagagttttgtgtacagcttgggaatgaaaaggttgattgtaaacccacagtatctagcagcgttgtgccaaattgcccttgtgtttctctccacccaaaatatcacagctgctttcctcacatttggttcatccgtgtgctgttcttttgggttctgagagggttttgccatgtttgcttgtatgaccaagtcaccaaggaaataaacaggaaggaaatccatgttctccatcttttgtgaaagtatatttgagttggtggttttttgttttgtttgggggtttgtgttttgttttgtttttggtatgttttcttccagaggtgatatactttcttttttttcttcctttcttttttttctttcgttccttttttgaaacaggagagcaaagcagttagagttcagaggccagcggcctcagggccactccctccctagccttcatcagcagagcaccctccatccccctgcattgctcttctgtgaaagcaaatactaaaggatgccatcctctggaatcctaatggcaggcaaagggagagaggaagggtgacggcttctggcacttagaaaacaaaaagaacaaaaaaagagaaacccccaagcctggaacgcagagaggtctttactgctgggatccacggaaaacatgtctgtcctagccaagatcatatgaagagtttggcacggaggctgagaatgacctggcatagatggtttgccagttaggatgtctcaatttgagcctttgcttttggtggataactcagctcccctcttgtaacctggaaagttggttgcctttatcatcctgctggttttatccatggactgaacacccaacagcagtgcactatgctttctatggcatctttcattctcattttatattgtgctataaaaaggattgtttctccatatatatattatatatgtgtgtatatatataatataatatatgtgtatatatattattatatatataatatataatatataatatatatatattatatatataatatatatataaaatatatatatatatgctctcctctttcagcctctttgtcacagggaagaagtgtaggaggttgccttgggccctgcctctctcctaacctcctcttccccactgggtaccctcagcccctatattttaattcttgatcatgtagaaattgtttttggtaaatgttgatattattgttattatcattattaataaataaagagaaaaggaatttttgtttaaatgagaaatgtttaaccagattctgttctatttgaattgtgacttgcaccttttgttcaaagtatttcctttaggcattgtaattgtgaacagctcttacttgtgccagtgacagatgcagtggtctcctttccccagttgaagcagtgcatacgcagtagctattatttgtgttatctttatttctcttcattgttagaaaccaaagtcttctctgctggctggggctgagagagggtctgggttatctccttctgatcttcaaaacaagagagagaccttgaatacactgactcttccaccctttttttttctgggaaaggagagcaagaggtcccgagtcccctcctagtctttcatcctgaatttgcacagaggaaagcgggtgcccggcatggccatcctgatgttgctggcgggatccccatgcaccttgtccttctccactgatactggcagctcggctcctggacccaagatcccttgagtggaattctgcagtgcaagagcccttcgtgggagctgtcccatgtttccatggtccccagtctcccctccacttggtggggtcaccaactactcaccagaagggggcttaccaagaaagccctaaaaagctgttgacttatctgcgcttgttccaactcttatgcccccaacctgccctaccaccaccacgcgctcagcctgatgtgtttacatggtactgtatgtatgggagagcagactgcaccctccagcaacaacagatgaaagccagtgagcctactaaccgtgccatcttgcaaactacactttaaaaaaaactcattgctttgtattgtagtaaccaatatgtgcagtatacgttgaatgtatatgaacatactttcctatttctgttctttgaaaatgtcagaaatatttttttctttctcattttatgttgaactaaaaaggattaaaaaaaaaatctccagactcaagttgctaaaaacttt

SEQ ID NO: 445224 - DNA, 6148 bp, Homo sapiens
caacaagatggcggcggcggcggcgagcggagctggcggggctgccggggccgggactgggggagccgggcccgcgggccgcctgctgcctccgcccgcgccggggtccccagccgcccccgctgccgtgtcccctgcggccggccagccgcgtcccccagccccggcctcccgcggacccatgcccgcccgtatcggctactacgagatcgaccgcaccatcggcaagggcaacttcgcggtggtcaagcgggccacgcacctcgtcaccaaggccaaggttgctatcaagatcatagataagacccagctggatgaagaaaacttgaagaagattttccgggaagttcaaattatgaagatgctttgccacccccatatcatcaggctctaccaggttatggagacagaacggatgatttatctggtgacagaatatgctagtggaggggaaatatttgaccacctggtggcccatggtagaatggcagaaaaggaggcacgtcggaagttcaaacagatcgtcacagctgtctatttttgtcactgtcggaacattgttcatcgtgatttaaaagctgaaaatttacttctggatgccaatctgaatatcaaaatagcagattttggtttcagtaacctcttcactcctgggcagctgctgaagacctggtgtggcagccctccctatgctgcacctgaactctttgaaggaaaagaatatgatgggcccaaagtggacatctggagccttggagttgtcctctacgtgcttgtgtgcggtgccctgccatttgatggaagcacactgcagaatctgcgggcccgcgtgctgagtggaaagttccgcatcccattttttatgtccacagaatgtgagcatttgatccgccatatgttggtgttagatcccaataagcttaatagctgaatgccaacaactaaaggaagaaagacaggtggaccccctgaatgaggatgtcctcttggccatggaggacatgggactggacaaagaacagacactgcaggcggagcaggcaggtactgctatgaacatcagcgttccccaggtgcagctgatcaacccagagaaccaaattgtggagccggatgggacactgaatttggacagtgatgagggtgaagagccttcccctgaagcattggtgcgctatttgtcaatgaggaggcacacagtgggtgtggctgacccacgcacggaagttatggaagatctgcagaagctcctacctggctttcctggagtcaacccccaggctccattcctgcaggtggcccctaatgtgaacttcatgcacaacctgttgcctatgcaaaacttgcaaccaaccgggcaacttgagtacaaggagcagtctctcctacagccgcccacgctacagctgttgaatggaatgggcccccttggccggagggcatcagatggaggagccaacatccaactgcatgcccagcagctgctgaagcgcccacggggaccctctccgcttgtcaccatgacaccagcagtgccagcagttacccctgtggacgaggagagctcagacggggagccagaccaggaagctgtgcagaggtacttggcaaataggtccaaaagacatacactggccatgaccaaccctacagctgagatcccaccggacctacaacggcagctaggacagcagcctttccgttcccgggtctggcctcctcacctggtacctgatcagcatcgctctacctacaaggactccaacactctgcacctccctacggagcgtttctcccctgtgcgccggttctcagatggggctgcgagcatccaggccttcaaagctcacctggaaaaaatgggcaacaacagcagcatcaaacagctgcagcaggagtgtgagcagctgcagaagatgtacggggggcagattgatgaaagaaccctggagaagacccagcagcagcatatgttataccagcaggagcagcaccatcaaattctccagcaacaaattcaagactctatctgtcctcctcagccatctccacctcttcaggctgcatgtgaaaatcagccagccctccttacccatcagctccagaggttaaggattcagccttcaagcccaccccccaaccaccccaacaaccatctcttcaggcagcccagtaatagtcctccccccatgagcagtgccatgatccagcctcacggggctgcatcttcttcccagtttcaaggcttaccttcccgcagtgcaatctttcagcagcaacctgagaactgttcctctcctcccaacgtggcactaacctgcttgggtatgcagcagcctgctcagtcacagcaggtcaccatccaagtccaagagcctgttgacatgctcagcaacatgccaggcacagctgcaggctccagtgggcgcggcatctccatcagccccagtgctggtcagatgcagatgcagcaccgtaccaacctgatggccaccctcagctatgggcaccgtcccttgtccaagcagctgagtgctgacagtgcagaggctcacagcttgaacgtgaatcggttctcccctgctaactacgaccaggcgcatttacacccccatctgttttcggaccagtcccggggttcccccagcagctacagcccttcaacaggagtggggttctctccaacccaagccctgaaagtccctccacttgaccaattccccaccttccctcccagtgcacatcagcagccgccacactataccacgtcggcactacagcaggccctgctgtctcccacgccgccagactatacaagacaccagcaggtaccccacatccttcaaggactgctttctccccggcattcgctcaccggccactcggacatccggctgcccccaacagagtttgcacagctcattaaaaggcagcagcaacaacggcagcagcagcagcaacagcagcaacagcaagaataccaggaactgttcaggcacatgaaccaaggggatgcggggagtctggctcccagccttgggggacagagcatgacagagcgccaggctttatcttatcaaaatgctgactcttatcaccatcacaccagcccccagcatctgctacaaatcagggcacaagaatgtgtctcacaggcttcctcacccaccccgccccacgggtatgctcaccagccggcactgatgcattcagagagcatggaggaggactgctcgtgtgagggggccaaggatggcttccaagacagtaagagttcaagtacattgaccaaaggttgccatgacagccctctgctcttgagtaccggtggacctggggaccctgaatctttgctaggaactgtgagtcatgcccaagaattggggatacatccctatggtcatcagccaactgctgcattcagtaaaaataaggtgcccagcagagagcctgtcatagggaactgcatggatagaagttctccaggacaagcagtggagctgccggatcacaatgggctcgggtacccagcacgcccctccgtccatgagcaccacaggccccgggccctccagagacaccacacgatccagaacagcgacgatgcttatgtacagctggataacttgccaggaatgagtctcgtggctgggaaagcacttagctctgcccggatgtcggatgcagttctcagtcagtcttcgctcatgggcagccagcagtttcaggatggggaaaatgaggaatgtggggcaagcctgggaggtcatgagcacccagacctgagtgatggcagccagcatttaaactcctcttgctatccatctacgtgtattacagacattctgctcagctacaagcaccccgaagtctccttcagcatggagcaggcaggcgtgtaacaagaaacagagagttttgtgtacagcttgggaatgaaaaggttgattgtaaacccacagtatctagcagcgttgtgccaaattgcccttgtgtttctctccacccaaaatatcacagctgctttcctcacatttggttcatccgtgtgctgttcttttgggttctgagagggttttgccatgtttgcttgtatgaccaagtcaccaaggaaataaacaggaaggaaatccatgttctccatcttttgtgaaagtatatttgagttggtggttttttgttttgtttgggggtttgtgttttgttttgtttttggtatgttttcttccagaggtgatatactttcttttttttcttcctttcttttttttctttcgttccttttttgaaacaggagagcaaagcagttagagttcagaggccagcggcctcagggccactccctccctagccttcatcagcagagcaccctccatccccctgcattgctcttctgtgaaagcaaatactaaaggatgccatcctctggaatcctaatggcaggcaaagggagagaggaagggtgacggcttctggcacttagaaaacaaaaagaacaaaaaaagagaaacccccaagcctggaacgcagagaggtctttactgctgggatccacggaaaacatgtctgtcctagccaagatcatatgaagagtttggcacggaggctgagaatgacctggcatagatggtttgccagttaggatgtctcaatttgagcctttgcttttggtggataactcagctcccctcttgtaacctggaaagttggttgcctttatcatcctgctggttttatccatggactgaacacccaacagcagtgcactatgctttctatggcatctttcattctcattttatattgtgctataaaaaggattgtttctccatatatatattatatatgtgtgtatatatataatataatatatgtgtatatatattattatatatataatatataatatataatatatatatattatatatataatatatatataaaatatatatatatatgctctcctctttcagcctctttgtcacagggaagaagtgtaggaggttgccttgggccctgcctctctcctaacctcctcttccccactgggtaccctcagcccctatattttaattcttgatcatgtagaaattgtttttggtaaatgttgatattattgttattatcattattaataaataaagagaaaaggaatttttgtttaaatgagaaatgtttaaccagattctgttctatttgaattgtgacttgcaccttttgttcaaagtatttcctttaggcattgtaattgtgaacagctcttacttgtgccagtgacagatgcagtggtctcctttccccagttgaagcagtgcatacgcagtagctattatttgtgttatctttatttctcttcattgttagaaaccaaagtcttctctgctggctggggctgagagagggtctgggttatctccttctgatcttcaaaacaagagagagaccttgaatacactgactcttccaccctttttttttctgggaaaggagagcaagaggtcccgagtcccctcctagtctttcatcctgaatttgcacagaggaaagcgggtgcccggcatggccatcctgatgttgctggcgggatccccatgcaccttgtccttctccactgatactggcagctcggctcctggacccaagatcccttgagtggaattctgcagtgcaagagcccttcgtgggagctgtcccatgtttccatggtccccagtctcccctccacttggtggggtcaccaactactcaccagaagggggcttaccaagaaagccctaaaaagctgttgacttatctgcgcttgttccaactcttatgcccccaacctgccctaccaccaccacgcgctcagcctgatgtgtttacatggtactgtatgtatgggagagcagactgcaccctccagcaacaacagatgaaagccagtgagcctactaaccgtgccatcttgcaaactacactttaaaaaaaactcattgctttgtattgtagtaaccaatatgtgcagtatacgttgaatgtatatgaacatactttcctatttctgttctttgaaaatgtcagaaatatttttttctttctcattttatgttgaactaaaaaggattaaaaaaaaaatctccagactcaagttgctaaaaacttt

SEQ ID NO: 445225 - DNA, 5243 bp, Homo sapiens
  misc_feature (8)..(8): n is a, c, g, or t
ttttcgcnaattgcccattgcaagggtcagactcttagaaggatccccatgcagttggatgttggctcctcacatctgatgccctccggccaagggggcccattccattcaacagctgtagcgtgggcggctgtaggagagactgctccttgtactcacgttccccaggtgcagctgatcaacccagagaaccaaattgtggagccggatgggacactgaatttggacagtgatgagggtgaagagccttcccctgaagcattggtgcgctatttgtcaatgaggaggcacacagtgggtgtggctgacccacgcacggaagttatggaagatctgcagaagctcctacctggctttcctggagtcaacccccaggctccattcctgcaggtggcccctaatgtgaacttcatgcacaacctgttgcctatgcaaaacttgcaaccaaccgggcaacttgagtacaaggagcagtctctcctacagccgcccacgctacagctgttgaatggaatgggcccccttggccggagggcatcagatggaggagccaacatccaactgcatgcccagcagctgctgaagcgcccacggggaccctctccgcttgtcaccatgacaccagcagtgccagcagttacccctgtggacgaggagagctcagacggggagccagaccaggaagctgtgcagaggtacttggcaaataggtccaaaagacatacactggccatgaccaaccctacagctgagatcccaccggacctacaacggcagctaggacagcagcctttccgttcccgggtctggcctcctcacctggtacctgatcagcatcgctctacctacaaggactccaacactctgcacctccctacggagcgtttctcccctgtgcgccggttctcagatggggctgcgagcatccaggccttcaaagctcacctggaaaaaatgggcaacaacagcagcatcaaacagctgcagcaggagtgtgagcagctgcagaagatgtacggggggcagattgatgaaagaaccctggagaagacccagcagcagcatatgttataccagcaggagcagcaccatcaaattctccagcaacaaattcaagactctatctgtcctcctcagccatctccacctcttcaggctgcatgtgaaaatcagccagccctccttacccatcagctccagaggttaaggattcagccttcaagcccaccccccaaccaccccaacaaccatctcttcaggcagcccagtaatagtcctccccccatgagcagtgccatgatccagcctcacggggctgcatcttcttcccagtttcaaggcttaccttcccgcagtgcaatctttcagcagcaacctgagaactgttcctctcctcccaacgtggcactaacctgcttgggtatgcagcagcctgctcagtcacagcaggtcaccatccaagtccaagagcctgttgacatgctcagcaacatgccaggcacagctgcaggctccagtgggcgcggcatctccatcagccccagtgctggtcagatgcagatgcagcaccgtaccaacctgatggccaccctcagctatgggcaccgtcccttgtccaagcagctgagtgctgacagtgcagaggctcacagcttgaacgtgaatcggttctcccctgctaactacgaccaggcgcatttacacccccatctgttttcggaccagtcccggggttcccccagcagctacagcccttcaacaggagtggggttctctccaacccaagccctgaaagtccctccacttgaccaattccccaccttccctcccagtgcacatcagcagccgccacactataccacgtcggcactacagcaggccctgctgtctcccacgccgccagactatacaagacaccagcaggtaccccacatccttcaaggactgctttctccccggcattcgctcaccggccactcggacatccggctgcccccaacagagtttgcacagctcattaaaaggcagcagcaacaacggcagcagcagcagcaacagcagcaacagcaagaataccaggaactgttcaggcacatgaaccaaggggatgcggggagtctggctcccagccttgggggacagagcatgacagagcgccaggctttatcttatcaaaatgctgactcttatcaccatcacaccagcccccagcatctgctacaaatcagggcacaagaatgtgtctcacaggcttcctcacccaccccgccccacgggtatgctcaccagccggcactgatgcattcagagagcatggaggaggactgctcgtgtgagggggccaaggatggcttccaagacagtaagagttcaagtacattgaccaaaggttgccatgacagccctctgctcttgagtaccggtggacctggggaccctgaatctttgctaggaactgtgagtcatgcccaagaattggggatacatccctatggtcatcagccaactgctgcattcagtaaaaataaggtgcccagcagagagcctgtcatagggaactgcatggatagaagttctccaggacaagcagtggagctgccggatcacaatgggctcgggtacccagcacgcccctccgtccatgagcaccacaggccccgggccctccagagacaccacacgatccagaacagcgacgatgcttatgtacagctggataacttgccaggaatgagtctcgtggctgggaaagcacttagctctgcccggatgtcggatgcagttctcagtcagtcttcgctcatgggcagccagcagtttcaggatggggaaaatgaggaatgtggggcaagcctgggaggtcatgagcacccagacctgagtgatggcagccagcatttaaactcctcttgctatccatctacgtgtattacagacattctgctcagctacaagcaccccgaagtctccttcagcatggagcaggcaggcgtgtaacaagaaacagagagttttgtgtacagcttgggaatgaaaaggttgattgtaaacccacagtatctagcagcgttgtgccaaattgcccttgtgtttctctccacccaaaatatcacagctgctttcctcacatttggttcatccgtgtgctgttcttttgggttctgagagggttttgccatgtttgcttgtatgaccaagtcaccaaggaaataaacaggaaggaaatccatgttctccatcttttgtgaaagtatatttgagttggtggttttttgttttgtttgggggtttgtgttttgttttgtttttggtatgttttcttccagaggtgatatactttcttttttttcttcctttcttttttttctttcgttccttttttgaaacaggagagcaaagcagttagagttcagaggccagcggcctcagggccactccctccctagccttcatcagcagagcaccctccatccccctgcattgctcttctgtgaaagcaaatactaaaggatgccatcctctggaatcctaatggcaggcaaagggagagaggaagggtgacggcttctggcacttagaaaacaaaaagaacaaaaaaagagaaacccccaagcctggaacgcagagaggtctttactgctgggatccacggaaaacatgtctgtcctagccaagatcatatgaagagtttggcacggaggctgagaatgacctggcatagatggtttgccagttaggatgtctcaatttgagcctttgcttttggtggataactcagctcccctcttgtaacctggaaagttggttgcctttatcatcctgctggttttatccatggactgaacacccaacagcagtgcactatgctttctatggcatctttcattctcattttatattgtgctataaaaaggattgtttctccatatatatattatatatgtgtgtatatatataatataatatatgtgtatatatattattatatatataatatataatatataatatatatatattatatatataatatatatataaaatatatatatatatgctctcctctttcagcctctttgtcacagggaagaagtgtaggaggttgccttgggccctgcctctctcctaacctcctcttccccactgggtaccctcagcccctatattttaattcttgatcatgtagaaattgtttttggtaaatgttgatattattgttattatcattattaataaataaagagaaaaggaatttttgtttaaatgagaaatgtttaaccagattctgttctatttgaattgtgacttgcaccttttgttcaaagtatttcctttaggcattgtaattgtgaacagctcttacttgtgccagtgacagatgcagtggtctcctttccccagttgaagcagtgcatacgcagtagctattatttgtgttatctttatttctcttcattgttagaaaccaaagtcttctctgctggctggggctgagagagggtctgggttatctccttctgatcttcaaaacaagagagagaccttgaatacactgactcttccaccctttttttttctgggaaaggagagcaagaggtcccgagtcccctcctagtctttcatcctgaatttgcacagaggaaagcgggtgcccggcatggccatcctgatgttgctggcgggatccccatgcaccttgtccttctccactgatactggcagctcggctcctggacccaagatcccttgagtggaattctgcagtgcaagagcccttcgtgggagctgtcccatgtttccatggtccccagtctcccctccacttggtggggtcaccaactactcaccagaagggggcttaccaagaaagccctaaaaagctgttgacttatctgcgcttgttccaactcttatgcccccaacctgccctaccaccaccacgcgctcagcctgatgtgtttacatggtactgtatgtatgggagagcagactgcaccctccagcaacaacagatgaaagccagtgagcctactaaccgtgccatcttgcaaactacactttaaaaaaaactcattgctttgtattgtagtaaccaatatgtgcagtatacgttgaatgtatatgaacatactttcctatttctgttctttgaaaatgtcagaaatatttttttctttctcattttatgttgaactaaaaaggattaaaaaaaaaatctccagactcaagttgctaaaaacttt

SEQ ID NO: 445226 - DNA, 2578 bp, Homo sapiens
tcaggcgggctcaaacgggtcagagcagcgacgatgcttatgtacagctggataacttgccaggaatgagtctcgtggctgggaaagcacttagctctgcccggatgtcggatgcagttctcagtcagtcttcgctcatgggcagccagcagtttcaggatggggaaaatgaggaatgtggggcaagcctgggaggtcatgagcacccagacctgagtgatggcagccagcatttaaactcctcttgctatccatctacgtgtattacagacattctgctcagctacaagcaccccgaagtctccttcagcatggagcaggcaggcgtgtaacaagaaacagagagttttgtgtacagcttgggaatgaaaaggttgattgtaaacccacagtatctagcagcgttgtgccaaattgcccttgtgtttctctccacccaaaatatcacagctgctttcctcacatttggttcatccgtgtgctgttcttttgggttctgagagggttttgccatgtttgcttgtatgaccaagtcaccaaggaaataaacaggaaggaaatccatgttctccatcttttgtgaaagtatatttgagttggtggttttttgttttgtttgggggtttgtgttttgttttgtttttggtatgttttcttccagaggtgatatactttcttttttttcttcctttcttttttttctttcgttccttttttgaaacaggagagcaaagcagttagagttcagaggccagcggcctcagggccactccctccctagccttcatcagcagagcaccctccatccccctgcattgctcttctgtgaaagcaaatactaaaggatgccatcctctggaatcctaatggcaggcaaagggagagaggaagggtgacggcttctggcacttagaaaacaaaaagaacaaaaaaagagaaacccccaagcctggaacgcagagaggtctttactgctgggatccacggaaaacatgtctgtcctagccaagatcatatgaagagtttggcacggaggctgagaatgacctggcatagatggtttgccagttaggatgtctcaatttgagcctttgcttttggtggataactcagctcccctcttgtaacctggaaagttggttgcctttatcatcctgctggttttatccatggactgaacacccaacagcagtgcactatgctttctatggcatctttcattctcattttatattgtgctataaaaaggattgtttctccatatatatattatatatgtgtgtatatatataatataatatatgtgtatatatattattatatatataatatataatatataatatatatatattatatatataatatatatataaaatatatatatatatgctctcctctttcagcctctttgtcacagggaagaagtgtaggaggttgccttgggccctgcctctctcctaacctcctcttccccactgggtaccctcagcccctatattttaattcttgatcatgtagaaattgtttttggtaaatgttgatattattgttattatcattattaataaataaagagaaaaggaatttttgtttaaatgagaaatgtttaaccagattctgttctatttgaattgtgacttgcaccttttgttcaaagtatttcctttaggcattgtaattgtgaacagctcttacttgtgccagtgacagatgcagtggtctcctttccccagttgaagcagtgcatacgcagtagctattatttgtgttatctttatttctcttcattgttagaaaccaaagtcttctctgctggctggggctgagagagggtctgggttatctccttctgatcttcaaaacaagagagagaccttgaatacactgactcttccaccctttttttttctgggaaaggagagcaagaggtcccgagtcccctcctagtctttcatcctgaatttgcacagaggaaagcgggtgcccggcatggccatcctgatgttgctggcgggatccccatgcaccttgtccttctccactgatactggcagctcggctcctggacccaagatcccttgagtggaattctgcagtgcaagagcccttcgtgggagctgtcccatgtttccatggtccccagtctcccctccacttggtggggtcaccaactactcaccagaagggggcttaccaagaaagccctaaaaagctgttgacttatctgcgcttgttccaactcttatgcccccaacctgccctaccaccaccacgcgctcagcctgatgtgtttacatggtactgtatgtatgggagagcagactgcaccctccagcaacaacagatgaaagccagtgagcctactaaccgtgccatcttgcaaactacactttaaaaaaaactcattgctttgtattgtagtaaccaatatgtgcagtatacgttgaatgtatatgaacatactttcctatttctgttctttgaaaatgtcagaaatatttttttctttctcattttatgttgaactaaaaaggattaaaaaaaaaatctccagactcaagttgctaaaaacttt

SEQ ID NO: 445227 - DNA, 5888 bp, Homo sapiens
caacaagatggcggcggcggcggcgagcggagctggcggggctgccggggccgggactgggggagccgggcccgcgggccgcctgctgcctccgcccgcgccggggtccccagccgcccccgctgccgtgtcccctgcggccggccagccgcgtcccccagccccggcctcccgcggacccatgcccgcccgtatcggctactacgagatcgaccgcaccatcggcaagggcaacttcgcggtggtcaagcgggccacgcacctcgtcaccaaggccaaggttgctatcaagatcatagataagacccagctggatgaagaaaacttgaagaagattttccgggaagttcaaattatgaagatgctttgccacccccatatcatcaggctctaccaggttatggagacagaacggatgatttatctggtgacagaatatgctagtggaggggaaatatttgaccacctggtggcccatggtagaatggcagaaaaggaggcacgtcggaagttcaaacagatcgtcacagctgtctatttttgtcactgtcggaacattgttcatcgtgatttaaaagctgaaaatttacttctggatgccaatctgaatatcaaaatagcagattttggtttcagtaacctcttcactcctgggcagctgctgaagacctggtgtggcagccctccctatgctgcacctgaactctttgaaggaaaagaatatgatgggcccaaagtggacatctggagccttggagttgtcctctacgtgcttgtgtgcggtgccctgccatttgatggaagcacactgcagaatctgcgggcccgcgtgctgagtggaaagttccgcatcccattttttatgtccacagaatgtgagcatttgatccgccatatgttggtgttagatcccaataagcgcctctccatggagcagatctgcaagcacaagtggatgaagctaggggacgccgatcccaactttgacaggttaatagctgaatgccaacaactaaaggaagaaagacaggtggaccccctgaatgaggatgtcctcttggccatggaggacatgggactggacaaagaacagacactgcagtcattaagatcagatgcctatgatcactatagtgcaatctacagcctgctgtgtgatcgacataagagacataaaaccctgcgtctcggagcacttcctagcatgccccgagccctggcctttcaagcaccagtcaatatccaggcggagcaggcaggtactgctatgaacatcagcgttccccaggtgcagctgatcaacccagagaaccaaattgtggagccggatgggacactgaatttggacagtgatgagggtgaagagccttcccctgaagcattggtgcgctatttgtcaatgaggaggcacacagtgggtgtggctgacccacgcacggaagttatggaagatctgcagaagctcctacctggctttcctggagtcaacccccaggctccattcctgcaggtggcccctaatgtgaacttcatgcacaacctgttgcctatgcaaaacttgcaaccaaccgggcaacttgagtacaaggagcagtctctcctacagccgcccacgctacagctgttgaatggaatgggcccccttggccggagggcatcagatggaggagccaacatccaactgcatgcccagcagctgctgaagcgcccacggggaccctctccgcttgtcaccatgacaccagcagtgccagcagttacccctgtggacgaggagagctcagacggggagccagaccaggaagctgtgcagaggtacttggcaaataggtccaaaagacatacactggccatgaccaaccctacagctgagatcccaccggacctacaacggcagctaggacagcagcctttccgttcccgggtctggcctcctcacctggtacctgatcagcatcgctctacctacaaggactccaacactctgcacctccctacggagcgtttctcccctgtgcgccggttctcagatggggctgcgagcatccaggccttcaaagctcacctggaaaaaatgggcaacaacagcagcatcaaacagctgcagcaggagtgtgagcagctgcagaagatgtacggggggcagattgatgaaagaaccctggagaagacccagcagcagcatatgttataccagcaggagcagcaccatcaaattctccagcaacaaattcaagactctatctgtcctcctcagccatctccacctcttcaggctgcatgtgaaaatcagccagccctccttacccatcagctccagaggttaaggattcagccttcaagcccaccccccaaccaccccaacaaccatctcttcaggcagcccagtaatagtcctccccccatgagcagtgccatgatccagcctcacggggctgcatcttcttcccagtttcaaggcttaccttcccgcagtgcaatctttcagcagcaacctgagaactgttcctctcctcccaacgtggcactaacctgcttgggtatgcagcagcctgctcagtcacagcaggtcaccatccaagtccaagagcctgttgacatgctcagcaacatgccaggcacagctgcaggctccagtgggcgcggcatctccatcagccccagtgctggtcagatgcagatgcagcaccgtaccaacctgatggccaccctcagctatgggcaccgtcccttgtccaagcagctgagtgctgacagtgcagaggctcacagcttgaacgtgaatcggttctcccctgctaactacgaccaggcgcatttacacccccatctgttttcggaccagtcccggggttcccccagcagctacagcccttcaacaggagtggggttctctccaacccaagccctgaaagtccctccacttgaccaattccccaccttccctcccagtgcacatcagcagccgccacactataccacgtcggcactacagcaggccctgctgtctcccacgccgccagactatacaagacaccagcaggtaccccacatccttcaaggactgctttctccccggcattcgctcaccggccactcggacatccggctgcccccaacagagtttgcacagctcattaaaaggcagcagcaacaacggcagcagcagcagcaacagcagcaacagcaagaataccaggaactgttcaggcacatgaaccaaggggatgcggggagtctggctcccagccttgggggacagagcatgacagagcgccaggctttatcttatcaaaatgctgactcttatcaccatcacaccagcccccagcatctgctacaaatcagggcacaagaatgtgtctcacaggcttcctcacccaccccgccccacgggtatgctcaccagccggcactgatgcattcagagagcatggaggaggactgctcgtgtgagggggccaaggatggcttccaagacagtaagagttcaagtacattgaccaaaggttgccatgacagccctctgctcttgagtaccggtggacctggggaccctgaatctttgctaggaactgtgagtcatgcccaagaattggggatacatccctatggtcatcagccaactgctgcattcagtaaaaataaggtgcccagcagagagcctgtcatagggaactgcatggatagaagttctccaggacaagcagtggagctgccggatcacaatgggctcgggtacccagcacgcccctccgtccatgagcaccacaggccccgggccctccagagacaccacacgatccagaacagcgacgatgcttatgtacagctggataacttgccaggaatgagtctcgtggctgggaaagcacttagctctgcccggatgtcggatgcagttctcagtcagtcttcgctcatgggcagccagcagtttcaggatggggaaaatgaggacattctgctcagctacaagcaccccgaagtctccttcagcatggagcaggcaggcgtgtaacaagaaacagagagagagcaaagcagttagagttcagaggccagcggcctcagggccactccctccctagccttcatcagcagagcaccctccatccccctgcattgctcttctgtgaaagcaaatactaaaggatgccatcctctggaatcctaatggcaggcaaagggagagaggaagggtgacggcttctggcacttagaaaacaaaaagaacaaaaaaagagaaacccccaagcctggaacgcagagaggtctttactgctgggatccacggaaaacatgtctgtcctagccaagatcatatgaagagtttggcacggaggctgagaatgacctggcatagatggtttgccagttaggatgtctcaatttgagcctttgcttttggtggataactcagctcccctcttgtaacctggaaagttggttgcctttatcatcctgctggttttatccatggactgaacacccaacagcagtgcactatgctttctatggcatctttcattctcattttatattgtgctataaaaaggattgtttctccatatatatattatatatgtgtgtatatatataatataatatatgtgtatatatattattatatatataatatataatatataatatatatatattatatatataatatatatataaaatatatatatatatgctctcctctttcagcctctttgtcacagggaagaagtgtaggaggttgccttgggccctgcctctctcctaacctcctcttccccactgggtaccctcagcccctatattttaattcttgatcatgtagaaattgtttttggtaaatgttgatattattgttattatcattattaataaataaagagaaaaggaatttttgtttaaatgagaaatgtttaaccagattctgttctatttgaattgtgacttgcaccttttgttcaaagtatttcctttaggcattgtaattgtgaacagctcttacttgtgccagtgacagatgcagtggtctcctttccccagttgaagcagtgcatacgcagtagctattatttgtgttatctttatttctcttcattgttagaaaccaaagtcttctctgctggctggggctgagagagggtctgggttatctccttctgatcttcaaaacaagagagagaccttgaatacactgactcttccaccctttttttttctgggaaaggagagcaagaggtcccgagtcccctcctagtctttcatcctgaatttgcacagaggaaagcgggtgcccggcatggccatcctgatgttgctggcgggatccccatgcaccttgtccttctccactgatactggcagctcggctcctggacccaagatcccttgagtggaattctgcagtgcaagagcccttcgtgggagctgtcccatgtttccatggtccccagtctcccctccacttggtggggtcaccaactactcaccagaagggggcttaccaagaaagccctaaaaagctgttgacttatctgcgcttgttccaactcttatgcccccaacctgccctaccaccaccacgcgctcagcctgatgtgtttacatggtactgtatgtatgggagagcagactgcaccctccagcaacaacagatgaaagccagtgagcctactaaccgtgccatcttgcaaactacactttaaaaaaaactcattgctttgtattgtagtaaccaatatgtgcagtatacgttgaatgtatatgaacatactttcctatttctgttctttgaaaatgtcagaaatatttttttctttctcattttatgttgaactaaaaaggattaaaaaaaaaatctccagactcaagttgctaaaaacttt

SEQ ID NO: 445228 - DNA, 6227 bp, Homo sapiens
  misc_feature (5871)..(5871): n is a, c, g, or t
caacaagatggcggcggcggcggcgagcggagctggcggggctgccggggccgggactgggggagccgggcccgcgggccgcctgctgcctccgcccgcgccggggtccccagccgcccccgctgccgtgtcccctgcggccggccagccgcgtcccccagccccggcctcccgcggacccatgcccgcccgtatcggctactacgagatcgaccgcaccatcggcaagggcaacttcgcggtggtcaagcgggccacgcacctcgtcaccaaggccaaggttgctatcaagatcatagataagacccagctggatgaagaaaacttgaagaagattttccgggaagttcaaattatgaagatgctttgccacccccatatcatcaggctctaccaggttatggagacagaacggatgatttatctggtgacagaatatgctagtggaggggaaatatttgaccacctggtggcccatggtagaatggcagaaaaggaggcacgtcggaagttcaaacagatcgtcacagctgtctatttttgtcactgtcggaacattgttcatcgtgatttaaaagctgaaaatttacttctggatgccaatctgaatatcaaaatagcagattttggtttcagtaacctcttcactcctgggcagctgctgaagacctggtgtggcagccctccctatgctgcacctgaactctttgaaggaaaagaatatgatgggcccaaagtggacatctggagccttggagttgtcctctacgtgcttgtgtgcggtgccctgccatttgatggaagcacactgcagaatctgcgggcccgcgtgctgagtggaaagttccgcatcccattttttatgtccacagaatgtgagcatttgatccgccatatgttggtgttagatcccaataagcgcctctccatggagcagatctgcaagcacaagtggatgaagctaggggacgccgatcccaactttgacaggttaatagctgaatgccaacaactaaaggaagaaagacaggtggaccccctgaatgaggatgtcctcttggccatggaggacatgggactggacaaagaacagacactgcagtcattaagatcagatgcctatgatcactatagtgcaatctacagcctgctgtgtgatcgacataagagacataaaaccctgcgtctcggagcacttcctagcatgccccgagccctggcctttcaagcaccagtcaatatccaggcggagcaggcaggtactgctatgaacatcagcgttccccaggtgcagctgatcaacccagagaaccaaattgtggagccggatgggacactgaatttggacagtgatgagggtgaagagccttcccctgaagcattggtgcgctatttgtcaatgaggaggcacacagtgggtgtggctgacccacgcacggaagttatggaagatctgcagaagctcctacctggctttcctggagtcaacccccaggctccattcctgcaggtggcccctaatgtgaacttcatgcacaacctgttgcctatgcaaaacttgcaaccaaccgggcaacttgagtacaaggagcagtctctcctacagccgcccacgctacagctgttgaatggaatgggcccccttggccggagggcatcagatggaggagccaacatccaactgcatgcccagcagctgctgaagcgcccacggggaccctctccgcttgtcaccatgacaccagcagtgccagcagttacccctgtggacgaggagagctcagacggggagccagaccaggaagctgtgcagaggtacttggcaaataggtccaaaagacatacactggccatgaccaaccctacagctgagatcccaccggacctacaacggcagctaggacagcagcctttccgttcccgggtctggcctcctcacctggtacctgatcagcatcgctctacctacaaggactccaacactctgcacctccctacggagcgtttctcccctgtgcgccggttctcagatggggctgcgagcatccaggccttcaaagctcacctggaaaaaatgggcaacaacagcagcatcaaacagctgcagcaggagtgtgagcagctgcagaagatgtacggggggcagattgatgaaagaaccctggagaagacccagcagcagcatatgttataccagcaggagcagcaccatcaaattctccagcaacaaattcaagactctatctgtcctcctcagccatctccacctcttcaggctgcatgtgaaaatcagccagccctccttacccatcagctccagaggttaaggattcagccttcaagcccaccccccaaccaccccaacaaccatctcttcaggcagcccagtaatagtcctccccccatgagcagtgccatgatccagcctcacggggctgcatcttcttcccagtttcaaggcttaccttcccgcagtgcaatctttcagcagcaacctgagaactgttcctctcctcccaacgtggcactaacctgcttgggtatgcagcagcctgctcagtcacagcaggtcaccatccaagtccaagagcctgttgacatgctcagcaacatgccaggcacagctgcaggctccagtgggcgcggcatctccatcagccccagtgctggtcagatgcagatgcagcaccgtaccaacctgatggccaccctcagctatgggcaccgtcccttgtccaagcagctgagtgctgacagtgcagaggctcacagcttgaacgtgaatcggttctcccctgctaactacgaccaggcgcatttacacccccatctgttttcggaccagtcccggggttcccccagcagctacagcccttcaacaggagtggggttctctccaacccaagccctgaaagtccctccacttgaccaattccccaccttccctcccagtgcacatcagcagccgccacactataccacgtcggcactacagcaggccctgctgtctcccacgccgccagactatacaagacaccagcaggtaccccacatccttcaaggactgctttctccccggcattcgctcaccggccactcggacatccggctgcccccaacagagtttgcacagctcattaaaaggcagcagcaacaacggcagcagcagcagcaacagcagcaacagcaagaataccaggaactgttcaggcacatgaaccaaggggatgcggggagtctggctcccagccttgggggacagagcatgacagagcgccaggctttatcttatcaaaatgctgactcttatcaccatcacaccagcccccagcatctgctacaaatcagggcacaagaatgtgtctcacaggcttcctcacccaccccgccccacgggtatgctcaccagccggcactgatgcattcagagagcatggaggaggactgctcgtgtgagggggccaaggatggcttccaagacagtaagagttcaagtacattgaccaaaggttgccatgacagccctctgctcttgagtaccggtggacctggggaccctgaatctttgctaggaactgtgagtcatgcccaagaattggggatacatccctatggtcatcagccaactgctgcattcagtaaaaataaggtgcccagcagagagcctgtcatagggaactgcatggatagaagttctccaggacaagcagtggagctgccggatcacaatgggctcgggtacccagcacgcccctccgtccatgagcaccacaggccccgggccctccagagacaccacacgatccagaacagcgacgatgcttatgtacagctggataacttgccaggaatgagtctcgtggctgggaaagcacttagctctgcccggatgtcggatgcagttctcagtcagtcttcgctcatgggcagccagcagtttcaggatggggaaaatgaggaatgtggggcaagcctgggaggtcatgagcacccagacctgagtgatggcagccagcatttaaactcctcttgctatccatctacgtgtattacagacattctgctcagctacaagcaccccgaagtctccttcagcatggagcaggcaggcgtgtaacaagaaacagagagttttgtgtacagcttgggaatgaaaaggttgattgtaaacccacagtatctagcagcgttgtgccaaattgcccttgtgtttctctccacccaaaatatcacagctgctttcctcacatttggttcatccgtgtgctgttcttttgggttctgagagggttttgccatgtttgcttgtatgaccaagtcaccaaggaaataaacaggaaggaaatccatgttctccatcttttgtgaaagtatatttgagttggtggttttttgttttgtttgggggtttgtgttttgttttgtttttggtatgttttcttccagaggtgatatactttcttttttttcttcctttcttttttttctttcgttccttttttgaaacaggagagcaaagcagttagagttcagaggccagcggcctcagggccactccctccctagccttcatcagcagagcaccctccatccccctgcattgctcttctgtgaaagcaaatactaaaggatgccatcctctggaatcctaatggcaggcaaagggagagaggaagggtgacggcttctggcacttagaaaacaaaaagaacaaaaaaagagaaacccccaagcctggaacgcagagaggtctttactgctgggatccacggaaaacatgtctgtcctagccaagatcatatgaagagtttggcacggaggctgagaatgacctggcatagatggtttgccagttaggatgtctcaatttgagcctttgcttttggtggataactcagctcccctcttgtaacctggaaagttggttgcctttatcatcctgctggttttatccatggactgaacacccaacagcagtgcactatgctttctatggcatctttcattctcattttatattgtgctataaaaaggattgtttctccatatatatattatatatgtgtgtatatatataatataatatatgtgtatatatattgctctcctctcacactctctgtgtcagcagtagaaaaaatgctggtgagactggtcgctccgtttgcgcctgctgctctactctctaatacactcttctactacccaccatgggtggtataccccatcagccctactaatatttagatactcccgtacgtacatccgtgtacaactagctgtttctgagcggaatatcgctggtacgtactaattagttggattatttacatcaatctatttccacactcatactacgagcacgacacgcaggattatttcgctggctcgaaatagcatgacgcaactgtgttctaacaccaccattaccttcatgcctctcatcatgcctcgctacgtttgctagctacggtctgccatccttctggttgctcccacgtagatatcctctctctaacggagcgactcttctgctctcactctgctcgcccacgccactctccttccaattcactgcttggcccacgctgccacccattgactgaccaaggaggtcgatcctactcttcatcccccacaccaggtctggcacacaccgcggctgcttcactgagccgccccccgcacacattacatccctcgctcgctggcaccctctctcatcaatccccccccctccctcccagtttggcttgccagcacccccgcaacacacgatcgctttccctcgtcggtcgtcgctccgttgggcagtgccgtgacagaccgcaacgctgcacttgctggcacaacgctccttcacacgcactntgacacgtccgtcctttagaacgacgacgccagtaccgcacagcacgcactcgttcacatgtacagctgagtgcacattcctacccgccgcccgctacttcattactactggccggcgccacaccggaccgacggaacccacgggtcttgcgctcccacgattccgccgccctccctactcctcgtcctgctcgatcctgtcgcgcacggccgaccaccggccgtctctcgccgcctggtcacacctccgctgctcgcctccgcgcgcgcaccccccgccgcccgtgtcttccctcctccccggactctcgcggtttcgccgtctccgcacgcaccacacccttcgtggcgacccc

SEQ ID NO: 445229 - DNA, 1282 bp, Homo sapiens
caacaagatggcggcggcggcggcgagcggagctggcggggctgccggggccgggactgggggagccgggcccgcgggccgcctgctgcctccgcccgcgccggggtccccagccgcccccgctgccgtgtcccctgcggccggccagccgcgtcccccagccccggcctcccgcggacccatgcccgcccgtatcggctactacgagatcgaccgcaccatcggcaagggcaacttcgcggtggtcaagcgggccacgcacctcgtcaccaaggccaaggttgctatcaagatcatagataagacccagctggatgaagaaaacttgaagaagattttccgggaagttcaaattatgaagatgctttgccacccccatatcatcaggctctaccaggttatggagacagaacggatgatttatctggtgacagaatatgctagtggaggggaaatatttgaccacctggtggcccatggtagaatggcagaaaaggaggcacgtcggaagttcaaacagatcgtcacagctgtctatttttgtcactgtcggaacattgttcatcgtgatttaaaagctgaaaatttacttctggatgccaatctgaatatcaaaatagcagattttggtttcagtaacctcttcactcctgggcagctgctgaagacctggtgtggcagccctccctatgctgcacctgaactctttgaaggaaaagaatatgatgggcccaaagtggacatctggagccttggagttgtcctctacgtgcttgtgtgcggtgccctgccatttgatggaagcacactgcagaatctgcgggcccgcgtgctgagtggaaagttccgcatcccattttttatgtccacagaatgtgagcatttgatccgccatatgttggtgttagatcccaataagcgcctctccatggagcagatctgcaagcacaagtggatgaagctaggggacgccgatcccaactttgacaggttaatagctgaatgccaacaactaaaggaagaaagacaggtggaccccctgaatgaggatgtcctcttggccatggaggacatgggactggacaaagaacagacactgcagtcattaagatcagatgcctatgatcactatagtgcaatctacagcctgctgtgtgatcgacataagagacataaaaccctgcgtctcggagcacttcctagcatgccccgagccctggcctttcaaaggaaaactaaccgttgcgaacggaaacaactgaccggagcagttccacttagg

SEQ ID NO: 445230 - DNA, 443 bp, Homo sapiens
aagatggaagaaaaagtttgttccataatcgtatgcatgactcaccatcatctgcatacacacactacagtagtcttttttgtttcccctgatgtgattaattgtacatcctctctgtttgggatgcagagccttggagttgtcctctacgtgcttgtgtgcggtgccctgccatttgatggaagcacactgcagaatctgcgggcccgcgtgctgagtggaaagttccgcatcccattttttatgtccacaggtaagggagtcgctagcacacagctatgaatgggttcatgaaagttagacccactcagttatcccaggaatttagtgatggagtataaatggcccacttacaaccttttttaactccagcttgctgacctgatgcctccaggaggcaaggttctgtagaaacagtatataggttttggcatcagagagcc

SEQ ID NO: 445231 - DNA, 437 bp, Homo sapiens
cctgtataacccaggagtctagaaaagttctgtaaataagaaagttaacagaaagtcctgccccaagcccagttactagagtaagaggcatgacagaataagctgccaccttgagcttttccttcctgtctctcttcaggcagtgccagcagttacccctgtggacgaggagagctcagacggggagccagaccaggaagctgtgcagaggtaatgtgacatctggcagtgcttgcagaagcccctgggcaggctcccctgcaaccagcgaaaggtcacctctgcccaaggaggtggtagagtgcagcttcaacatttgtgtggtctctttgctcaagccagatggcatgttccaccccacatggaagtaacagaagactacccagaaaatgtcatttctgtaagcaccattggaagtcccctaagtgacagcaata

SEQ ID NO: 445232 - DNA, 6363 bp, Homo sapiens
caacaagatggcggcggcggcggcgagcggagctggcggggctgccggggccgggactgggggagccgggcccgcgggccgcctgctgcctccgcccgcgccggggtccccagccgcccccgctgccgtgtcccctgcggccggccagccgcgtcccccagccccggcctcccgcggacccatgcccgcccgtatcggctactacgagatcgaccgcaccatcggcaagggcaacttcgcggtggtcaagcgggccacgcacctcgtcaccaaggccaaggttgctatcaagatcatagataagacccagctggatgaagaaaacttgaagaagattttccgggaagttcaaattatgaagatgctttgccacccccatatcatcaggctctaccaggttatggagacagaacggatgatttatctggtgacagaatatgctagtggaggggaaatatttgaccacctggtggcccatggtagaatggcagaaaaggaggcacgtcggaagttcaaacagatcgtcacagctgtctatttttgtcactgtcggaacattgttcatcgtgatttaaaagctgaaaatttacttctggatgccaatctgaatatcaaaatagcagattttggtttcagtaacctcttcactcctgggcagctgctgaagacctggtgtggcagccctccctatgctgcacctgaactctttgaaggaaaagaatatgatgggcccaaagtggacatctggagccttggagttgtcctctacgtgcttgtgtgcggtgccctgccatttgatggaagcacactgcagaatctgcgggcccgcgtgctgagtggaaagttccgcatcccattttttatgtccacagaatgtgagcatttgatccgccatatgttggtgttagatcccaataagcgcctctccatggagcagatctgcaagcacaagtggatgaagctaggggacgccgatcccaactttgacaggttaatagctgaatgccaacaactaaaggaagaaagacaggtggaccccctgaatgaggatgtcctcttggccatggaggacatgggactggacaaagaacagacactgcagtcattaagatcagatgcctatgatcactatagtgcaatctacagcctgctgtgtgatcgacataagagacataaaaccctgcgtctcggagcacttcctagcatgccccgagccctggcctttcaagcaccagtcaatatccaggcggagcaggcaggtactgctatgaacatcagcgttccccaggtgcagctgatcaacccagagaaccaaattgtggagccggatgggacactgaatttggacagtgatgagggtgaagagccttcccctgaagcattggtgcgctatttgtcaatgaggaggcacacagtgggtgtggctgacccacgcacggaagttatggaagatctgcagaagctcctacctggctttcctggagtcaacccccaggctccattcctgcaggtggcccctaatgtgaacttcatgcacaacctgttgcctatgcaaaacttgcaaccaaccgggcaacttgagtacaaggagcagtctctcctacagccgcccacgctacagctgttgaatggaatgggcccccttggccggagggcatcagatggaggagccaacatccaactgcatgcccagcagctgctgaagcgcccacggggaccctctccgcttgtcaccatgacaccagcagtgccagcagttacccctgtggacgaggagagctcagacggggagccagaccaggaagctgtgcagaggtacttggcaaataggtccaaaagacatacactggccatgaccaaccctacagctgagatcccaccggacctacaacggcagctaggacagcagcctttccgttcccgggtctggcctcctcacctggtacctgatcagcatcgctctacctacaaggactccaacactctgcacctccctacggagcgtttctcccctgtgcgccggttctcagatggggctgcgagcatccaggccttcaaagctcacctggaaaaaatgggcaacaacagcagcatcaaacagctgcagcaggagtgtgagcagctgcagaagatgtacggggggcagattgatgaaagaaccctggagaagacccagcagcagcatatgttataccagcaggagcagcaccatcaaattctccagcaacaaattcaagactctatctgtcctcctcagccatctccacctcttcaggctgcatgtgaaaatcagccagccctccttacccatcagctccagaggttaaggattcagccttcaagcccaccccccaaccaccccaacaaccatctcttcaggcagcccagtaatagtcctccccccatgagcagtgccatgatccagcctcacggggctgcatcttcttcccagtttcaaggcttaccttcccgcagtgcaatctttcagcagcaacctgagaactgttcctctcctcccaacgtggcactaacctgcttgggtatgcagcagcctgctcagtcacagcaggtcaccatccaagtccaagagcctgttgacatgctcagcaacatgccaggcacagctgcaggctccagtgggcgcggcatctccatcagccccagtgctggtcagatgcagatgcagcaccgtaccaacctgatggccaccctcagctatgggcaccgtcccttgtccaagcagctgagtgctgacagtgcagaggctcacagcttgaacgtgaatcggttctcccctgctaactacgaccaggcgcatttacacccccatctgttttcggaccagtcccggggttcccccagcagctacagcccttcaacaggagtggggttctctccaacccaagccctgaaagtccctccacttgaccaattccccaccttccctcccagtgcacatcagcagccgccacactataccacgtcggcactacagcaggccctgctgtctcccacgccgccagactatacaagacaccagcaggtaccccacatccttcaaggactgctttctccccggcattcgctcaccggccactcggacatccggctgcccccaacagagtttgcacagctcattaaaaggcagcagcaacaacggcagcagcagcagcaacagcagcaacagcaagaataccaggaactgttcaggcacatgaaccaaggggatgcggggagtctggctcccagccttgggggacagagcatgacagagcgccaggctttatcttatcaaaatgctgactcttatcaccatcacaccagcccccagcatctgctacaaatcagggcacaagaatgtgtctcacaggcttcctcacccaccccgccccacgggtatgctcaccagccggcactgatgcattcagagagcatggaggaggactgctcgtgtgagggggccaaggatggcttccaagacagtaagagttcaagtacattgaccaaaggttgccatgacagccctctgctcttgagtaccggtggacctggggaccctgaatctttgctaggaactgtgagtcatgcccaagaattggggatacatccctatggtcatcagccaactgctgcattcagtaaaaataaggtgcccagcagagagcctgtcatagggaactgcatggatagaagttctccaggacaagcagtggagctgccggatcacaatgggctcgggtacccagcacgcccctccgtccatgagcaccacaggccccgggccctccagagacaccacacgatccagaacagcgacgatgcttatgtacagctggataacttgccaggaatgagtctcgtggctgggaaagcacttagctctgcccggatgtcggatgcagttctcagtcagtcttcgctcatgggcagccagcagtttcaggatggggaaaatgaggaatgtggggcaagcctgggaggtcatgagcacccagacctgagtgatggcagccagcatttaaactcctcttgctatccatctacgtgtattacagacattctgctcagctacaagcaccccgaagtctccttcagcatggagcaggcaggcgtgtaacaagaaacagagagttttgtgtacagcttgggaatgaaaaggttgattgtaaacccacagtatctagcagcgttgtgccaaattgcccttgtgtttctctccacccaaaatatcacagctgctttcctcacatttggttcatccgtgtgctgttcttttgggttctgagagggttttgccatgtttgcttgtatgaccaagtcaccaaggaaataaacaggaaggaaatccatgttctccatcttttgtgaaagtatatttgagttggtggttttttgttttgtttgggggtttgtgttttgttttgtttttggtatgttttcttccagaggtgatatactttcttttttttcttcctttcttttttttctttcgttccttttttgaaacaggagagcaaagcagttagagttcagaggccagcggcctcagggccactccctccctagccttcatcagcagagcaccctccatccccctgcattgctcttctgtgaaagcaaatactaaaggatgccatcctctggaatcctaatggcaggcaaagggagagaggaagggtgacggcttctggcacttagaaaacaaaaagaacaaaaaaagagaaacccccaagcctggaacgcagagaggtctttactgctgggatccacggaaaacatgtctgtcctagccaagatcatatgaagagtttggcacggaggctgagaatgacctggcatagatggtttgccagttaggatgtctcaatttgagcctttgcttttggtggataactcagctcccctcttgtaacctggaaagttggttgcctttatcatcctgctggttttatccatggactgaacacccaacagcagtgcactatgctttctatggcatctttcattctcattttatattgtgctataaaaaggattgtttctccatatatatattatatatgtgtgtatatatataatataatatatgtgtatatatattattatatatataatatataatatataatatatatatattatatatataatatatatataaaatatatatatatatgctctcctctttcagcctctttgtcacagggaagaagtgtaggaggttgccttgggccctgcctctctcctaacctcctcttccccactgggtaccctcagcccctatattttaattcttgatcatgtagaaattgtttttggtaaatgttgatattattgttattatcattattaataaataaagagaaaaggaatttttgtttaaatgagaaatgtttaaccagattctgttctatttgaattgtgacttgcaccttttgttcaaagtatttcctttaggcattgtaattgtgaacagctcttacttgtgccagtgacagatgcagtggtctcctttccccagttgaagcagtgcatacgcagtagctattatttgtgttatctttatttctcttcattgttagaaaccaaagtcttctctgctggctggggctgagagagggtctgggttatctccttctgatcttcaaaacaagagagagaccttgaatacactgactcttccaccctttttttttctgggaaaggagagcaagaggtcccgagtcccctcctagtctttcatcctgaatttgcacagaggaaagcgggtgcccggcatggccatcctgatgttgctggcgggatccccatgcaccttgtccttctccactgatactggcagctcggctcctggacccaagatcccttgagtggaattctgcagtgcaagagcccttcgtgggagctgtcccatgtttccatggtccccagtctcccctccacttggtggggtcaccaactactcaccagaagggggcttaccaagaaagccctaaaaagctgttgacttatctgcgcttgttccaactcttatgcccccaacctgccctaccaccaccacgcgctcagcctgatgtgtttacatggtactgtatgtatgggagagcagactgcaccctccagcaacaacagatgaaagccagtgagcctactaaccgtgccatcttgcaaactacactttaaaaaaaactcattgctttgtattgtagtaaccaatatgtgcagtatacgttgaatgtatatgaacatactttcctatttctgttctttgaaaatgtcagaaatatttttttctttctcattttatgttgaactaaaaaggattaaaaaaaaaatctccagactcaagttgctaaaaacttt

SEQ ID NO: 445233 - DNA, 6219 bp, Homo sapiens
caacaagatggcggcggcggcggcgagcggagctggcggggctgccggggccgggactgggggagccgggcccgcgggccgcctgctgcctccgcccgcgccggggtccccagccgcccccgctgccgtgtcccctgcggccggccagccgcgtcccccagccccggcctcccgcggacccatgcccgcccgtatcggctactacgagatcgaccgcaccatcggcaagggcaacttcgcggtggtcaagcgggccacgcacctcgtcaccaaggccaaggttgctatcaagatcatagataagacccagctggatgaagaaaacttgaagaagattttccgggaagttcaaattatgaagatgctttgccacccccatatcatcaggctctaccaggttatggagacagaacggatgatttatctggtgacagaatatgctagtggaggggaaatatttgaccacctggtggcccatggtagaatggcagaaaaggaggcacgtcggaagttcaaacagatcgtcacagctgtctatttttgtcactgtcggaacattgttcatcgtgatttaaaagctgaaaatttacttctggatgccaatctgaatatcaaaatagcagattttggtttcagtaacctcttcactcctgggcagctgctgaagacctggtgtggcagccctccctatgctgcacctgaactctttgaaggaaaagaatatgatgggcccaaagtggacatctggagccttggagttgtcctctacgtgcttgtgtgcggtgccctgccatttgatggaagcacactgcagaatctgcgggcccgcgtgctgagtggaaagttccgcatcccattttttatgtccacagaatgtgagcatttgatccgccatatgttggtgttagatcccaataagcgcctctccatggagcagatctgcaagcacaagtggatgaagctaggggacgccgatcccaactttgacaggttaatagctgaatgccaacaactaaaggaagaaagacaggtggaccccctgaatgaggatgtcctcttggccatggaggacatgggactggacaaagaacagacactgcaggcggagcaggcaggtactgctatgaacatcagcgttccccaggtgcagctgatcaacccagagaaccaaattgtggagccggatgggacactgaatttggacagtgatgagggtgaagagccttcccctgaagcattggtgcgctatttgtcaatgaggaggcacacagtgggtgtggctgacccacgcacggaagttatggaagatctgcagaagctcctacctggctttcctggagtcaacccccaggctccattcctgcaggtggcccctaatgtgaacttcatgcacaacctgttgcctatgcaaaacttgcaaccaaccgggcaacttgagtacaaggagcagtctctcctacagccgcccacgctacagctgttgaatggaatgggcccccttggccggagggcatcagatggaggagccaacatccaactgcatgcccagcagctgctgaagcgcccacggggaccctctccgcttgtcaccatgacaccagcagtgccagcagttacccctgtggacgaggagagctcagacggggagccagaccaggaagctgtgcagaggtacttggcaaataggtccaaaagacatacactggccatgaccaaccctacagctgagatcccaccggacctacaacggcagctaggacagcagcctttccgttcccgggtctggcctcctcacctggtacctgatcagcatcgctctacctacaaggactccaacactctgcacctccctacggagcgtttctcccctgtgcgccggttctcagatggggctgcgagcatccaggccttcaaagctcacctggaaaaaatgggcaacaacagcagcatcaaacagctgcagcaggagtgtgagcagctgcagaagatgtacggggggcagattgatgaaagaaccctggagaagacccagcagcagcatatgttataccagcaggagcagcaccatcaaattctccagcaacaaattcaagactctatctgtcctcctcagccatctccacctcttcaggctgcatgtgaaaatcagccagccctccttacccatcagctccagaggttaaggattcagccttcaagcccaccccccaaccaccccaacaaccatctcttcaggcagcccagtaatagtcctccccccatgagcagtgccatgatccagcctcacggggctgcatcttcttcccagtttcaaggcttaccttcccgcagtgcaatctttcagcagcaacctgagaactgttcctctcctcccaacgtggcactaacctgcttgggtatgcagcagcctgctcagtcacagcaggtcaccatccaagtccaagagcctgttgacatgctcagcaacatgccaggcacagctgcaggctccagtgggcgcggcatctccatcagccccagtgctggtcagatgcagatgcagcaccgtaccaacctgatggccaccctcagctatgggcaccgtcccttgtccaagcagctgagtgctgacagtgcagaggctcacagcttgaacgtgaatcggttctcccctgctaactacgaccaggcgcatttacacccccatctgttttcggaccagtcccggggttcccccagcagctacagcccttcaacaggagtggggttctctccaacccaagccctgaaagtccctccacttgaccaattccccaccttccctcccagtgcacatcagcagccgccacactataccacgtcggcactacagcaggccctgctgtctcccacgccgccagactatacaagacaccagcaggtaccccacatccttcaaggactgctttctccccggcattcgctcaccggccactcggacatccggctgcccccaacagagtttgcacagctcattaaaaggcagcagcaacaacggcagcagcagcagcaacagcagcaacagcaagaataccaggaactgttcaggcacatgaaccaaggggatgcggggagtctggctcccagccttgggggacagagcatgacagagcgccaggctttatcttatcaaaatgctgactcttatcaccatcacaccagcccccagcatctgctacaaatcagggcacaagaatgtgtctcacaggcttcctcacccaccccgccccacgggtatgctcaccagccggcactgatgcattcagagagcatggaggaggactgctcgtgtgagggggccaaggatggcttccaagacagtaagagttcaagtacattgaccaaaggttgccatgacagccctctgctcttgagtaccggtggacctggggaccctgaatctttgctaggaactgtgagtcatgcccaagaattggggatacatccctatggtcatcagccaactgctgcattcagtaaaaataaggtgcccagcagagagcctgtcatagggaactgcatggatagaagttctccaggacaagcagtggagctgccggatcacaatgggctcgggtacccagcacgcccctccgtccatgagcaccacaggccccgggccctccagagacaccacacgatccagaacagcgacgatgcttatgtacagctggataacttgccaggaatgagtctcgtggctgggaaagcacttagctctgcccggatgtcggatgcagttctcagtcagtcttcgctcatgggcagccagcagtttcaggatggggaaaatgaggaatgtggggcaagcctgggaggtcatgagcacccagacctgagtgatggcagccagcatttaaactcctcttgctatccatctacgtgtattacagacattctgctcagctacaagcaccccgaagtctccttcagcatggagcaggcaggcgtgtaacaagaaacagagagttttgtgtacagcttgggaatgaaaaggttgattgtaaacccacagtatctagcagcgttgtgccaaattgcccttgtgtttctctccacccaaaatatcacagctgctttcctcacatttggttcatccgtgtgctgttcttttgggttctgagagggttttgccatgtttgcttgtatgaccaagtcaccaaggaaataaacaggaaggaaatccatgttctccatcttttgtgaaagtatatttgagttggtggttttttgttttgtttgggggtttgtgttttgttttgtttttggtatgttttcttccagaggtgatatactttcttttttttcttcctttcttttttttctttcgttccttttttgaaacaggagagcaaagcagttagagttcagaggccagcggcctcagggccactccctccctagccttcatcagcagagcaccctccatccccctgcattgctcttctgtgaaagcaaatactaaaggatgccatcctctggaatcctaatggcaggcaaagggagagaggaagggtgacggcttctggcacttagaaaacaaaaagaacaaaaaaagagaaacccccaagcctggaacgcagagaggtctttactgctgggatccacggaaaacatgtctgtcctagccaagatcatatgaagagtttggcacggaggctgagaatgacctggcatagatggtttgccagttaggatgtctcaatttgagcctttgcttttggtggataactcagctcccctcttgtaacctggaaagttggttgcctttatcatcctgctggttttatccatggactgaacacccaacagcagtgcactatgctttctatggcatctttcattctcattttatattgtgctataaaaaggattgtttctccatatatatattatatatgtgtgtatatatataatataatatatgtgtatatatattattatatatataatatataatatataatatatatatattatatatataatatatatataaaatatatatatatatgctctcctctttcagcctctttgtcacagggaagaagtgtaggaggttgccttgggccctgcctctctcctaacctcctcttccccactgggtaccctcagcccctatattttaattcttgatcatgtagaaattgtttttggtaaatgttgatattattgttattatcattattaataaataaagagaaaaggaatttttgtttaaatgagaaatgtttaaccagattctgttctatttgaattgtgacttgcaccttttgttcaaagtatttcctttaggcattgtaattgtgaacagctcttacttgtgccagtgacagatgcagtggtctcctttccccagttgaagcagtgcatacgcagtagctattatttgtgttatctttatttctcttcattgttagaaaccaaagtcttctctgctggctggggctgagagagggtctgggttatctccttctgatcttcaaaacaagagagagaccttgaatacactgactcttccaccctttttttttctgggaaaggagagcaagaggtcccgagtcccctcctagtctttcatcctgaatttgcacagaggaaagcgggtgcccggcatggccatcctgatgttgctggcgggatccccatgcaccttgtccttctccactgatactggcagctcggctcctggacccaagatcccttgagtggaattctgcagtgcaagagcccttcgtgggagctgtcccatgtttccatggtccccagtctcccctccacttggtggggtcaccaactactcaccagaagggggcttaccaagaaagccctaaaaagctgttgacttatctgcgcttgttccaactcttatgcccccaacctgccctaccaccaccacgcgctcagcctgatgtgtttacatggtactgtatgtatgggagagcagactgcaccctccagcaacaacagatgaaagccagtgagcctactaaccgtgccatcttgcaaactacactttaaaaaaaactcattgctttgtattgtagtaaccaatatgtgcagtatacgttgaatgtatatgaacatactttcctatttctgttctttgaaaatgtcagaaatatttttttctttctcattttatgttgaactaaaaaggattaaaaaaaaaatctccagactcaagttgctaaaaacttt

SEQ ID NO: 445234 - DNA, 5178 bp, Homo sapiens
aagactcattatttctctctagtgttaaggtatgcgtgtatatgtatgtactgctttccaggcggagcaggcaggtactgctatgaacatcagcgttccccaggtgcagctgatcaacccagagaaccaaattgtggagccggatgggacactgaatttggacagtgatgagggtgaagagccttcccctgaagcattggtgcgctatttgtcaatgaggaggcacacagtgggtgtggctgacccacgcacggaagttatggaagatctgcagaagctcctacctggctttcctggagtcaacccccaggctccattcctgcaggtggcccctaatgtgaacttcatgcacaacctgttgcctatgcaaaacttgcaaccaaccgggcaacttgagtacaaggagcagtctctcctacagccgcccacgctacagctgttgaatggaatgggcccccttggccggagggcatcagatggaggagccaacatccaactgcatgcccagcagctgctgaagcgcccacggggaccctctccgcttgtcaccatgacaccagcagtgccagcagttacccctgtggacgaggagagctcagacggggagccagaccaggaagctgtgcagaggtacttggcaaataggtccaaaagacatacactggccatgaccaaccctacagctgagatcccaccggacctacaacggcagctaggacagcagcctttccgttcccgggtctggcctcctcacctggtacctgatcagcatcgctctacctacaaggactccaacactctgcacctccctacggagcgtttctcccctgtgcgccggttctcagatggggctgcgagcatccaggccttcaaagctcacctggaaaaaatgggcaacaacagcagcatcaaacagctgcagcaggagtgtgagcagctgcagaagatgtacggggggcagattgatgaaagaaccctggagaagacccagcagcagcatatgttataccagcaggagcagcaccatcaaattctccagcaacaaattcaagactctatctgtcctcctcagccatctccacctcttcaggctgcatgtgaaaatcagccagccctccttacccatcagctccagaggttaaggattcagccttcaagcccaccccccaaccaccccaacaaccatctcttcaggcagcccagtaatagtcctccccccatgagcagtgccatgatccagcctcacggggctgcatcttcttcccagtttcaaggcttaccttcccgcagtgcaatctttcagcagcaacctgagaactgttcctctcctcccaacgtggcactaacctgcttgggtatgcagcagcctgctcagtcacagcaggtcaccatccaagtccaagagcctgttgacatgctcagcaacatgccaggcacagctgcaggctccagtgggcgcggcatctccatcagccccagtgctggtcagatgcagatgcagcaccgtaccaacctgatggccaccctcagctatgggcaccgtcccttgtccaagcagctgagtgctgacagtgcagaggctcacagcttgaacgtgaatcggttctcccctgctaactacgaccaggcgcatttacacccccatctgttttcggaccagtcccggggttcccccagcagctacagcccttcaacaggagtggggttctctccaacccaagccctgaaagtccctccacttgaccaattccccaccttccctcccagtgcacatcagcagccgccacactataccacgtcggcactacagcaggccctgctgtctcccacgccgccagactatacaagacaccagcaggtaccccacatccttcaaggactgctttctccccggcattcgctcaccggccactcggacatccggctgcccccaacagagtttgcacagctcattaaaaggcagcagcaacaacggcagcagcagcagcaacagcagcaacagcaagaataccaggaactgttcaggcacatgaaccaaggggatgcggggagtctggctcccagccttgggggacagagcatgacagagcgccaggctttatcttatcaaaatgctgactcttatcaccatcacaccagcccccagcatctgctacaaatcagggcacaagaatgtgtctcacaggcttcctcacccaccccgccccacgggtatgctcaccagccggcactgatgcattcagagagcatggaggaggactgctcgtgtgagggggccaaggatggcttccaagacagtaagagttcaagtacattgaccaaaggttgccatgacagccctctgctcttgagtaccggtggacctggggaccctgaatctttgctaggaactgtgagtcatgcccaagaattggggatacatccctatggtcatcagccaactgctgcattcagtaaaaataaggtgcccagcagagagcctgtcatagggaactgcatggatagaagttctccaggacaagcagtggagctgccggatcacaatgggctcgggtacccagcacgcccctccgtccatgagcaccacaggccccgggccctccagagacaccacacgatccagaacagcgacgatgcttatgtacagctggataacttgccaggaatgagtctcgtggctgggaaagcacttagctctgcccggatgtcggatgcagttctcagtcagtcttcgctcatgggcagccagcagtttcaggatggggaaaatgaggaatgtggggcaagcctgggaggtcatgagcacccagacctgagtgatggcagccagcatttaaactcctcttgctatccatctacgtgtattacagacattctgctcagctacaagcaccccgaagtctccttcagcatggagcaggcaggcgtgtaacaagaaacagagagttttgtgtacagcttgggaatgaaaaggttgattgtaaacccacagtatctagcagcgttgtgccaaattgcccttgtgtttctctccacccaaaatatcacagctgctttcctcacatttggttcatccgtgtgctgttcttttgggttctgagagggttttgccatgtttgcttgtatgaccaagtcaccaaggaaataaacaggaaggaaatccatgttctccatcttttgtgaaagtatatttgagttggtggttttttgttttgtttgggggtttgtgttttgttttgtttttggtatgttttcttccagaggtgatatactttcttttttttcttcctttcttttttttctttcgttccttttttgaaacaggagagcaaagcagttagagttcagaggccagcggcctcagggccactccctccctagccttcatcagcagagcaccctccatccccctgcattgctcttctgtgaaagcaaatactaaaggatgccatcctctggaatcctaatggcaggcaaagggagagaggaagggtgacggcttctggcacttagaaaacaaaaagaacaaaaaaagagaaacccccaagcctggaacgcagagaggtctttactgctgggatccacggaaaacatgtctgtcctagccaagatcatatgaagagtttggcacggaggctgagaatgacctggcatagatggtttgccagttaggatgtctcaatttgagcctttgcttttggtggataactcagctcccctcttgtaacctggaaagttggttgcctttatcatcctgctggttttatccatggactgaacacccaacagcagtgcactatgctttctatggcatctttcattctcattttatattgtgctataaaaaggattgtttctccatatatatattatatatgtgtgtatatatataatataatatatgtgtatatatattattatatatataatatataatatataatatatatatattatatatataatatatatataaaatatatatatatatgctctcctctttcagcctctttgtcacagggaagaagtgtaggaggttgccttgggccctgcctctctcctaacctcctcttccccactgggtaccctcagcccctatattttaattcttgatcatgtagaaattgtttttggtaaatgttgatattattgttattatcattattaataaataaagagaaaaggaatttttgtttaaatgagaaatgtttaaccagattctgttctatttgaattgtgacttgcaccttttgttcaaagtatttcctttaggcattgtaattgtgaacagctcttacttgtgccagtgacagatgcagtggtctcctttccccagttgaagcagtgcatacgcagtagctattatttgtgttatctttatttctcttcattgttagaaaccaaagtcttctctgctggctggggctgagagagggtctgggttatctccttctgatcttcaaaacaagagagagaccttgaatacactgactcttccaccctttttttttctgggaaaggagagcaagaggtcccgagtcccctcctagtctttcatcctgaatttgcacagaggaaagcgggtgcccggcatggccatcctgatgttgctggcgggatccccatgcaccttgtccttctccactgatactggcagctcggctcctggacccaagatcccttgagtggaattctgcagtgcaagagcccttcgtgggagctgtcccatgtttccatggtccccagtctcccctccacttggtggggtcaccaactactcaccagaagggggcttaccaagaaagccctaaaaagctgttgacttatctgcgcttgttccaactcttatgcccccaacctgccctaccaccaccacgcgctcagcctgatgtgtttacatggtactgtatgtatgggagagcagactgcaccctccagcaacaacagatgaaagccagtgagcctactaaccgtgccatcttgcaaactacactttaaaaaaaactcattgctttgtattgtagtaaccaatatgtgcagtatacgttgaatgtatatgaacatactttcctatttctgttctttgaaaatgtcagaaatatttttttctttctcattttatgttgaactaaaaaggattaaaaaaaaaatctccagactcaagttgctaaaaacttt

SEQ ID NO: 445235 - DNA, 6267 bp, Homo sapiens
caacaagatggcggcggcggcggcgagcggagctggcggggctgccggggccgggactgggggagccgggcccgcgggccgcctgctgcctccgcccgcgccggggtccccagccgcccccgctgccgtgtcccctgcggccggccagccgcgtcccccagccccggcctcccgcggacccatgcccgcccgtatcggctactacgagatcgaccgcaccatcggcaagggcaacttcgcggtggtcaagcgggccacgcacctcgtcaccaaggccaaggttgctatcaagatcatagataagacccagctggatgaagaaaacttgaagaagattttccgggaagttcaaattatgaagatgctttgccacccccatatcatcaggctctaccaggttatggagacagaacggatgatttatctggtgacagaatatgctagtggaggggaaatatttgaccacctggtggcccatggtagaatggcagaaaaggaggcacgtcggaagttcaaacagatcgtcacagctgtctatttttgtcactgtcggaacattgttcatcgtgatttaaaagctgaaaatttacttctggatgccaatctgaatatcaaaatagcagattttggtttcagtaacctcttcactcctgggcagctgctgaagacctggtgtggcagccctccctatgctgcacctgaactctttgaaggaaaagaatatgatgggcccaaagtggacatctggagccttggagttgtcctctacgtgcttgtgtgcggtgccctgccatttgatggaagcacactgcagaatctgcgggcccgcgtgctgagtggaaagttccgcatcccattttttatgtccacagaatgtgagcatttgatccgccatatgttggtgttagatcccaataagcgcctctccatggagcagatctgcaagcacaagtggatgaagctaggggacgccgatcccaactttgacaggttaatagctgaatgccaacaactaaaggaagaaagacaggtggaccccctgaatgaggatgtcctcttggccatggaggacatgggactggacaaagaacagacactgcagtcattaagatcagatgcctatgatcactatagtgcaatctacagcctgctgtgtgatcgacataagagacataaaaccctgcgtctcggagcacttcctagcatgccccgagccctggcctttcaagcaccagtcaatatccaggcggagcaggcaggtactgctatgaacatcagcgttccccaggtgcagctgatcaacccagagaaccaaattgtggagccggatgggacactgaatttggacagtgatgagggtgaagagccttcccctgaagcattggtgcgctatttgtcaatgaggaggcacacagtgggtgtggctgacccacgcacggaagttatggaagatctgcagaagctcctacctggctttcctggagtcaacccccaggctccattcctgcaggtggcccctaatgtgaacttcatgcacaacctgttgcctatgcaaaacttgcaaccaaccgggcaacttgagtacaaggagcagtctctcctacagccgcccacgctacagctgttgaatggaatgggcccccttggccggagggcatcagatggaggagccaacatccaactgcatgcccagcagctgctgaagcgcccacggggaccctctccgcttgtcaccatgacaccagcagtgccagcagttacccctgtggacgaggagagctcagacggggagccagaccaggaagctgtgcagaggtacttggcaaataggtccaaaagacatacactggccatgaccaaccctacagctgagatcccaccggacctacaacggcagctaggacagcagcctttccgttcccgggtctggcctcctcacctggtacctgatcagcatcgctctacctacaaggactccaacactctgcacctccctacggagcgtttctcccctgtgcgccggttctcagatggggctgcgagcatccaggccttcaaagctcacctggaaaaaatgggcaacaacagcagcatcaaacagctgcagcaggagtgtgagcagctgcagaagatgtacggggggcagattgatgaaagaaccctggagaagacccagcagcagcatatgttataccagcaggagcagcaccatcaaattctccagcaacaaattcaagactctatctgtcctcctcagccatctccacctcttcaggctgcatgtgaaaatcagccagccctccttacccatcagctccagaggttaaggattcagccttcaagcccaccccccaaccaccccaacaaccatctcttcaggcagcccagtaatagtcctccccccatgagcagtgccatgatccagcctcacggggctgcatcttcttcccagtttcaaggcttaccttcccgcagtgcaatctttcagcagcaacctgagaactgttcctctcctcccaacgtggcactaacctgcttgggtatgcagcagcctgctcagtcacagcaggtcaccatccaagtccaagagcctgttgacatgctcagcaacatgccaggcacagctgcaggctccagtgggcgcggcatctccatcagccccagtgctggtcagatgcagatgcagcaccgtaccaacctgatggccaccctcagctatgggcaccgtcccttgtccaagcagctgagtgctgacagtgcagaggctcacagcttgaacgtgaatcggttctcccctgctaactacgaccaggcgcatttacacccccatctgttttcggaccagtcccggggttcccccagcagctacagcccttcaacaggagtggggttctctccaacccaagccctgaaagtccctccacttgaccaattccccaccttccctcccagtgcacatcagcagccgccacactataccacgtcggcactacagcaggccctgctgtctcccacgccgccagactatacaagacaccagcaggtaccccacatccttcaaggactgctttctccccggcattcgctcaccggccactcggacatccggctgcccccaacagagtttgcacagctcattaaaaggcagcagcaacaacggcagcagcagcagcaacagcagcaacagcaagaataccaggaactgttcaggcacatgaaccaaggggatgcggggagtctggctcccagccttgggggacagagcatgacagagcgccaggctttatcttatcaaaatgctgactcttatcaccatcacaccagcccccagcatctgctacaaatcagggcacaagaatgtgtctcacaggcttcctcacccaccccgccccacgggtatgctcaccagccggcactgatgcattcagagagcatggaggaggactgctcgtgtgagggggccaaggatggcttccaagacagtaagagttcaagtacattgaccaaaggttgccatgacagccctctgctcttgagtaccggtggacctggggaccctgaatctttgctaggaactgtgagtcatgcccaagaattggggatacatccctatggtcatcagccaactgctgcattcagtaaaaataaggtgcccagcagagagcctgtcatagggaactgcatggatagaagttctccaggacaagcagtggagctgccggatcacaatgggctcgggtacccagcacgcccctccgtccatgagcaccacaggccccgggccctccagagacaccacacgatccagaacagcgacgatgcttatgtacagctggataacttgccaggaatgagtctcgtggctgggaaagcacttagctctgcccggatgtcggatgcagttctcagtcagtcttcgctcatgggcagccagcagtttcaggatggggaaaatgaggacattctgctcagctacaagcaccccgaagtctccttcagcatggagcaggcaggcgtgtaacaagaaacagagagttttgtgtacagcttgggaatgaaaaggttgattgtaaacccacagtatctagcagcgttgtgccaaattgcccttgtgtttctctccacccaaaatatcacagctgctttcctcacatttggttcatccgtgtgctgttcttttgggttctgagagggttttgccatgtttgcttgtatgaccaagtcaccaaggaaataaacaggaaggaaatccatgttctccatcttttgtgaaagtatatttgagttggtggttttttgttttgtttgggggtttgtgttttgttttgtttttggtatgttttcttccagaggtgatatactttcttttttttcttcctttcttttttttctttcgttccttttttgaaacaggagagcaaagcagttagagttcagaggccagcggcctcagggccactccctccctagccttcatcagcagagcaccctccatccccctgcattgctcttctgtgaaagcaaatactaaaggatgccatcctctggaatcctaatggcaggcaaagggagagaggaagggtgacggcttctggcacttagaaaacaaaaagaacaaaaaaagagaaacccccaagcctggaacgcagagaggtctttactgctgggatccacggaaaacatgtctgtcctagccaagatcatatgaagagtttggcacggaggctgagaatgacctggcatagatggtttgccagttaggatgtctcaatttgagcctttgcttttggtggataactcagctcccctcttgtaacctggaaagttggttgcctttatcatcctgctggttttatccatggactgaacacccaacagcagtgcactatgctttctatggcatctttcattctcattttatattgtgctataaaaaggattgtttctccatatatatattatatatgtgtgtatatatataatataatatatgtgtatatatattattatatatataatatataatatataatatatatatattatatatataatatatatataaaatatatatatatatgctctcctctttcagcctctttgtcacagggaagaagtgtaggaggttgccttgggccctgcctctctcctaacctcctcttccccactgggtaccctcagcccctatattttaattcttgatcatgtagaaattgtttttggtaaatgttgatattattgttattatcattattaataaataaagagaaaaggaatttttgtttaaatgagaaatgtttaaccagattctgttctatttgaattgtgacttgcaccttttgttcaaagtatttcctttaggcattgtaattgtgaacagctcttacttgtgccagtgacagatgcagtggtctcctttccccagttgaagcagtgcatacgcagtagctattatttgtgttatctttatttctcttcattgttagaaaccaaagtcttctctgctggctggggctgagagagggtctgggttatctccttctgatcttcaaaacaagagagagaccttgaatacactgactcttccaccctttttttttctgggaaaggagagcaagaggtcccgagtcccctcctagtctttcatcctgaatttgcacagaggaaagcgggtgcccggcatggccatcctgatgttgctggcgggatccccatgcaccttgtccttctccactgatactggcagctcggctcctggacccaagatcccttgagtggaattctgcagtgcaagagcccttcgtgggagctgtcccatgtttccatggtccccagtctcccctccacttggtggggtcaccaactactcaccagaagggggcttaccaagaaagccctaaaaagctgttgacttatctgcgcttgttccaactcttatgcccccaacctgccctaccaccaccacgcgctcagcctgatgtgtttacatggtactgtatgtatgggagagcagactgcaccctccagcaacaacagatgaaagccagtgagcctactaaccgtgccatcttgcaaactacactttaaaaaaaactcattgctttgtattgtagtaaccaatatgtgcagtatacgttgaatgtatatgaacatactttcctatttctgttctttgaaaatgtcagaaatatttttttctttctcattttatgttgaactaaaaaggattaaaaaaaaaatctccagactcaagttgctaaaaacttt

SEQ ID NO: 445236 - DNA, 2479 bp, Homo sapiens
  misc_feature (32)..(32): n is a, c, g, or t
  misc_feature (35)..(36): n is a, c, g, or t
agggggcgtaaacgtgtagaacgagcgacgangcnnatgtacagctggataacttgccaggaatgagtctcgtggctgggaaagcacttagctctgcccggatgtcggatgcagttctcagtcagtcttcgctcatgggcagccagcagtttcaggatggggaaaatgaggacattctgctcagctacaagcaccccgaagtctccttcagcatggagcaggcaggcgtgtaacaagaaacagagagttttgtgtacagcttgggaatgaaaaggttgattgtaaacccacagtatctagcagcgttgtgccaaattgcccttgtgtttctctccacccaaaatatcacagctgctttcctcacatttggttcatccgtgtgctgttcttttgggttctgagagggttttgccatgtttgcttgtatgaccaagtcaccaaggaaataaacaggaaggaaatccatgttctccatcttttgtgaaagtatatttgagttggtggttttttgttttgtttgggggtttgtgttttgttttgtttttggtatgttttcttccagaggtgatatactttcttttttttcttcctttcttttttttctttcgttccttttttgaaacaggagagcaaagcagttagagttcagaggccagcggcctcagggccactccctccctagccttcatcagcagagcaccctccatccccctgcattgctcttctgtgaaagcaaatactaaaggatgccatcctctggaatcctaatggcaggcaaagggagagaggaagggtgacggcttctggcacttagaaaacaaaaagaacaaaaaaagagaaacccccaagcctggaacgcagagaggtctttactgctgggatccacggaaaacatgtctgtcctagccaagatcatatgaagagtttggcacggaggctgagaatgacctggcatagatggtttgccagttaggatgtctcaatttgagcctttgcttttggtggataactcagctcccctcttgtaacctggaaagttggttgcctttatcatcctgctggttttatccatggactgaacacccaacagcagtgcactatgctttctatggcatctttcattctcattttatattgtgctataaaaaggattgtttctccatatatatattatatatgtgtgtatatatataatataatatatgtgtatatatattattatatatataatatataatatataatatatatatattatatatataatatatatataaaatatatatatatatgctctcctctttcagcctctttgtcacagggaagaagtgtaggaggttgccttgggccctgcctctctcctaacctcctcttccccactgggtaccctcagcccctatattttaattcttgatcatgtagaaattgtttttggtaaatgttgatattattgttattatcattattaataaataaagagaaaaggaatttttgtttaaatgagaaatgtttaaccagattctgttctatttgaattgtgacttgcaccttttgttcaaagtatttcctttaggcattgtaattgtgaacagctcttacttgtgccagtgacagatgcagtggtctcctttccccagttgaagcagtgcatacgcagtagctattatttgtgttatctttatttctcttcattgttagaaaccaaagtcttctctgctggctggggctgagagagggtctgggttatctccttctgatcttcaaaacaagagagagaccttgaatacactgactcttccaccctttttttttctgggaaaggagagcaagaggtcccgagtcccctcctagtctttcatcctgaatttgcacagaggaaagcgggtgcccggcatggccatcctgatgttgctggcgggatccccatgcaccttgtccttctccactgatactggcagctcggctcctggacccaagatcccttgagtggaattctgcagtgcaagagcccttcgtgggagctgtcccatgtttccatggtccccagtctcccctccacttggtggggtcaccaactactcaccagaagggggcttaccaagaaagccctaaaaagctgttgacttatctgcgcttgttccaactcttatgcccccaacctgccctaccaccaccacgcgctcagcctgatgtgtttacatggtactgtatgtatgggagagcagactgcaccctccagcaacaacagatgaaagccagtgagcctactaaccgtgccatcttgcaaactacactttaaaaaaaactcattgctttgtattgtagtaaccaatatgtgcagtatacgttgaatgtatatgaacatactttcctatttctgttctttgaaaatgtcagaaatatttttttctttctcattttatgttgaactaaaaaggattaaaaaaaaaatctccagactcaagttgctaaaaacttt

SEQ ID NO: 445237 - DNA, 2199 bp, Homo sapiens
caacaagatggcggcggcggcggcgagcggagctggcggggctgccggggccgggactgggggagccgggcccgcgggccgcctgctgcctccgcccgcgccggggtccccagccgcccccgctgccgtgtcccctgcggccggccagccgcgtcccccagccccggcctcccgcggacccatgcccgcccgtatcggctactacgagatcgaccgcaccatcggcaagggcaacttcgcggtggtcaagcgggccacgcacctcgtcaccaaggccaaggttgctatcaagatcatagataagacccagctggatgaagaaaacttgaagaagattttccgggaagttcaaattatgaagatgctttgccacccccatatcatcaggctctaccaggttatggagacagaacggatgatttatctggtgacagaatatgctagtggaggggaaatatttgaccacctggtggcccatggtagaatggcagaaaaggaggcacgtcggaagttcaaacagatcgtcacagctgtctatttttgtcactgtcggaacattgttcatcgtgatttaaaagctgaaaatttacttctggatgccaatctgaatatcaaaatagcagattttggtttcagtaacctcttcactcctgggcagctgctgaagacctggtgtggcagccctccctatgctgcacctgaactctttgaaggaaaagaatatgatgggcccaaagtggacatctggagccttggagttgtcctctacgtgcttgtgtgcggtgccctgccatttgatggaagcacactgcagaatctgcgggcccgcgtgctgagtggaaagttccgcatcccattttttatgtccacagaatgtgagcatttgatccgccatatgttggtgttagatcccaataagcgcctctccatggagcagatctgcaagcacaagtggatgaagctaggggacgccgatcccaactttgacaggttaatagctgaatgccaacaactaaaggaagaaagacaggtggaccccctgaatgaggatgtcctcttggccatggaggacatgggactggacaaagaacagacactgcagtcattaagatcagatgcctatgatcactatagtgcaatctacagcctgctgtgtgatcgacataagagacataaaaccctgcgtctcggagcacttcctagcatgccccgagccctggcctttcaagcaccagtcaatatccaggcggagcaggcaggtactgctatgaacatcagcgttccccaggtgcagctgatcaacccagagaaccaaattgtggagccggatgggacactgaatttggacagtgatgagggtgaagagccttcccctgaagcattggtgcgctatttgtcaatgaggaggcacacagtgggtgtggctgacccacgcacggaagttatggaagatctgcagaagctcctacctggctttcctggagtcaacccccaggctccattcctgcaggtggcccctaatgtgaacttcatgcacaacctgttgcctatgcaaaacttgcaaccaaccgggcaacttgagtacaaggagcagtctctcctacagccgcccacgctacagctgttgaatggaatgggcccccttggccggagggcatcagatggaggagccaacatccaactgcatgcccagcagctgctgaagcgcccacggggaccctctccgcttgtcaccatgacaccagcagtgccagcagttacccctgtggacgaggagagctcagacggggagccagaccaggaagctgtgcagaggtacttggcaaataggtccaaaagacatacactggccatgaccaaccctacagctgagatcccaccggacctacaacggcagctaggacagcagcctttccgttcccgggtctggcctcctcacctggtacctgatcagcatcggtgagtagccacatgagctgtgcgagctccttgaggctcatcggacaggcacccttctgattagtctcacagcgacggtgactagcatcgtggctttaaatagaagccagctgtcatcctgaactcacatcttctcagctccttgcagtaagcaatgcacagggcaaaggttttatactgcgccctggagcaatgcgagattcctctctcccattaccttgcagacctgtttattgtctg

SEQ ID NO: 445238 - DNA, 321 bp, Homo sapiens
cagagagaggcaacagcacacacagggccacagaggcatgacaactccagcatgtgcaggaaatgacagaaagtggggaatgtgctgcatgaaaaggaagtgggaggtgaagtggagagtccagtgagcggcatcctaagatcctaagactcataagccccatgccaagggatgaggactttgcctggaggaaaggcacttgggactcactgggagtgttcgaagaacaggctcaaatttgtatgttattttatttatttatttatttatttttgagacagagtcttgctctttcccccaggctggagtgcagtagcacga

SEQ ID NO: 445239 - DNA, 1519 bp, Homo sapiens
gcgcccaaagccgacgtggaggtgatgcgcgggagcacagatccggggcagtgcgctgcgcagaggcgcgcggcgaagccgagtgggcgcgggagtgacgtcacggcgcgcgacgcggaggcggggtcgggcctgggtccgacggtagtgggtagcgggtctcgggttgcgggttgcaggttgcaagccgcaggccccaggcaactgccttcccggcgccatgttcggctccagtcgtggaggcgtgcgcggcgggcaggaccagttcaactgggaggacgtgaagactgacaagcagcgggagaactacctgggcaactcgctgatggcgccggtaggccgctggcagaagggccgcgacctcacctggtacgccaagggccgggcgccatgcgcgggcccgagccgcgaggaggaactggcagccgtgcgggaggcggagcgcgaggcgctgctggccgcccttggctacaagaacgtgaagaagcagcccacgggcctgagcaaggaggacttcgcggaggtctgcaagcgggaaggaggcgaccccgaggagaagggcgtggaccggctgctggggctggggagcgcaagtggctccgtgggccgcgtggcgatgtcccgagaggacaaggaggccgccaaactggggctgtctgtgttcacgcatcaccgcgtagagagcggcgggcccgggacctcggcagcctcggccaggaggaagccgcgggcggaggatcagacggaaagcagttgtgagagccacaggaaaagcaagaaggagaagaagaaaaagaaaaagaggaaacacaagaaagagaagaagaagaaagacaaagagcacaggcggccagctgaggccacctcctctcccacatctcctgagaggcccaggcaccaccaccatgactccgactccaactccccctgctgtaagaggaggaagcggggacacagtggggacaggaggagcccgtctcgcaggtggcatgacagaggctctgaggcctgatggctggaccctgctcactgctgttgtgggaccctgaaccctcccttcaccttgcttgcctcctgcctcggaagctccttgggtgtgggtgaagcccgaggctgctcctgtggaagtggctctgggcaccagcctgtggggctaaagacttgacagctagctctggagcagccggcttcctggaaaacctccaggtttcgcataccagggatggcccctggcttggcctgcgaaggtgaacctgcccagatttatcagtagaggctggactccctctgtgtcctgcccatggttgcagcagccatgggcctatgagcggtctaactgtggccaagtatggtgacctctatttttctttatattgactctttgtatttcaataaatatattttaaaaggaaaaaaaaagggggggaaaatcaggggccaagttccgtccagtttgaagggctagggggaaaaaaaggggggggaaagggggaaagggggtttgggctttggggtggac

SEQ ID NO: 445240 - DNA, 1556 bp, Homo sapiens
gcgcccaaagccgacgtggaggtgatgcgcgggagcacagatccggggcagtgcgctgcgcagaggcgcgcggcgaagccgagtgggcgcgggagtgacgtcacggcgcgcgacgcggaggcggggtcgggcctgggtccgacggtagtgggtagcgggtctcgggttgcgggttgcaggttgcaagccgcaggccccaggcaactgccttcccggcgccatgttcggctccagtcgtggaggcgtgcgcggcgggcaggaccagttcaactgggaggacgtgaagactgacaagcagcgggagaactacctgggcaactcgctgatggcgccggtaggccgctggcagaagggccgcgacctcacctggtacgccaagggccgggcgccatgcgcgggcccgagccgcgaggaggaactggcagccgtgcgggaggcggagcgcgaggcgctgctggccgcccttggctacaagaacgtgaagaagcagcccacgggcctgagcaaggaggacttcgcggaggtctgcaagcgggaaggaggcgaccccgaggagaagggcgtggaccggctgctggggctggggagcgcaagtggctccgtgggccgcgtggcgatgtcccgagaggacaaggaggccgccaaactggggctgtctgtgttcacggtaatcccccgccccgcctgaccgcagcaggggctaacaggggtggggcggggcgggggcactgaacggagctccccggggcgctgcggggcgtggtgtggggccggcccgcagactcctccgcagagctcgcttctcccgcagcatcaccgcgtagagagcggcgggcccgggacctcggcagcctcggccaggaggaagccgcgggcggaggatcagacggaaagcagttgtgagagccacaggaaaagcaagaaggagaagaagaaaaagaaaaagaggaaacacaagaaagagaagaagaagaaagacaaagagcacaggcggccagctgaggccacctcctctcccacatctcctgagaggcccaggcaccaccaccatgactccgactccaactccccctgctgtaagaggaggaagcggggacacagtggggacaggaggagcccgtctcgcaggtggcatgacagaggctctgaggcctgatggctggaccctgctcactgctgttgtgggaccctgaaccctcccttcaccttgcttgcctcctgcctcggaagctccttgggtgtgggtgaagcccgaggctgctcctgtggaagtggctctgggcaccagcctgtggggctaaagacttgacagctagctctggagcagccggcttcctggaaaacctccaggtttcgcataccagggatggcccctggcttggcctgcgaaggtgaacctgcccagatttatcagtagaggctggactccctctgtgtcctgcccatggttgcagcagccatgggcctatgagcggtctaactgtggccaagtatggtgacctctatttttctttatattgactctttgtatttcaataaatatattttaaaaggaa

SEQ ID NO: 445241 - DNA, 1507 bp, Homo sapiens
gcgcccaaagccgacgtggaggtgatgcgcgggagcacagatccggggcagtgcgctgcgcagaggcgcgcggcgaagccgagtgggcgcgggagtgacgtcacggcgcgcgacgcggaggcggggtcgggcctgggtccgacggtagtgggtagcgggtctcgggttgcgggttgcaggttgcaagccgcaggccccaggcaactgccttcccggcgccatgttcggctccagtcgtggaggcgtgcgcggcgggcaggaccagttcaactgggaggacgtgaagactgacaagcagcgggagaactacctgggcaactcgctgatggcgccggtaggccgctggcagaagggccgcgacctcacctggtacgccaagggccgggcgccatgcgcgggcccgagccgcgaggaggaactggcagccgtgcgggaggcggagcgcgaggcgctgctggccgcccttggctacaagaacgtgaagaagcagcccacgggcctgagcaaggaggacttcgcggaggtctgcaagcgggaaggaggcgaccccgaggagaagggcgtggaccggctgctggggctggggagcgcaaggtgcgggcgggtttccaggggagggcagcactgggctcgattgctcgggtgaggcggacccctgccgtactgtcttcatcgccatgtccctgcagtggctccgtgggccgcgtggcgatgtcccgagaggacaaggaggccgccaaactggggctgtctgtgttcacgcatcaccgcgtagagagcggcgggcccgggacctcggcagcctcggccaggaggaagccgcgggcggaggatcagacggaaagcagttgtgagagccacaggaaaagcaagaaggagaagaagaaaaagaaaaagaggaaacacaagaaagagaagaagaagaaagacaaagagcacaggcggccagctgaggccacctcctctcccacatctcctgagaggcccaggcaccaccaccatgactccgactccaactccccctgctgtaagaggaggaagcggggacacagtggggacaggaggagcccgtctcgcaggtggcatgacagaggctctgaggcctgatggctggaccctgctcactgctgttgtgggaccctgaaccctcccttcaccttgcttgcctcctgcctcggaagctccttgggtgtgggtgaagcccgaggctgctcctgtggaagtggctctgggcaccagcctgtggggctaaagacttgacagctagctctggagcagccggcttcctggaaaacctccaggtttcgcataccagggatggcccctggcttggcctgcgaaggtgaacctgcccagatttatcagtagaggctggactccctctgtgtcctgcccatggttgcagcagccatgggcctatgagcggtctaactgtggccaagtatggtgacctctatttttctttatattgactctttgtatttcaataaatatattttaaaaggaa

SEQ ID NO: 445242 - DNA, 1366 bp, Homo sapiens
gcgcccaaagccgacgtggaggtgatgcgcgggagcacagatccggggcagtgcgctgcgcagaggcgcgcggcgaagccgagtgggcgcgggagtgacgtcacggcgcgcgacgcggaggcggggtcgggcctgggtccgacggtagtgggtagcgggtctcgggttgcgggttgcaggttgcaagccgcaggccccaggcaactgccttcccggcgccatgttcggctccagtcgtggaggcgtgcgcggcgggcaggaccagttcaactgggaggacgtgaagactgacaagcagcgggagaactacctgggcaactcgctgatggcgccggtaggccgctggcagaagggccgcgacctcacctggtacgccaagggccgggcgccatgcgcgggcccgagccgcgaggaggaactggcagccgtgcgggaggcggagcgcgaggcgctgctggccgccctgacttcgcggaggtctgcaagcgggaaggaggcgaccccgaggagaagggcgtggaccggctgctggggctggggagcgcaagtggctccgtgggccgcgtggcgatgtcccgagaggacaaggaggccgccaaactggggctgtctgtgttcacgcatcaccgcgtagagagcggcgggcccgggacctcggcagcctcggccaggaggaagccgcgggcggaggatcagacggaaagcagttgtgagagccacaggaaaagcaagaaggagaagaagaaaaagaaaaagaggaaacacaagaaagagaagaagaagaaagacaaagagcacaggcggccagctgaggccacctcctctcccacatctcctgagaggcccaggcaccaccaccatgactccgactccaactccccctgctgtaagaggaggaagcggggacacagtggggacaggaggagcccgtctcgcaggtggcatgacagaggctctgaggcctgatggctggaccctgctcactgctgttgtgggaccctgaaccctcccttcaccttgcttgcctcctgcctcggaagctccttgggtgtgggtgaagcccgaggctgctcctgtggaagtggctctgggcaccagcctgtggggctaaagacttgacagctagctctggagcagccggcttcctggaaaacctccaggtttcgcataccagggatggcccctggcttggcctgcgaaggtgaacctgcccagatttatcagtagaggctggactccctctgtgtcctgcccatggttgcagcagccatgggcctatgagcggtctaactgtggccaagtatggtgacctctatttttctttatattgactctttgtatttcaataaatatattttaaaaggaa

SEQ ID NO: 445243 - DNA, 1078 bp, Homo sapiens
tgaagagaggtcctaagtactggcagtggtcgggcgctgtgccgtgggagggcactcaggacctggggcggggccttttcctgccgtgggtggcacctccagggcttctcctggatggtgagcctgggcctgaccctaagagtggcctggtgggtgcaggtaggaaggtgtcaacctgccaagggcacggctggggtggggcagggggtgctgtggagatggggatattgcatctgtttctaacccacgtagccactggccacgtgactacgtaactgaggagtggaatttgtagtttgatttaactgatttaaagacgcacttgtgggtggtggcttcatctggatggggcctgcttgtgttcactctcttggcttgcaagactagggtctgaggcacaccttgtatcctccttgtagttgtgagagccacaggaaaagcaagaaggagaagaagaaaaagaaaaagaggaaacacaagaaagagaagaagaagaaagacaaagagcacaggcggccagctgaggccacctcctctcccacatctcctgagaggcccaggcaccaccaccatgactccgactccaactccccctgctgtaagaggaggaagcggggacacagtggggacaggaggagcccgtctcgcaggtggcatgacagaggctctgaggcctgatggctggaccctgctcactgctgttgtgggaccctgaaccctcccttcaccttgcttgcctcctgcctcggaagctccttgggtgtgggtgaagcccgaggctgctcctgtggaagtggctctgggcaccagcctgtggggctaaagacttgacagctagctctggagcagccggcttcctggaaaacctccaggtttcgcataccagggatggcccctggcttggcctgcgaaggtgaacctgcccagatttatcagtagaggctggactccctctgtgtcctgcccatggttgcagcagccatgggcctatgagcggtctaactgtggccaagtatggtgacctctatttttctttatattgactctttgtatttcaataaatatattttaaaaggaa

SEQ ID NO: 445244 - DNA, 169 bp, Homo sapiens
aagaaagagaagaagaagaaagacaaagagcacaggcggccagctgaggccacctcctctcccacatctcctgagaggtatgccctggtccatatctgcctcttgggggtgggggcctggttgactccttccgagtgactgactgccattggtctccccaggcccaggc

SEQ ID NO: 445245 - DNA, 1412 bp, Homo sapiens
gcgcccaaagccgacgtggaggtgatgcgcgggagcacagatccggggcagtgcgctgcgcagaggcgcgcggcgaagccgagtgggcgcgggagtgacgtcacggcgcgcgacgcggaggcggggtcgggcctgggtccgacggtagtgggtagcgggtctcgggttgcgggttgcaggttgcaagccgcaggccccaggcaactgccttcccggcgccatgttcggctccagtcgtggaggcgtgcgcggcgggcaggaccagttcaactgggaggacgtgaagactgacaagcagcgggagaactacctgggcaactcgctgatggcgccggtaggccgctggcagaagggccgcgacctcacctggtacgccaagggccgggcgccatgcgcgggcccgagccgcgaggaggaactggcagccgtgcgggaggcggagcgcgaggcgctgctggccgcccttggctacaagaacgtgaagaagcagcccacgggcctgagcaaggaggacttcgcggaggtctgcaagcgggaaggaggcgaccccgaggagaagggcgtggaccggctgctggggctggggagcgcaagtggctccgtgggccgcgtggcgatgtcccgagaggacaaggaggccgccaaactggggctgtctgtgttcacgcatcaccgcgtagagagcggcgggcccgggacctcggcagcctcggccaggaggaagccgcgggcggaggatcagacggaaagcagttgtgagagccacaggaaaagcaagaaggagaagaagaaaaagaaaaagaggaaacacaagaaagagaagaagaagaaagacaaagagcacaggcggccagctgaggccacctcctctcccacatctcctgagaggcccaggcaccaccaccatgactccgactccaactccccctgctgtaagaggaggaagcggggacacagtggggacaggaggagcccgtctcgcaggtggcatgacagaggctctgaggcctgatggctggaccctgctcactgctgttgtgggaccctgaaccctcccttcaccttgcttgcctcctgcctcggaagctccttgggtgtgggtgaagcccgaggctgctcctgtggaagtggctctgggcaccagcctgtggggctaaagacttgacagctagctctggagcagccggcttcctggaaaacctccaggtttcgcataccagggatggcccctggcttggcctgcgaaggtgaacctgcccagatttatcagtagaggctggactccctctgtgtcctgcccatggttgcagcagccatgggcctatgagcggtctaactgtggccaagtatggtgacctctatttttctttatattgactctttgtatttcaataaatatattttaaaaggaa

SEQ ID NO: 445246 - DNA, 1223 bp, Homo sapiens
gcgcccaaagccgacgtggaggtgatgcgcgggagcacagatccggggcagtgcgctgcgcagaggcgcgcggcgaagccgagtgggcgcgggagtgacgtcacggcgcgcgacgcggaggcggggcaactcgctgatggcgccggtaggccgctggcagaagggccgcgacctcacctggtacgccaagggccgggcgccatgcgcgggcccgagccgcgaggaggaactggcagccgtgcgggaggcggagcgcgaggcgctgctggccgcccttggctacaagaacgtgaagaagcagcccacgggcctgagcaaggaggacttcgcggaggtctgcaagcgggaaggaggcgaccccgaggagaagggcgtggaccggctgctggggctggggagcgcaagtggctccgtgggccgcgtggcgatgtcccgagaggacaaggaggccgccaaactggggctgtctgtgttcacgcatcaccgcgtagagagcggcgggcccgggacctcggcagcctcggccaggaggaagccgcgggcggaggatcagacggaaagcagttgtgagagccacaggaaaagcaagaaggagaagaagaaaaagaaaaagaggaaacacaagaaagagaagaagaagaaagacaaagagcacaggcggccagctgaggccacctcctctcccacatctcctgagaggcccaggcaccaccaccatgactccgactccaactccccctgctgtaagaggaggaagcggggacacagtggggacaggaggagcccgtctcgcaggtggcatgacagaggctctgaggcctgatggctggaccctgctcactgctgttgtgggaccctgaaccctcccttcaccttgcttgcctcctgcctcggaagctccttgggtgtgggtgaagcccgaggctgctcctgtggaagtggctctgggcaccagcctgtggggctaaagacttgacagctagctctggagcagccggcttcctggaaaacctccaggtttcgcataccagggatggcccctggcttggcctgcgaaggtgaacctgcccagatttatcagtagaggctggactccctctgtgtcctgcccatggttgcagcagccatgggcctatgagcggtctaactgtggccaagtatggtgacctctatttttctttatattgactctttgtatttcaataaatatattttaaaaggaa

SEQ ID NO: 445247 - DNA, 1733 bp, Homo sapiens
gcgcccaaagccgacgtggaggtgatgcgcgggagcacagatccggggcagtgcgctgcgcagaggcgcgcggcgaagccgagtgggcgcgggagtgacgtcacggcgcgcgacgcggaggcggggtcgggcctgggtccgacggtagtgggtagcgggtctcgggttgcgggttgcaggttgcaagccgcaggccccaggcaactgccttcccggcgccatgttcggctccagtcgtggaggcgtgcgcggcgggcaggaccagttcaactgggaggacgtgaagactgacaagcagcgggagaactacctgggcaactcgctgatggcgccggtaggccgctggcagaagggccgcgacctcacctggtacgccaagggccgggcgccatgcgcgggcccgagccgcgaggaggaactggcagccgtgcgggaggcggagcgcgaggcgctgctggccgcccttggctacaagaacgtgaagaagcagcccacgggcctgagcaaggaggtaactccccggggtggggggcgcgtggagggccgtgggtgtggggccgactcgagcgctccctgtgctctcgcacctgcaggacttcgcggaggtctgcaagcgggaaggaggcgaccccgaggagaagggcgtggaccggctgctggggctggggagcgcaaggtgcgggcgggtttccaggggagggcagcactgggctcgattgctcgggtgaggcggacccctgccgtactgtcttcatcgccatgtccctgcagtggctccgtgggccgcgtggcgatgtcccgagaggacaaggaggccgccaaactggggctgtctgtgttcacggtaatcccccgccccgcctgaccgcagcaggggctaacaggggtggggcggggcgggggcactgaacggagctccccggggcgctgcggggcgtggtgtggggccggcccgcagactcctccgcagagctcgcttctcccgcagcatcaccgcgtagagagcggcgggcccgggacctcggcagcctcggccaggaggaagccgcgggcggaggatcagacggaaagcagttgtgagagccacaggaaaagcaagaaggagaagaagaaaaagaaaaagaggaaacacaagaaagagaagaagaagaaagacaaagagcacaggcggccagctgaggccacctcctctcccacatctcctgagaggcccaggcaccaccaccatgactccgactccaactccccctgctgtaagaggaggaagcggggacacagtggggacaggaggagcccgtctcgcaggtggcatgacagaggctctgaggcctgatggctggaccctgctcactgctgttgtgggaccctgaaccctcccttcaccttgcttgcctcctgcctcggaagctccttgggtgtgggtgaagcccgaggctgctcctgtggaagtggctctgggcaccagcctgtggggctaaagacttgacagctagctctggagcagccggcttcctggaaaacctccaggtttcgcataccagggatggcccctggcttggcctgcgaaggtgaacctgcccagatttatcagtagaggctggactccctctgtgtcctgcccatggttgcagcagccatgggcctatgagcggtctaactgtggccaagtatggtgacctctatttttctttatattgactctttgtatttcaataaatatattttaaaaggaa

SEQ ID NO: 445248 - DNA, 1218 bp, Homo sapiens
gcgcccaaagccgacgtggaggtgatgcgcgggagcacagatccggggcagtgcgctgcgcagaggcgcgcggcgaagccgagtgggcgcgggagtgacgtcacggcgcgcgacgcggaggcggggtcgggcctgggtccgacggtagtgggtagcgggtctcgggttgcgggttgcaggttgcaagccgcaggccccaggcaactgccttcccggcgccatgttcggctccagtcgtggaggcgtgcgcggcgggcaggaccagttcaactgggaggacgtgaagactgacaagcagcgggagaactacctgggcaactcgctgatggcgccggtaggccgctggcagaagggccgcgacctcacctggtacgccaagggccgggcgccatgcgcgggcccgagccgcgaggaggaactggcagccgtgcgggaggcggagcgcgaggcgctgctggccgcccttggctacaagaacgtgaagaagcagcccacgggcctgagcaaggaggacttcgcggaggtctgcaagcgggaaggaggcgaccccgaggagaagggcgtggaccggctgctggggctggggagcgcaagtggctccgtgggccgcgtggcgatgtcccgagaggacaaggaggccgccaaactggggctgtctgtgttcacgcatcaccgcgtagagagcggcgggcccgggacctcggcagcctcggccaggaggaagccgcgggcggaggatcagacggaaagcagttgtgagagccacaggaaaagcaagaaggagaagaagaaaaagaaaaagaggctctgaggcctgatggctggaccctgctcactgctgttgtgggaccctgaaccctcccttcaccttgcttgcctcctgcctcggaagctccttgggtgtgggtgaagcccgaggctgctcctgtggaagtggctctgggcaccagcctgtggggctaaagacttgacagctagctctggagcagccggcttcctggaaaacctccaggtttcgcataccagggatggcccctggcttggcctgcgaaggtgaacctgcccagatttatcagtagaggctggactccctctgtgtcctgcccatggttgcagcagccatgggcctatgagcggtctaactgtggccaagtatggtgacctctatttttctttatattgactctttgtatttcaataaatatattttaaaaggaa

SEQ ID NO: 445249 - DNA, 775 bp, Homo sapiens
gcgcccaaagccgacgtggaggtgatgcgcgggagcacagatccggggcagtgcgctgcgcagaggcgcgcggcgaagccgagtgggcgcgggagtgacgtcacggcgcgcgacgcggaggcggggtcgggcctgggtccgacggtagtgggtagcgggtctcgggttgcgggttgcaggttgcaagccgcaggccccaggcaactgccttcccggcgccatgttcggctccagtcgtggaggcgtgcgcggcgggcaggaccagttcaactgggaggacgtgaagactgacaagcagcgggagaactacctgggcaactcgctgatggcgccggtaggccgctggcagaagggccgcgacctcacctggtacgccaagggccgggcgccatgcgcgggcccgagccgcgaggaggaactggcagccgtgcgggaggcggagcgcgaggcgctgctggccgcccttggctacaagaacgtgaagaagcagcccacgggcctgagcaaggaggacttcgcggaggtctgcaagcgggaaggaggcgaccccgaggagaagggcgtggaccagcccaggaggtcccagtgaggaagggatggtgcgcccccaacatggtccggagatacacccagctaccaattcgggaccaggaccaacaggaccggacccgcctccctggacctcggacctgatgaggccacgacccctgcgcttctctcctccccctgtccctcccacctgtgctcaaaataaacctctggactgaccggctaa

SEQ ID NO: 445250 - DNA, 672 bp, Homo sapiens
gatcacttgagcccaggagctcaagaccagcctggacaacagagtgagaccctgtctctacaaaatatacttaaacttagctgagcacggtggtatatgcctgtagtctcaccttcttgggaggctgatgaggcaggagtatctctgagcccaggagttggaggtttgcagtgagctacgattgtaccactgcactccagcctgggtgacaacgatgagaccctatatatatatattttttttaattaattaattagttaactatttttgagacggagtctcactctgtcgcccaggctggagtacatgagccaagatcgtgccattgcactgcggcctgggtgacagagcaagactccatctcaaaacaaaacaaaagattataggcgtgagccaccgcccccagctgattccaggcgaattcttctctgatgggcgggcgagggtgtgttcgtgtgatgggttggagtgtgtgtgtctgagtacacagatgatgtgttttcccttcagcttcttacgttttctgagcatccgttgtgccttaacattttctgcttgtcctttgggacaaagcagtattttactcattctttgaatgttctcattcttttgtatcatgtgacttattaaaatcagtttctaacaaactctggggcagctcatgatatgaaa

SEQ ID NO: 445251 - DNA, 459 bp, Homo sapiens
aaattagtgtgcgtggtggcgcacacctgtagtcccagctactcaggaggctgaggcaggagaattgcttgaacccaggaggtggaggttgcagtgagccaagatcgtgccattgcactgcggcctgggtgacagagcaagactccatctcaaaacaaaacaaaagattataggcgtgagccaccgcccccagctgattccaggcgaattcttctctgatgggcgggcgagggtgtgttcgtgtgatgggttggagtgtgtgtgtctgagtacacagatgatgtgttttcccttcagcttcttacgttttctgagcatccgttgtgccttaacattttctgcttgtcctttgggacaaagcagtattttactcattctttgaatgttctcattcttttgtatcatgtgacttattaaaatcagtttctaacaaactctggggcagctcatgatatgaaa

SEQ ID NO: 445252 - DNA, 736 bp, Homo sapiens
cctcccgccgtggcttccgcgtcgcttcccggtcagctgcgtccttagcgggagcccgagtgcgggcggtggcgggcttggcggcggggcaggattccaggcaggagccttgcctctcaggtggcgggctctgcgaccctgcgagatggacgggacagaaggcagtgccgggcagcccggccccgctgagcgatcccaccgaagcagcgtgtcctccgtgggagcccgaggtgggtcccacccgcatctcctcttccacaccctcctgggaccccagccctggagaagtagctctggcttgtcttctttttcattaaagataatttatgtatcgactaagaaataataaggtacattcagatgtggaaaaaaaaaaaaaaaaaaaaaaaaaaaaaaaaaaaaaaaaaagggggggggcgccaaaaaagatctcccgggggggcacacaaagtgtcagaggagacccccgagagttagtgacacaggaggtgggcccacaaaagggagagcagcaaataaaaagagccgaggcgacacgggacagacggagataaacaaacagaggggagagcgcggggagagaacagcgggcgagaccggcgggaagcacagtgagcgacggaggcaccccaaacaagcgagggagcggcaggcgcgcaaagggcgcgggcacgaaagccccacggcgcagtgtgagccgcccagggggaacacctcgcagtgacacggggtgaag

SEQ ID NO: 445253 - DNA, 417 bp, Homo sapiens
gatcacttgagcccaggagctcaagaccagcctggacaacagagtgagaccctgtctctacaaaatatacttaaacttagctgagcacggtggtatatgcctgtagtctcaccttcttgggaggctgatgaggcaggagtatctctgagcccaggagttggaggtttgcagtgagctacgattgtaccactgcactccagcctgggtgacaacgatgagaccctatatatatatattttttttaattaattaattagttaactatttttgagacggagtctcactctgtcgcccaggctggagtacagtggcatgatctcggctcactgcaacctccgcctccccagttctagtgattctcctgcctcaacctcccgagtagctgggactacaggtgtgtgccaccacacccggcta

SEQ ID NO: 445254 - DNA, 2052 bp, Homo sapiens
agaggtgggaccacggggagaggaccacggagaagtgacttttgggcccggggccatgcccgggctgtgcaaagctggccagggcctcctgtagggctcctctgcagcctgccctgccttcccccggatgctgggccctgctgctctctcaggaccatccgatcaagctgcagctgccaccctcacctagaaacatgcctttgtgcccacctcaagatgggcagtgtccctgttctgaagtgcccagtggcagctccagtggtagaggaccaaggattgaggtttgggacctgaagctccagtgtgtgcctttggcctcttccctggacttgggtgaccagtctccgtcttcctcctgctagtgctccaccccccggacttggatgaccagtttcccaccttcctcctgctggtgctccatcccccaataccaggctgggccaccactctgaggagggtaggaggggcctccctggattgaaccgggacagaaacacggtgagggcccccaccacacctccctggttgaatcaggaatggagggagccaggcagggccctacctggggtcctgtgcccctcgttctggtctcctttgcaggcacgagataccagaaagagcatgcctttctgatagcctttggtgatgtcactgctgggaggtggctatcctgtggaccacctggcctccagacccacactcacagtctgtgaaaaactgaaaatcccctggtgggcactccctggagcccaagcagctcccctaggggactgaccggacctgacctcccctccctgtgtctgggtcttcaggttttagtttggtctttgttcatctgagttgtgctggggcaacgccaggaagtgccctgggtaacctctgctgtgcgctccttcccaggtggcgccatggattcctctgggggctggcgcatgcccaggaaagcctgggccacacgggacactctcttctttatcgaggacacttggaaaggtgactgatatgggtgcttggcttctctggtcccagcttgccctccggggagcaggggctctgtcttgtcccagatgagctgagagcccctgagaggagggctttcccagccctgggaccctccgaggtgggtgtgcgggtctcacaggtgcttcctgggacttcctgtggctgcacagggcttggctttgtcttcgttcccggtggaaaaccgtgggagaggaagcttgggcctctactccaagtatcagagcctgttcaccctcctccctttggtagcttgtgaatgtgccaggtgtttcgaggtaggcttgccttctggcagcatggactttgttaaaataataggcggaaagaagaggcctgggaagggcccccagtcttttggaatgtcctggtcacagggtcatgtcagctgccagttctcgtctcccgtcctggagttgctcggtcttgcggagctgcccgcctgcctgttctggcggctccagcgcaggctgtccctgctgctttgattccaggtgattttattttttttatttttttattttttttgagacggagtcttgctctgttgcccaggcaggagtgcagtggcgcatctcggctcactgcaacctctgtctcaagcgattctcctgcctcagcctcctgagtagctgggattacaggtgcatgccaccaggccccgctgatttttgtatttttagtagagatagggtttcaccatgttggtcaggctggtcgtgaactcctgacctcatgatctgcccgcctcaacctcccaaagtgctgggattataggcgtgagccaccgcccccagctgattccaggcgaattcttctctgatgggcgggcgagggtgtgttcgtgtgatgggttggagtgtgtgtgtctgagtacacagatgatgtgttttcccttcagcttcttacgttttctgagcatccgttgtgccttaacattttctgcttgtcctttgggacaaagcagtattttactcattctttgaatgttctcattcttttgtatcatgtgacttattaaaatcagtttct

SEQ ID NO: 445255 - DNA, 3701 bp, Homo sapiens
cctcccgccgtggcttccgcgtcgcttcccggtcagctgcgtccttagcgggagcccgagtgcgggcggtggcgggcttggcggcggggcaggattccaggcaggagccttgcctctcaggtggcgggctctgcgaccctgcgagatggacgggacagaaggcagtgccgggcagcccggccccgctgagcgatcccaccgaagcagcgtgtcctccgtgggagcccgagcggctgacgtgctggtatacctagcggatgacacggtggtgcccctggctgtggagaacctgccctcgctcagtgcccatgagctgcaccgcgctgtccgcgaggtcctgcagcttccagacatcgccctggatgtcttcgcgctctggctggtctcccctctgctggaggtgcagctgaaacccaagcaccagccctacaagctgggacgccagtggccggagctgctgctgcgcttcaccagtgccccagatgatgacgtggccatggatgagcctttcctgcagttccgaaggaacgtgttcttcccaaagcggcgggagctccagatccatgacgaggaggtcctgcggctgctctatgaggaggccaagggcaacgtgctggctgcacggtacccgtgcgacgtggaggactgcgaggctctgggcgccctggtgtgccgcgtgcagcttgggccctaccagcccggccggccggcaagcctgcgacctgagggagaagctggactccttcctccctgcccacctctgtaagcggggccagagtctctttgctgccctccggggccgtggggccagggccgggccgggcgagcagggcctgctgaacgcctaccgccaggtgcaggaggtcagcagcgacggcgggtgcgaggccgccctgggcacccactaccgcgcctatctcctcaagtgccacgagctgccgttttatgggtgtgccttcttccacggtgaggttgacaagccggcccaaggctttttgcaccggggtgggcgcaagccagtttctgtggccatcagtctggaaggcgtgcacgtcatcgatagcagagagaagcatgtcctgctgggcctgcgcttccaggagctgtcgtgggaccacacctcccccgaggaggaggagcccatcttgtggctggagttcgacggggacagcgagggcacacctgtcaacaagctcctcaagatctactccaagcaggccgaactgatgagcagtctcattgagtactgcatcgaactgagccaggcggcggagcccgcaggcccccaggacagtgcgactggctcgccctcggaccccagctcctcactggctcctgttcagcgccccaagctgcggaggcagggcagtgtggtgtccagccggatccagcatctctccaccatcgactacgtggaggacggcaaggggatcaggcgagtgaagccgaagcgcaccacatccttcttcagccggcagctgtccttgggccaggggagctacaccgtggtgcagcccggcgacagcctggagcagggctgaggacgctgcacccggcaggaggagggcgactgggggccctggcccggcactgtcctcctgaggggcaggcgccggctgcaacagtctcatgggtcaccacgtggggagggctgcctcagcaggtttctcagaccacggagaagtgacttttgggcccggggccatgcccgggctgtgcaaagctggccagggcctcctgtagggctcctctgcagcctgccctgccttcccccggatgctgggccctgctgctctctcaggaccatccgatcaagctgcagctgccaccctcacctagaaacatgcctttgtgcccacctcaagatgggcagtgtccctgttctgaagtgcccagtggcagctccagtggtagaggaccaaggattgaggtttgggacctgaagctccagtgtgtgcctttggcctcttccctggacttgggtgaccagtctccgtcttcctcctgctagtgctccaccccccggacttggatgaccagtttcccaccttcctcctgctggtgctccatcccccaataccaggctgggccaccactctgaggagggtaggaggggcctccctggattgaaccgggacagaaacacggtgagggcccccaccacacctccctggttgaatcaggaatggagggagccaggcagggccctacctggggtcctgtgcccctcgttctggtctcctttgcaggcacgagataccagaaagagcatgcctttctgatagcctttggtgatgtcactgctgggaggtggctatcctgtggaccacctggcctccagacccacactcacagtctgtgaaaaactgaaaatcccctggtgggcactccctggagcccaagcagctcccctaggggactgaccggacctgacctcccctccctgtgtctgggtcttcaggttttagtttggtctttgttcatctgagttgtgctggggcaacgccaggaagtgccctgggtaacctctgctgtgcgctccttcccaggtggcgccatggattcctctgggggctggcgcatgcccaggaaagcctgggccacacgggacactctcttctttatcgaggacacttggaaaggtgactgatatgggtgcttggcttctctggtcccagcttgccctccggggagcaggggctctgtcttgtcccagatgagctgagagcccctgagaggagggctttcccagccctgggaccctccgaggtgggtgtgcgggtctcacaggtgcttcctgggacttcctgtggctgcacagggcttggctttgtcttcgttcccggtggaaaaccgtgggagaggaagcttgggcctctactccaagtatcagagcctgttcaccctcctccctttggtagcttgtgaatgtgccaggtgtttcgaggtaggcttgccttctggcagcatggactttgttaaaataataggcggaaagaagaggcctgggaagggcccccagtcttttggaatgtcctggtcacagggtcatgtcagctgccagttctcgtctcccgtcctggagttgctcggtcttgcggagctgcccgcctgcctgttctggcggctccagcgcaggctgtccctgctgctttgattccaggtgattttattttttttatttttttattttttttgagacggagtcttgctctgttgcccaggcaggagtgcagtggcgcatctcggctcactgcaacctctgtctcaagcgattctcctgcctcagcctcctgagtagctgggattacaggtgcatgccaccaggccccgctgatttttgtatttttagtagagatagggtttcaccatgttggtcaggctggtcgtgaactcctgacctcatgatctgcccgcctcaacctcccaaagtgctgggattataggcgtgagccaccgcccccagctgattccaggcgaattcttctctgatgggcgggcgagggtgtgttcgtgtgatgggttggagtgtgtgtgtctgagtacacagatgatgtgttttcccttcagcttcttacgttttctgagcatccgttgtgccttaacattttctgcttgtcctttgggacaaagcagtattttactcattctttgaatgttctcattcttttgtatcatgtgacttattaaaatcagtttct

SEQ ID NO: 445256 - DNA, 3732 bp, Homo sapiens
cctcccgccgtggcttccgcgtcgcttcccggtcagctgcgtccttagcgggagcccgagtgcgggcggtggcgggcttggcggcggggcaggattccaggcaggagccttgcctctcaggtggcgggctctgcgaccctgcgagatggacgggacagaaggcagtgccgggcagcccggccccgctgagcgatcccaccgaagcagcgtgtcctccgtgggagcccgagcggctgacgtgctggtatacctagcggatgacacggtggtgcccctggctgtggagaacctgccctcgctcagtgcccatgagctgcaccgcgctgtccgcgaggtcctgcagcttccagacatcgccctggatgtcttcgcgctctggctggtctcccctctgctggaggtgcagctgaaacccaagcaccagccctacaagctgggacgccagtggccggagctgctgctgcgcttcaccagtgccccagatgatgacgtggccatggatgagcctttcctgcagttccgaaggaacgtgttcttcccaaagcggcgggagctccagatccatgacgaggaggtcctgcggctgctctatgaggaggccaagggcaacgtgctggctgcacggtacccgtgcgacgtggaggactgcgaggctctgggcgccctggtgtgccgcgtgcagcttgggccctaccagcccggccggccggcaagcctgcgacctgagggagaagctggactccttcctccctgcccacctctgtaagcggggccagagtctctttgctgccctccggggccgtggggccagggccgggccgggcgagcagggcctgctgaacgcctaccgccaggtgcaggaggtcagcagcgacggcgggtgcgaggccgccctgggcacccactaccgcgcctatctcctcaagtgccacgagctgccgttttatgggtgtgccttcttccacggtgaggttgacaagccggcccaaggctttttgcaccggggtgggcgcaagccagtttctgtggccatcagtctggaaggcgtgcacgtcatcgatagcagagagaagcatgtcctgctgggcctgcgcttccaggagctgtcgtgggaccacacctcccccgaggaggaggagcccatcttgtggctggagttcgacggggacagcgagggcacacctgtcaacaagctcctcaagatctactccaagcaggccgaactgatgagcagtctcattgagtactgcatcgaactgagccaggcggcggagcccgcaggcccccaggacagtgcgactggctcgccctcggaccccagctcctcactggctcctgttcagcgccccaagctgcggaggcagggcagtgtggtgtccagccggatccagcatctctccaccatcgactacgtggaggacggcaaggggatcaggcgagtgaagccgaagcgcaccacatccttcttcagccggcagctgtccttgggccaggggagctacaccgtggtgcagcccggcgacagcctggagcagggctgaggacgctgcacccggcaggaggagggcgactgggggccctggcccggcactgtcctcctgaggggcaggcgccggctgcaacagtctcatgggtcaccacgtggggagggctgcctcagcaggtttctcagaccacggagaagtgacttttgggcccggggccatgcccgggctgtgcaaagctggccagggcctcctgtagggctcctctgcagcctgccctgccttcccccggatgctgggccctgctgctctctcaggaccatccgatcaagctgcagctgccaccctcacctagaaacatgcctttgtgcccacctcaagatgggcagtgtccctgttctgaagtgcccagtggcagctccagtggtagaggaccaaggattgaggtttgggacctgaagctccagtgtgtgcctttggcctcttccctggacttgggtgaccagtctccgtcttcctcctgctagtgctccaccccccggacttggatgaccagtttcccaccttcctcctgctggtgctccatcccccaataccaggctgggccaccactctgaggagggtaggaggggcctccctggattgaaccgggacagaaacacggtgagggcccccaccacacctccctggttgaatcaggaatggagggagccaggcagggccctacctggggtcctgtgcccctcgttctggtctcctttgcaggcacgagataccagaaagagcatgcctttctgatagcctttggtgatgtcactgctgggaggtggctatcctgtggaccacctggcctccagacccacactcacagtctgtgaaaaactgaaaatcccctggtgggcactccctggagcccaagcagctcccctaggggactgaccggacctgacctcccctccctgtgtctgggtcttcaggttttagtttggtctttgttcatctgagttgtgctggggcaacgccaggaagtgccctgggtaacctctgctgtgcgctccttcccaggtggcgccatggattcctctgggggctggcgcatgcccaggaaagcctgggccacacgggacactctcttctttatcgaggacacttggaaaggtgactgatatgggtgcttggcttctctggtcccagcttgccctccggggagcaggggctctgtcttgtcccagatgagctgagagcccctgagaggagggctttcccagccctgggaccctccgaggtgggtgtgcgggtctcacaggtgcttcctgggacttcctgtggctgcacagggcttggctttgtcttcgttcccggtggaaaaccgtgggagaggaagcttgggcctctactccaagtatcagagcctgttcaccctcctccctttggtagcttgtgaatgtgccaggtgtttcgaggtaggcttgccttctggcagcatggactttgttaaaataataggcggaaagaagaggcctgggaagggcccccagtcttttggaatgtcctggtcacagggtcatgtcagctgccagttctcgtctcccgtcctggagttgctcggtcttgcggagctgcccgcctgcctgttctggcggctccagcgcaggctgtccctgctgctttgattccaggtgattttattttttttatttttttattttttttgagacggagtcttgctctgttgcccaggcaggagtgcagtggcgcatctcggctcactgcaacctctgtctcaagcgattctcctgcctcagcctcctgagtagctgggattacaggtgcatgccaccaggccccgctgatttttgtatttttagtagagatagggtttcaccatgttggtcaggctggtcgtgaactcctgacctcatgatctgcccgcctcaacctcccaaagtgctgggattataggcgtgagccaccgcccccagctgattccaggcgaattcttctctgatgggcgggcgagggtgtgttcgtgtgatgggttggagtgtgtgtgtctgagtacacagatgatgtgttttcccttcagcttcttacgttttctgagcatccgttgtgccttaacattttctgcttgtcctttgggacaaagcagtattttactcattctttgaatgttctcattcttttgtatcatgtgacttattaaaatcagtttctaacaaactctggggcagctcatgatatgaaa

SEQ ID NO: 445257 - DNA, 631 bp, Homo sapiens
caagcagaggcagcaatggttggtcctgacggtggctgagcccccagcccctggaatatgcagcccgggggagccccagacagcggcaaggacgaggtggcggagtggggcgggaggcatggtctccacctaccgggtggccgtgctgggggcgcgaggtgtgggcaagagtgccatcgtgcgccagttcttgtacaacgagttcagcgaggtctgcgtccccaccaccgcccgccgcctttacctgcctgctgtcgtcatgaacggccacgtgcacgacctccagatcctcgactttccacccatcagcgccttccctgtcaatacgctccagatggagtctccctctgtcgcccaggctggagtgcagtggcacgatctcggctcactgcaatcttcgcctcccgggttcaagcgattctcctgcctcagcctcctgagtagctggattacaggcacctgcgaccacacccagctaatttttgtatttttagtagagatggggtttcaccatgttggccaggctggtctcaaactcctgacctcaagtgatccgcctgcctaggcctcccaaagtactgggattataggcatgagccaccacgcctggtctcttatccatactttcagt

SEQ ID NO: 445258 - DNA, 2885 bp, Homo sapiens
caagcagaggcagcaatggttggtcctgacggtggctgagcccccagcccctggaatatgcagcccgggggagccccagacagcggcaaggacgaggtggcggagtggggcgggaggcatggtctccacctaccgggtggccgtgctgggggcgcgaggtgtgggcaagagtgccatcgtgcgccagttcttgtacaacgagttcagcgaggtctgcgtccccaccaccgcccgccgcctttacctgcctgctgtcgtcatgaacggccacgtgcacgacctccagatcctcgactttccacccatcagcgccttccctgtcaatacgctccaggagtgggcagacacctgctgcaggggactccggagtgtccacgcctacatcctggtctacgacatctgctgctttgacagctttgagtacgtcaagaccatccgccagcagatcctggagacgagggtgatcggaacctcagagacgcccatcatcatcgtgggcaacaagcgggacctgcagcgcggacgcgtgatcccgcgctggaacgtgtcgcacctggtacgcaagacctggaagtgcggctacgtggaatgctcggccaagtacaactggcacatcctgctgctcttcagcgagctgctcaagagcgtcggctgcgcccgttgcaagcacgtgcacgctgccctgcgcttccagggcgcgctgcgccgcaaccgctgcgccatcatgtgacgcctgcgcgcccctcgggctgcaccggcactggccgagcggagggcggggccgtactgcggggctggggcggggagcgggcgggaaatggaactgtgacggtcccggcctgaggcccctgcagccacgcacctcccggtgagaagcagagcgcgagagggagccctccgtaactgcccagccctgccccttgcccccgtggcttcctgggacagccgccttcagtgctgtatttagtgcagtgcccggcccgacccgcgggggtgccacagccttttgggatgggggtgagcgtgcaatggaggctgggggtggcgaggtgccgccttggccgggcccccacgtgtcttctccagaatgtgtctgtctttgcctggtgtcttcctttcccgtgtccgcccaccccagcgtctgttggtacttacctgtctcacctaccctccagtcccctcccagctccgctcacagggctctcatttcgtccatccccttgtcgcagatcctggcagcttctttgtgaggccaggccttctgactgtcagcaccaccggcacagggcagagatgcgggtggcccaaggaccacgatcaaggggtccgggggaccgaggtcccagatcagtgaggggagaaggttgagctctccggcttccagggagacctccccgcccagcagcccccagagacacaacaacctaccttccagccttaactcgatggtccgtccctgccaggtgcccctcactcttcctgaccccaaagccagatcaccccctgggttaaaactttttttctttttttttttggacagagtgtggaaagggagccccccaaaggatagcttctttttcatgatgccaggctccagtcctttattcccttctgcatactgcaatctgatctgtcagactggggaatgttgggttctggggtctggtcgtgggcaggatggtgcccagaagggggttaggttgtcccagtgaaaattctgttgccccgtctcaaccccatctgactaccccagactctgcctgcctcagatctcagactatcctgattaatctggggaagaacagagccagggaaagaatggtggggacccctgtacttgggggagacacacctgcatcttcctcctgccacagatggaggccctcaggatctgacaccctcttgtcccaacaccagtcagccctataccctaactcactccaccccattttctccggctgcctggccgggtttctacctctcgtcaccggagctgatcactgtcagttttgtaccgatttagaaataacaataataatgaagattctaggaatggcatgagggattgatgggggacttggagggagggacaagtggtgccctgtcccctgctcccctggccaaagaaagctgtccttgaggctgagccctcagccctggcctggtggggggacagcaaggtcccttgttataagaggggcagagaggacaactccgctttggccaacctagccaaggctgcagcatatagaccaggaaatcaggtagcccagactggtgatggagcagagtctgggggaagggtcgtgggtggggaatttatcaccaacatccattgtagggggaatctatgattctgcttccccagcggattcccactctgtccaccaagtggggggtagcacagcctcacagcaaccgccctgaccttgggcagtctagtgttcctgcattctagtccctgctgtgctgcaggactttgggcaagtgacctgccctctgtgagcctccctctgacacagaggaggtggctccccttccccacaccttagagtggctgggagggtaacaaagagggcctgcccctttagtctcctgcacccctgccccctggttcaccagagggacccaggcctctggctgctcccctgtgggagccattggaatgtatcccctgacaggcccccttccgcctccacctcaacccaggtcttggatttcaggtccctccacccccattctgagtctctgtccttctccttccacccgctcccagggtttcccaccacagggtctggaagtgtgtgtgacgcccattgagctgttacccgaagtcagattaaaaatcagggagtgttttccctcgtttctgtaaaaaaaaaatg

SEQ ID NO: 445259 - DNA, 2727 bp, Homo sapiens
caagcagaggcagcaatggttggtcctgacggtggctgagcccccagcccctggaatatgcagcccgggggagccccagacagcggcaaggacgaggtggcggagtggggcgggaggcatggtctccacctaccgggtggccgtgctgggggcgcgaggtgtgggcaagagtgccatcgtgcgccagttcttgtacaacgagttcagcgaggtctgcgtccccaccaccgcccgccgcctttacctgcctgctgtcgtcatgaacggccacgtgcacgacctccagatcctcgactttccacccatcagcgccttccctgtcaatacgctccaggagtgggcagacacctgctgcaggggactccggagtgtccacgcctacatcctggtctacgacatctgctgctttgacagctttgagtacgtcaagaccatccgccagcagatcctggagacgagggtgatcggaacctcagagacgcccatcatcatcgtgggcaacaagcgggacctgcagcgcggacgcgtgatcccgcgctggaacgtgtcgcacctggtacgcaagacctggaagtgcggctacgtggaatgctcggccaagtacaactggcacatcctgctgctcttcagcgagctgctcaagagcgtcggctgcgcccgttgcaagcacgtgcacgctgccctgcgcttccagggcgcgctgcgccgcaaccgctgcgccatcatgtgacgcctgcgcgcccctcgggctgcaccggcactggccgagcggagggcggggccgtactgcggggctggggcggggagcgggcgggaaatggaactgtgacggtcccggcctgaggcccctgcagccacgcacctcccggtgagaagcagagcgcgagagggagccctccgtaactgcccagccctgccccttgcccccgtggcttcctgggacagccgccttcagtgctgtatttagtgcagtgcccggcccgacccgcgggggtgccacagccttttgggatgggggtgagcgtgcaatggaggctgggggtggcgaggtgccgccttggccgggcccccacgtgtcttctccagaatgtgtctgtctttgcctggtgtcttcctttcccgtgtccgcccaccccagcgtctgttggtacttacctgtctcacctaccctccagtcccctcccagctccgctcacagggctctcatttcgtccatccccttgtcgcagatcctggcagcttctttgtgaggccaggccttctgactgtcagcaccaccggcacagggcagagatgcgggtggcccaaggaccacgatcaaggggtccgggggaccgaggtcccagatcagtgaggggagaaggttgagctctccggcttccagggagacctccccgcccagcagcccccagagacacaacaacctaccttccagccttaactcgatggtccgtccctgccaggtgcccctcactcttcctgaccccaaagccagatcaccccctgggttaaaactttttttctttttttttttggacagagtgtggaaagggagccccccaaaggatagcttctttttcatgatgccaggctccagtcctttattcccttctgcatactgcaatctgatctgtcagactggggaatgttgggttctggggtctggtcgtgggcaggatggtgcccagaagggggttaggttgtcccagtgaaaattctgttgccccgtctcaaccccatctgactaccccagactctgcctgcctcagatctcagactatcctgattaatctggggaagaacagagccagggaaagaatggtggggacccctgtacttgggggagacacacctgcatcttcctcctgccacagatggaggccctcaggatctgacaccctcttgtcccaacaccagtcagccctataccctaactcactccaccccattttctccggctgcctggccgggtttctacctctcgtcaccggagctgatcactgtcagttttgtaccgatttagaaataacaataataatgaagattctaggaatggcatgagggattgatgggggacttggagggagggacaagtggtgccctgtcccctgctcccctggccaaagaaagctgtccttgaggctgagccctcagccctggcctggtggggggacagcaaggtcccttgttataagaggggcagagaggacaactccgctttggccaacctagccaaggctgcagcatatagaccaggaaatcaggtagcccagactggtgatggagcagagtctgggggaagggtcgtgggtggggaatttatcaccaacatccattgtagggggaatctatgattctgcttccccagcggattcccactctgtccaccaagtggggggtagcacagcctcacagcaaccgccctgaccttgggcagtctagtgttcctgcattctagtccctgctgtgctgcaggactttgggcaagtgacctgccctctgtgagcctccctctgacacagaggaggtggctccccttccccacaccttagagtggctgggagggtaacaaagagggcctgcccctttagtctccttctccttccacccgctcccagggtttcccaccacagggtctggaagtgtgtgtgacgcccattgagctgttacccgaagtcagattaaaaatcagggagtgttttccctcgtttctgtaaaaaaaaaatg

SEQ ID NO: 445260 - DNA, 2956 bp, Homo sapiens
caagcagaggcagcaatggttggtcctgacggtggctgagcccccagcccctggaatatgcagcccgggggagccccagacagcggcaaggacgaggtggcggagtggggcgggaggcatggtctccacctaccgggtggccgtgctgggggcgcgaggtgtgggcaagagtgccatcgtgcgccagttcttgtacaacgagttcagcgaggtctgcgtccccaccaccgcccgccgcctttacctgcctgctgtcgtcatgaacggccacgtgcacgacctccagatcctcgactttccacccatcagcgccttccctgtcaatacgctccaggagtgggcagacacctgctgcaggggactccggagtgtccacgcctacatcctggtctacgacatctgctgctttgacagctttgagtacgtcaagaccatccgccagcagatcctggagacgagggtgatcggaacctcagagacgcccatcatcatcgtgggcaacaagcgggacctgcagcgcggacgcgtgatcccgcgctggaacgtgtcgcacctggtacgcaagacctggaagtgcggctacgtggaatgctcggccaagtacaactggcacatcctgctgctcttcagcgagctgctcaagagcgtcggctgcgcccgttgcaagcacgtgcacgctgccctgcgcttccagggcgcgctgcgccgcaaccgctgcgccatcatgtgacgcctgcgcgcccctcgggctgcaccggcactggccgagcggagggcggggccgtactgcggggctggggcggggagcgggcgggaaatggaactgtgacggtcccggcctgaggcccctgcagccacgcacctcccggtgagaagcagagcgcgagagggagccctccgtaactgcccagccctgccccttgcccccgtggcttcctgggacagccgccttcagtgctgtatttagtgcagtgcccggcccgacccgcgggggtgccacagccttttgggatgggggtgagcgtgcaatggaggctgggggtggcgaggtgccgccttggccgggcccccacgtgtcttctccagaatgtgtctgtctttgcctggtgtcttcctttcccgtgtccgcccaccccagcgtctgttggtacttacctgtctcacctaccctccagtcccctcccagctccgctcacagggctctcatttcgtccatccccttgtcgcagatcctggcagcttctttgtgaggccaggccttctgactgtcagcaccaccggcacagggcagagatgcgggtggcccaaggaccacgatcaaggggtccgggggaccgaggtcccagatcagtgaggggagaaggttgagctctccggcttccagggagacctccccgcccagcagcccccagagacacaacaacctaccttccagccttaactcgatggtccgtccctgccaggtgcccctcactcttcctgaccccaaagccagatcaccccctgggttaaaactttttttctttttttttttggacagagtgtggaaagggagccccccaaaggatagcttctttttcatgatgccaggctccagtcctttattcccttctgcatactgcaatctgatctgtcagactggggaatgttgggttctggggtctggtcgtgggcaggatggtgcccagaagggggttaggttgtcccagtgaaaattctgttgccccgtctcaaccccatctgactaccccagactctgcctgcctcagatctcagactatcctgattaatctggggaagaacagagccagggaaagaatggtggggacccctgtacttgggggagacacacctgcatcttcctcctgccacagatggaggccctcaggatctgacaccctcttgtcccaacaccagtcagccctataccctaactcactccaccccattttctccggctgcctggccgggtttctacctctcgtcaccggagctgatcactgtcagttttgtaccgatttagaaataacaataataatgaagattctaggaatggcatgagggattgatgggggacttggagggagggacaagtggtgccctgtcccctgctcccctggccaaagaaagctgtccttgaggctgagccctcagccctggcctggtggggggacagcaaggtcccttgttataagaggggcagagaggacaactccgctttggccaacctagccaaggctgcagcatatagaccaggaaatcaggtagcccagactggtgatggagcagagtctgggggaagggtcgtgggtggggaatttatcaccaacatccattgtagggggaatctatgattctgcttccccagcggattcccactctgtccaccaagtggggggtagcacagcctcacagcaaccgccctgaccttgggcagtctagtgttcctgcattctagtccctgctgtgctgcaggactttgggcaagtgacctgccctctgtgagcctccctctgacacagaggaggtggctccccttccccacaccttagagtggctgggagggtaacaaagagggcctgcccctttagtctcctgcacccctgccccctggttcaccagagggagcggatgaaggatggcagcatctcacatgccccatcaccaactctgaggcacctggggtgggggggcggagcccaggcctctggctgctcccctgtgggagccattggaatgtatcccctgacaggcccccttccgcctccacctcaacccaggtcttggatttcaggtccctccacccccattctgagtctctgtccttctccttccacccgctcccagggtttcccaccacagggtctggaagtgtgtgtgacgcccattgagctgttacccgaagtcagattaaaaatcagggagtgttttccctcgtttctgtaaaaaaaaaatg

SEQ ID NO: 445261 - DNA, 1003 bp, Homo sapiens
  misc_feature (75)..(75): n is a, c, g, or t
  misc_feature (84)..(85): n is a, c, g, or t
  misc_feature (88)..(89): n is a, c, g, or t
  misc_feature (102)..(102): n is a, c, g, or t
  misc_feature (109)..(109): n is a, c, g, or t
  misc_feature (123)..(123): n is a, c, g, or t
ttctgcctcttatccccggaaactagacagatacgattcgactcgtaccatcttcaaaccggaagaatagtgcgnaacatatcnncanncaccaggcattcngctccgnatatggtgtactgngagctatgacaaattttgatgtgacttacaattggattcaagataaatgtgttcctcttgtccgagaaataacatttgaaaatggagaggaattgacagaagaaggactgccttttctcatactctttcacatgaaagaagatacagaaagtttagaaatattccagaatgaagtagctcggcaattaataagtgaaaaaggtacaataaactttttacatgccgattgtgacaaatttagacatcctcttctgcacatacagaaaactccagcagattgtcctgtaatcgctattgacagctttaggcatatgtatgtgtttggagacttcaaagatgtattaattcctggaaaactcaagcaattcgtatttgacttacattctggaaaactgcacagagaattccatcatggacctgacccaactgatacagccccaggagagcaagcccaagatgtagcaagcagtccacctgagagctccttccagaaactagcacccagtgaatataggtatactctattgagggatcgagatgagctttaaaaacttgaaaaacagtttgtaagcctttcaacagcagcatcaacctacgtggtggaaatagtaaacctatattttcataattctatgtgtatttttattttgaataaacagaaagaaatttaaaaaaaaagaacatagggtacttacccaacacaaatggacagaaggattagactttctaaagactttttttgtggacattttgacatttggagaccaaggatggctcactagcccagataatagtttttctgcctggaattttttgcagtttgatttgcctgcgcctgacctcttgaaatggttatttttagaagagttgggacatttac

SEQ ID NO: 445262 - DNA, 475 bp, Homo sapiens
gaatgtatagtactagtggttaaacagagtacgaggggcacggcagcttcagaattcctggaaaactcaagcaattcgtatttgacttacattctggaaaactgcacagagaattccatcatggacctgacccaactgatacagccccaggagagcaagcccaagatgtagcaagcagtccacctgagagctccttccagaaactagcacccagtgaatataggtatactctattgagggatcgagatgagctttaaaaacttgaaaaacagtttgtaagcctttcaacagcagcatcaacctacgtggtggaaatagtaaacctatattttcataattctatgtgtatttttattttgaataaacagaaagaaatttcccgaaaaaaaaacatcggccctcgctggcctaaaaaatcccgcctacgttggtctaatcgtgtggaagctctgacgaccgatttcccttctatgag

SEQ ID NO: 445263 - DNA, 854 bp, Homo sapiens
  misc_feature (75)..(75): n is a, c, g, or t
  misc_feature (84)..(85): n is a, c, g, or t
  misc_feature (88)..(89): n is a, c, g, or t
  misc_feature (102)..(102): n is a, c, g, or t
  misc_feature (109)..(109): n is a, c, g, or t
  misc_feature (123)..(123): n is a, c, g, or t
ttctgcctcttatccccggaaactagacagatacgattcgactcgtaccatcttcaaaccggaagaatagtgcgnaacatatcnncanncaccaggcattcngctccgnatatggtgtactgngagctatgacaaattttgatgtgacttacaattggattcaagataaatgtgttcctcttgtccgagaaataacatttgaaaatggagaggaattgacagaagaaggactgccttttctcatactctttcacatgaaagaagatacagaaagtttagaaatattccagaatgaagtagctcggcaattaataagtgaaaaaggtacaataaactttttacatgccgattgtgacaaatttagacatcctcttctgcacatacagaaaactccagcagattgtcctgtaatcgctattgacagctttaggcatatgtatgtgtttggagacttcaaagatgtattaattcctggaaaactcaagcaattcgtatttgacttacattctggaaaactgcacagagaattccatcatggacctgacccaactgatacagccccaggagagcaagcccaagatgtagcaagcagtccacctgagagctccttccagaaactagcacccagtgaatataggtatactctattgagggatcgagatgagctttaaaaacttgaaaaacagtttgtaagcctttcaacagcagcatcaacctacgtggtggaaatagtaaacctatattttcataattctatgtgtatttttattttgaataaacagaaagaaattttgggtttttaatttttttctccccgactcaaaatgcattgtcatttaatatagtagcctctt

SEQ ID NO: 445264 - DNA, 1578 bp, Homo sapiens
ctgggagtcgcccgaaggtcgctcatcctgtatagcgcacatactgacgtccaattcctggaaaactcaagcaattcgtatttgacttacattctggaaaactgcacagagaattccatcatggacctgacccaactgatacagccccaggagagcaagcccaagatgtagcaagcagtccacctgagagctccttccagaaactagcacccagtgaatataggtatactctattgagggatcgagatgagctttaaaaacttgaaaaacagtttgtaagcctttcaacagcagcatcaacctacgtggtggaaatagtaaacctatattttcataattctatgtgtatttttattttgaataaacagaaagaaattttgggtttttaatttttttctccccgactcaaaatgcattgtcatttaatatagtagcctcttaaaaaaaaaaaaaacctgctaggatttaaaaataaaaatcagaggcctatctccactttaaatctgtcctgtaaaagttttataaatcaaatgaaaggtgacattgccagaaacttaccattaacttgcactactagggtagggaggacttagggatgtttcctgtgtcgtatgtgcttttctttctttcatatgatcaattctgttggtattttcagtatctcatttctcaaagctaaagagatatacattctggatacttgggaggggaataaattaaagttttcacactgtgtactgtgttttactgattggttggatattgcttatgaaaattccatagtggtatttttttggattcttaatgtgtaacttaaacatactttgaagtggaggagagtcataagacagaacatttggcaggaattgtccttatgaaacaagaaaaagaaaatgaaaagtattattaagcttctgtgtttgtctaaaaatgtggcatatggatggcatttaaaactttgaatgaattatacctaaatctgggacagggaggtgacagtggaacaggctaccaatcagaactagatgacttttaaggctcctcctattatgagacttcaatttccaaagagaagaactagcagagaaattgtatttcagtaattttaagctccttctgtcttgtagagtcttgttatagttgtataaatcaaaaacacagaataaggaacatatttaactttttttcattataaaatggttagaggaccctaccccctctagattccctgatttccccaggcctgcagcatacagtaagatgggtccctgtgccaggcctcaatactgccagggaataaaaccagagggagaggaccctcagtgtcatatcaggaagcccagtgccagaggacagacaggttcaaaactggcttttcctctgggcctgggttggtgctataggccaagggtcattttatacttgggtataaatcaatcccagtttgggaaaagattatttttaagcttaaaaggctgacatgtgccattatatgtagtatgtaatatatgtaacatcttccaattcttttaaaataaaattaatatttataatggatatttaatgattgttattttt

SEQ ID NO: 445265 - DNA, 2022 bp, Homo sapiens
cggcctcccaaagtgctgggattatgccttttctttaaaattcttggaaatagctcgtttcactgtgtatttttgtctgctcttggtacacaagtaaaatactacagaaattaatttctttcagcattgaagtgtttgctttcctctttatttcaactaagttgtaataatttctggtatcctggtaattgataactaagataatatctacagagtggatgccattaattctcttagcagtcacgtgcagaagggaagggtttgggccaacctagggttgtgctgtctctgtcgactagtctaggaaagcacccaggtgtcaggtattttggtcccttccaccacacctcagcaaatgtaaaacaagcccacagttaatggccctgtggcaaccctgccctggagaatctcaataagagcatttgaaatgaggaaagcaagatttcacatttaaatatcttgctttggcacacagttgcttttattgattaataagcaaataattataggggaactactattcatcgaatacacttattaaaatattatagcaccataaactatattggtataaaaatgttttattctttcttttgtagcaagcccaagatgtagcaagcagtccacctgagagctccttccagaaactagcacccagtgaatataggtatactctattgagggatcgagatgagctttaaaaacttgaaaaacagtttgtaagcctttcaacagcagcatcaacctacgtggtggaaatagtaaacctatattttcataattctatgtgtatttttattttgaataaacagaaagaaattttgggtttttaatttttttctccccgactcaaaatgcattgtcatttaatatagtagcctcttaaaaaaaaaaaaaacctgctaggatttaaaaataaaaatcagaggcctatctccactttaaatctgtcctgtaaaagttttataaatcaaatgaaaggtgacattgccagaaacttaccattaacttgcactactagggtagggaggacttagggatgtttcctgtgtcgtatgtgcttttctttctttcatatgatcaattctgttggtattttcagtatctcatttctcaaagctaaagagatatacattctggatacttgggaggggaataaattaaagttttcacactgtgtactgtgttttactgattggttggatattgcttatgaaaattccatagtggtatttttttggattcttaatgtgtaacttaaacatactttgaagtggaggagagtcataagacagaacatttggcaggaattgtccttatgaaacaagaaaaagaaaatgaaaagtattattaagcttctgtgtttgtctaaaaatgtggcatatggatggcatttaaaactttgaatgaattatacctaaatctgggacagggaggtgacagtggaacaggctaccaatcagaactagatgacttttaaggctcctcctattatgagacttcaatttccaaagagaagaactagcagagaaattgtatttcagtaattttaagctccttctgtcttgtagagtcttgttatagttgtataaatcaaaaacacagaataaggaacatatttaactttttttcattataaaatggttagaggaccctaccccctctagattccctgatttccccaggcctgcagcatacagtaagatgggtccctgtgccaggcctcaatactgccagggaataaaaccagagggagaggaccctcagtgtcatatcaggaagcccagtgccagaggacagacaggttcaaaactggcttttcctctgggcctgggttggtgctataggccaagggtcattttatacttgggtataaatcaatcccagtttgggaaaagattatttttaagcttaaaaggctgacatgtgccattatatgtagtatgtaatatatgtaacatcttccaattcttttaaaataaaattaatatttataatggatatttaatgattgttattttt

SEQ ID NO: 445266 - DNA, 792 bp, Homo sapiens
  misc_feature (75)..(75): n is a, c, g, or t
  misc_feature (84)..(85): n is a, c, g, or t
  misc_feature (88)..(89): n is a, c, g, or t
  misc_feature (102)..(102): n is a, c, g, or t
  misc_feature (109)..(109): n is a, c, g, or t
  misc_feature (123)..(123): n is a, c, g, or t
ttctgcctcttatccccggaaactagacagatacgattcgactcgtaccatcttcaaaccggaagaatagtgcgnaacatatcnncanncaccaggcattcngctccgnatatggtgtactgngagctatgacaaattttgatgtgacttacaattggattcaagataaatgtgttcctcttgtccgagaaataacatttgaaaatggagaggaattgacagaagaaggactgccttttctcatactctttcacatgaaagaagatacagaaagtttagaaatattccagaatgaagtagctcggcaattaataagtgaaaaaggtacaataaactttttacatgccgattgtgacaaatttagacatcctcttctgcacatacagaaaactccagcagattgtcctgtaatcgctattgacagctttaggcatatgtatgtgtttggagacttcaaagatgtattaattcctggaaaactcaagcaattcgtatttgacttacattctggaaaactgcacagagaattccatcatggacctgacccaactgatacagccccaggagagcaagcccaagatgtagcaagcagtccacctgagagctccttccagaaactagcacccagtgaatataggtatactctattgagggatcgagatgagctttaaaaacttgaaaaacagtttgtaagcctttcaacagcagcatcaacctacgtggtggaaatagtaaacctatattttcataattctatgtgtatttttattttgaataaacagaaagaaattt

SEQ ID NO: 445267 - DNA, 1992 bp, Homo sapiens
  misc_feature (75)..(75): n is a, c, g, or t
  misc_feature (84)..(85): n is a, c, g, or t
  misc_feature (88)..(89): n is a, c, g, or t
  misc_feature (102)..(102): n is a, c, g, or t
  misc_feature (109)..(109): n is a, c, g, or t
  misc_feature (123)..(123): n is a, c, g, or t
ttctgcctcttatccccggaaactagacagatacgattcgactcgtaccatcttcaaaccggaagaatagtgcgnaacatatcnncanncaccaggcattcngctccgnatatggtgtactgngagctatgacaaattttgatgtgacttacaattggattcaagataaatgtgttcctcttgtccgagaaataacatttgaaaatggagaggaattgacagaagaaggactgccttttctcatactctttcacatgaaagaagatacagaaagtttagaaatattccagaatgaagtagctcggcaattaataagtgaaaaaggtacaataaactttttacatgccgattgtgacaaatttagacatcctcttctgcacatacagaaaactccagcagattgtcctgtaatcgctattgacagctttaggcatatgtatgtgtttggagacttcaaagatgtattaattcctggaaaactcaagcaattcgtatttgacttacattctggaaaactgcacagagaattccatcatggacctgacccaactgatacagccccaggagagcaagcccaagatgtagcaagcagtccacctgagagctccttccagaaactagcacccagtgaatataggtatactctattgagggatcgagatgagctttaaaaacttgaaaaacagtttgtaagcctttcaacagcagcatcaacctacgtggtggaaatagtaaacctatattttcataattctatgtgtatttttattttgaataaacagaaagaaattttgggtttttaatttttttctccccgactcaaaatgcattgtcatttaatatagtagcctcttaaaaaaaaaaaaaacctgctaggatttaaaaataaaaatcagaggcctatctccactttaaatctgtcctgtaaaagttttataaatcaaatgaaaggtgacattgccagaaacttaccattaacttgcactactagggtagggaggacttagggatgtttcctgtgtcgtatgtgcttttctttctttcatatgatcaattctgttggtattttcagtatctcatttctcaaagctaaagagatatacattctggatacttgggaggggaataaattaaagttttcacactgtgtactgtgttttactgattggttggatattgcttatgaaaattccatagtggtatttttttggattcttaatgtgtaacttaaacatactttgaagtggaggagagtcataagacagaacatttggcaggaattgtccttatgaaacaagaaaaagaaaatgaaaagtattattaagcttctgtgtttgtctaaaaatgtggcatatggatggcatttaaaactttgaatgaattatacctaaatctgggacagggaggtgacagtggaacaggctaccaatcagaactagatgacttttaaggctcctcctattatgagacttcaatttccaaagagaagaactagcagagaaattgtatttcagtaattttaagctccttctgtcttgtagagtcttgttatagttgtataaatcaaaaacacagaataaggaacatatttaactttttttcattataaaatggttagaggaccctaccccctctagattccctgatttccccaggcctgcagcatacagtaagatgggtccctgtgccaggcctcaatactgccagggaataaaaccagagggagaggaccctcagtgtcatatcaggaagcccagtgccagaggacagacaggttcaaaactggcttttcctctgggcctgggttggtgctataggccaagggtcattttatacttgggtataaatcaatcccagtttgggaaaagattatttttaagcttaaaaggctgacatgtgccattatatgtagtatgtaatatatgtaacatcttccaattcttttaaaataaaattaatatttataatggatatttaatgattgttattttt

SEQ ID NO: 445268 - DNA, 941 bp, Homo sapiens
  misc_feature (75)..(75): n is a, c, g, or t
  misc_feature (84)..(85): n is a, c, g, or t
  misc_feature (88)..(89): n is a, c, g, or t
  misc_feature (102)..(102): n is a, c, g, or t
  misc_feature (109)..(109): n is a, c, g, or t
  misc_feature (123)..(123): n is a, c, g, or t
ttctgcctcttatccccggaaactagacagatacgattcgactcgtaccatcttcaaaccggaagaatagtgcgnaacatatcnncanncaccaggcattcngctccgnatatggtgtactgngagctatgacaaattttgatgtgacttacaattggattcaagataaatgtgttcctcttgtccgagaaataacatttgaaaatggagaggaattgacagaagaaggactgccttttctcatactctttcacatgaaagaagatacagaaagtttagaaatattccagaatgaagtagctcggcaattaataagtgaaaaaggtacaataaactttttacatgccgattgtgacaaatttagacatcctcttctgcacatacagaaaactccagcagattgtcctgtaatcgctattgacagctttaggcatatgtatgtgtttggagacttcaaagatgtattaattcctggaaaactcaagcaattcgtatttgacttacattctggaaaactgcacagagaattccatcatggacctgacccaactgatacagccccaggagagcaagcccaagatgtagcaagcagtccacctgagagctccttccagaaactagcacccagtgaatataggtatactctattgagggatcgagatgagctttaaaaacttgaaaaacagtttgtaagcctttcaacagcagcatcaacctacgtggtggaaatagtaaacctatattttcataattctatgtgtatttttattttgaataaacagaaagaaatttttgcacaaaaaacaagaaaatgattgacatggcttcatttgtggtgttgcatgcgctgagggtcctatttctttatacactttcctcggggggtggccacgtccccattgtccctttctgcggtggggtgggactcaccaccctccttt

SEQ ID NO: 445269 - DNA, 3875 bp, Homo sapiens
ctgcccctccccccgcggccgagccggcgcgggcccccgcacctcccccgctcgcgcggcctcgagtccagaagacccgcctccacacaccggggccgccgccgcggagcctcatgggggttggagtccccaaggtttcctttgtgcgcagtattggcggggccttggactaccactcccacaaggcaccgcgcccgcctcccgcgccacgccccctcgccgctggcttccagtcgccacccagactacatttcccgacaggcctcccggctctcccgccctccctcccgagacacgagccgaactgggcgtcaggtcggggagccggtcgggttcccgctcaccgccgccgccgccgccccctgcagccactctcccgcctctaccgccgcgggagctgcatcgtccactccggtcggcggtggaaccgccagtccggggtcacagagcttgagaagcgacgcgctgagccccccatcacctccagcccgggcgacccctcccgggtccgccctcgccctgcgcagccgcccgagcccccagccccgggcggccccgctccagcatcccagctcctgcactctcgcagccgccgccgccccccgcccggaacatggactctgactcttgcgccgccgccttccacccggaggaatactcccccagttgcaagaggcgcaggaccgtggaagacttcaacaaattctgcacctttgtcttggcctatgctggctacatcccttatccgaaggaggaactccctttaaggagcagccccagccctgctaacagcactgctggtaccattgacagcgacggctgggacgcgggtttctcagacatcgcgtcctcagtgcccttgccagtctctgaccgctgctttagccacctgcagcctactctcttgcagcgagccaagcccagtaacttcctgctggacagaaagaaaacggacaagctgaagaagaagaagaagaggaagcgcagggacagtgatgcgcctgggaaagaggggtacagggggggcttgctgaagctggaagccgctgacccctacgtggagacccccacgagtcccaccttgcaggatatcccccaggctcccagcgacccctgctcgggctgggactccgatactccctcgagtggatcttgtgccactgtgtcacctgatcaggtcaaagaaataaaaactgaaggcaaacggactatcgtccggcagggaaagcaggtggtgttccgagatgaggacagcactggcaatgatgaggacatcatggtggactcagatgacgattcctgggacctcgtgacctgcttctgcatgaagccatttgccggccgccccatgatcgagtgtaatgagtgccacacctggattcacctgtcctgtgcgaaaatccggaaatccaatgttccagaagtgtttgtctgccaaaagtgccgggactccaagtttgacatccgccgttccaaccgctcgcggacgggctcccggaagctgttcctggactgactgctggctggcgaggaggctgcgagcgtggaatcggaagcgaccgcgggcttttttgcccttctcttagttgagcacagaaccctcagctctggtgcgggcagatccctgccatttaggtgcctaagcaaaaggacaggctgtccaaggtagaaactgtacatagccggtgaccgaatgcgacctttgccagccagagctgctgccagagctgcgttccctgcagtggaggtggactggacacccacgtgcagcgggtttggctcatttgaaaatgagggtccgtggtagctgtgcgttttgctatcattgctaagagattcccgctgattgggctcagtgccagctgttattctgcttccactgtgttggggagaggtgttcggtttccccagcctgttaatgaacagccatacgtgtaagctttttcttgagtgttaagtcttttaccaaaagtgtctgtacagcagccatccaagttgcccctacttagtggcttgccctctgcctgcctcagctgctgcctgaccggctgggggaggcactggcgggaggcctcgggctcccctggaagggcgctgggctggcgggtcagctggtggttcttaggtttccttctgtttgttaaaagggacaatgtggccacttctctgtggaaagggagttggttggggggttgagatggcccgtgttcataactcagtttcctgttttgcacgatgtaaaaaccctgtctttttgcacgatacagccaaaagtattggctgatttcttgctgagtgccctcttagttggtgtgtgaggtcttggtgggctcaggccagctgtttgcgagtgtgggaactcataggttctgtctttgtctcttcctttcacctcattctggtagcagcataaaggttaggcaatcactgggacccgcatggtgttcctccaaagaatagggtaaaggagagctgggagggagccctctccgttgggtgactcttgtgtgccctttagacaggctggcctgccggttccacagggtacagttaggacttgagtctttctttttctgttttgagttggtgagtgagtgatagggtaacatgggccttcaggatgaccccttggaactgtgccgagttccttaaatctcagctgggatcctggacctgggaggcccctgtgagggccagctctggaaaaacctgggagttgatgccggaggctgtggaagaactctgctcgagggcagggtgccctggaacactggtagttctggggctgggagggagaggggctccggctttctctgaaatgaacactgctcttcagcagttcaagtacttgttctcaaaacattttctaattgattggtaggttttcataagcattgtttctttaaggcatggaaagggaagaatgctcaagcaagtcatgtttgttttcagtgggatgggcccgcgttctcactgctgggggcttccccttcatgtggcacctttgtgccaggccaccaggcagactcttcccaccttctcccactgaagcaccaaggggcttgaaccgtaatttggctaatcagaggcattttttttgtcctagtatctttcacacttgtccaaccgtcttatttttttaaaagttctgttgcttgtattaacacgaaactagagagaaatagtttctgaagccagtttattgtgaagatccccaagggggaggttcggtagagaaaaatagtaagctggtttagaaactgacgagggcaaacagccaggacgcattggagaggaatttgccaaagatctaccctgagataacgcctgtccagtgtcttcaccacgtgaataaccagcgctccaaagtgtttttctgctttgaaaaaaaaaattccacaagcttttaaaggtgcatttaagaatccatgtgactttagaatggaactgccggccctggcaactgtcacgtgtgctagaaggttcgatgcctctggaatgcatgtgatactcatctccattttgtttccttgattgcatttttgttcttttagcagatctgtccctgtgggtggtgtctaagaagtcggacaccttggtttttgtgttagattgagctgggcagctgcaatcagcttctttatatgcaaattaggcacgacccatctgtggttcctggttggtggctaatgaagtgaggggagggagggatgtcaccccaaaagtaggccctcccattggctttggccaggccagacacttcacatcgtttacatggttctgtgtaattttaaagtttatgtgtataaagcgaagctgtttctgtgaaactgtatattttgtaaataaatatattgctactttgaggttcatga

SEQ ID NO: 445270 - DNA, 2877 bp, Homo sapiens
gactcgagttgttctgccaatagaaataacaatccgaatattagtgtcctctgaagacgtactacactcatgagctgtcccatccctcggtttaaaaacagatgctatcccaggacgactaaaccaaacaactccaaaatccctcgagtggatcttgtgccactgtgtcacctgatcaggtcaaagaaataaaaactgaaggcaaacggactatcgtccggcagggaaagcaggtggtgttccgagatgaggacagcactggcaatgatgaggacatcatggtggactcagatgacgattcctgggacctcgtgacctgcttctgcatgaagccatttgccggccgccccatgatcgagtgtaatgagtgccacacctggattcacctgtcctgtgcgaaaatccggaaatccaatgttccagaagtgtttgtctgccaaaagtgccgggactccaagtttgacatccgccgttccaaccgctcgcggacgggctcccggaagctgttcctggactgactgctggctggcgaggaggctgcgagcgtggaatcggaagcgaccgcgggcttttttgcccttctcttagttgagcacagaaccctcagctctggtgcgggcagatccctgccatttaggtgcctaagcaaaaggacaggctgtccaaggtagaaactgtacatagccggtgaccgaatgcgacctttgccagccagagctgctgccagagctgcgttccctgcagtggaggtggactggacacccacgtgcagcgggtttggctcatttgaaaatgagggtccgtggtagctgtgcgttttgctatcattgctaagagattcccgctgattgggctcagtgccagctgttattctgcttccactgtgttggggagaggtgttcggtttccccagcctgttaatgaacagccatacgtgtaagctttttcttgagtgttaagtcttttaccaaaagtgtctgtacagcagccatccaagttgcccctacttagtggcttgccctctgcctgcctcagctgctgcctgaccggctgggggaggcactggcgggaggcctcgggctcccctggaagggcgctgggctggcgggtcagctggtggttcttaggtttccttctgtttgttaaaagggacaatgtggccacttctctgtggaaagggagttggttggggggttgagatggcccgtgttcataactcagtttcctgttttgcacgatgtaaaaaccctgtctttttgcacgatacagccaaaagtattggctgatttcttgctgagtgccctcttagttggtgtgtgaggtcttggtgggctcaggccagctgtttgcgagtgtgggaactcataggttctgtctttgtctcttcctttcacctcattctggtagcagcataaaggttaggcaatcactgggacccgcatggtgttcctccaaagaatagggtaaaggagagctgggagggagccctctccgttgggtgactcttgtgtgccctttagacaggctggcctgccggttccacagggtacagttaggacttgagtctttctttttctgttttgagttggtgagtgagtgatagggtaacatgggccttcaggatgaccccttggaactgtgccgagttccttaaatctcagctgggatcctggacctgggaggcccctgtgagggccagctctggaaaaacctgggagttgatgccggaggctgtggaagaactctgctcgagggcagggtgccctggaacactggtagttctggggctgggagggagaggggctccggctttctctgaaatgaacactgctcttcagcagttcaagtacttgttctcaaaacattttctaattgattggtaggttttcataagcattgtttctttaaggcatggaaagggaagaatgctcaagcaagtcatgtttgttttcagtgggatgggcccgcgttctcactgctgggggcttccccttcatgtggcacctttgtgccaggccaccaggcagactcttcccaccttctcccactgaagcaccaaggggcttgaaccgtaatttggctaatcagaggcattttttttgtcctagtatctttcacacttgtccaaccgtcttatttttttaaaagttctgttgcttgtattaacacgaaactagagagaaatagtttctgaagccagtttattgtgaagatccccaagggggaggttcggtagagaaaaatagtaagctggtttagaaactgacgagggcaaacagccaggacgcattggagaggaatttgccaaagatctaccctgagataacgcctgtccagtgtcttcaccacgtgaataaccagcgctccaaagtgtttttctgctttgaaaaaaaaaattccacaagcttttaaaggtgcatttaagaatccatgtgactttagaatggaactgccggccctggcaactgtcacgtgtgctagaaggttcgatgcctctggaatgcatgtgatactcatctccattttgtttccttgattgcatttttgttcttttagcagatctgtccctgtgggtggtgtctaagaagtcggacaccttggtttttgtgttagattgagctgggcagctgcaatcagcttctttatatgcaaattaggcacgacccatctgtggttcctggttggtggctaatgaagtgaggggagggagggatgtcaccccaaaagtaggccctcccattggctttggccaggccagacacttcacatcgtttacatggttctgtgtaattttaaagtttatgtgtataaagcgaagctgtttctgtgaaactgtatattttgtaaataaatatattgctactttgaggttcatga

SEQ ID NO: 445271 - DNA, 2297 bp, Homo sapiens
cgacgcgctatgtcaaacagcaggctttaaaacgacggcaagtactataacggtctaaggtaagagcaaaaggacaggctgtccaaggtagaaactgtacatagccggtgaccgaatgcgacctttgccagccagagctgctgccagagctgcgttccctgcagtggaggtggactggacacccacgtgcagcgggtttggctcatttgaaaatgagggtccgtggtagctgtgcgttttgctatcattgctaagagattcccgctgattgggctcagtgccagctgttattctgcttccactgtgttggggagaggtgttcggtttccccagcctgttaatgaacagccatacgtgtaagctttttcttgagtgttaagtcttttaccaaaagtgtctgtacagcagccatccaagttgcccctacttagtggcttgccctctgcctgcctcagctgctgcctgaccggctgggggaggcactggcgggaggcctcgggctcccctggaagggcgctgggctggcgggtcagctggtggttcttaggtttccttctgtttgttaaaagggacaatgtggccacttctctgtggaaagggagttggttggggggttgagatggcccgtgttcataactcagtttcctgttttgcacgatgtaaaaaccctgtctttttgcacgatacagccaaaagtattggctgatttcttgctgagtgccctcttagttggtgtgtgaggtcttggtgggctcaggccagctgtttgcgagtgtgggaactcataggttctgtctttgtctcttcctttcacctcattctggtagcagcataaaggttaggcaatcactgggacccgcatggtgttcctccaaagaatagggtaaaggagagctgggagggagccctctccgttgggtgactcttgtgtgccctttagacaggctggcctgccggttccacagggtacagttaggacttgagtctttctttttctgttttgagttggtgagtgagtgatagggtaacatgggccttcaggatgaccccttggaactgtgccgagttccttaaatctcagctgggatcctggacctgggaggcccctgtgagggccagctctggaaaaacctgggagttgatgccggaggctgtggaagaactctgctcgagggcagggtgccctggaacactggtagttctggggctgggagggagaggggctccggctttctctgaaatgaacactgctcttcagcagttcaagtacttgttctcaaaacattttctaattgattggtaggttttcataagcattgtttctttaaggcatggaaagggaagaatgctcaagcaagtcatgtttgttttcagtgggatgggcccgcgttctcactgctgggggcttccccttcatgtggcacctttgtgccaggccaccaggcagactcttcccaccttctcccactgaagcaccaaggggcttgaaccgtaatttggctaatcagaggcattttttttgtcctagtatctttcacacttgtccaaccgtcttatttttttaaaagttctgttgcttgtattaacacgaaactagagagaaatagtttctgaagccagtttattgtgaagatccccaagggggaggttcggtagagaaaaatagtaagctggtttagaaactgacgagggcaaacagccaggacgcattggagaggaatttgccaaagatctaccctgagataacgcctgtccagtgtcttcaccacgtgaataaccagcgctccaaagtgtttttctgctttgaaaaaaaaaattccacaagcttttaaaggtgcatttaagaatccatgtgactttagaatggaactgccggccctggcaactgtcacgtgtgctagaaggttcgatgcctctggaatgcatgtgatactcatctccattttgtttccttgattgcatttttgttcttttagcagatctgtccctgtgggtggtgtctaagaagtcggacaccttggtttttgtgttagattgagctgggcagctgcaatcagcttctttatatgcaaattaggcacgacccatctgtggttcctggttggtggctaatgaagtgaggggagggagggatgtcaccccaaaagtaggccctcccattggctttggccaggccagacacttcacatcgtttacatggttctgtgtaattttaaagtttatgtgtataaagcgaagctgtttctgtgaaactgtatattttgtaaataaatatattgctactttgaggttcatga

SEQ ID NO: 445272 - DNA, 3783 bp, Homo sapiens
ctgcccctccccccgcggccgagccggcgcgggcccccgcacctcccccgctcgcgcggcctcgagtccagaagacccgcctccacacaccggggccgccgccgcggagcctcatgggggttggagtccccaaggtttcctttgtgcgcagtattggcggggccttggactaccactcccacaaggcaccgcgcccgcctcccgcgccacgccccctcgccgctggcttccagtcgccacccagactacatttcccgacaggcctcccggctctcccgccctccctcccgagacacgagccgaactgggcgtcaggtcggggagccggtcgggttcccgctcaccgccgccgccgccgccccctgcagccactctcccgcctctaccgccgcgggagctgcatcgtccactccggtcggcggtggaaccgccagtccggggtcacagagcttgagaagcgacgcgctgagccccccatcacctccagcccgggcgacccctcccgggtccgccctcgccctgcgcagccgcccgagcccccagccccgggcggccccgctccagcatcccagctcctgcactctcgcagccgccgccgccccccgcccggaacatggactctgactcttgcgccgccgccttccacccggaggaatactcccccagttgcaagaggcgcaggaccgtggaagacttcaacaaattctgcacctttgtcttggcctatgctggctacatcccttatccgaaggaggaactccctttaaggagcagccccagccctgctaacagcactgctggtaccattgacagcgacggctgggacgcgggtttctcagacatcgcgtcctcagtgcccttgccagtctctgaccgctgctttagccacctgcagcctactctcttgcagcgagccaagcccagtaacttcctgctggacagaaagaaaacggacaagctgaagaagaagaagaagaggaagcgcagggacagtgatgcgcctgggaaagaggggtacagggggggcttgctgaagctggaagccgctgacccctacgtggagacccccacgagtcccaccttgcaggatatcccccaggctcccagcgacccctgctcgggctgggactccgatactccctcgagtggatcttgtgccactgtgtcacctgatcaggtcaaagaaataaaaactgaaggcaaacggactatcgtccggcagggaaagcaggtggtgttccgagatgaggacagcactggcaatgatgaggacatcatggtggactcagatgacgattcctgggacctcgtgacctgcttctgcatgaagccatttgccggccgccccatgatcgagtgtaatgagtgccacacctggattcacctgtcctgtgcgaaaatccggaaatccaatgttccagaagtgtttgtctgccaaaagtgccgggactccaagtttgacatccgccgttccaaccgctcgcggacgggctcccggaagctgttcctggactgactgctggctggcgaggaggctgcgagcgtggaatcggaagcgaccgcgggcttttttgcccttctcttagttgagcacagaaccctcagctctggtgcgggcagatccctgccatttaggtgcctaagcaaaaggacaggctgtccaaggtagaaactgtacatagccggtgaccgaatgcgacctttgccagccagagctgctgccagagctgcgttccctgcagtggaggtggactggacacccacgtgcagcgggtttggctcatttgaaaatgagggtccgtggtagctgtgcgttttgctatcattgctaagagattcccgctgattgggctcagtgccagctgttattctgcttccactgtgttggggagaggtgttcggtttccccagcctgttaatgaacagccatacgtgtaagctttttcttgagtgttaagtcttttaccaaaagtgtctgtacagcagccatccaagttgcccctacttagtggcttgccctctgcctgcctcagctgctgcctgaccggctgggggaggcactggcgggaggcctcgggctcccctggaagggcgctgggctggcgggtcagctggtggttcttaggtttccttctgtttgttaaaagggacaatgtggccacttctctgtggaaagggagttggttggggggttgagatggcccgtgttcataactcagtttcctgttttgcacgatgtaaaaaccctgtctttttgcacgatacagccaaaagtattggctgatttcttgctgagtgccctcattctggtagcagcataaaggttaggcaatcactgggacccgcatggtgttcctccaaagaatagggtaaaggagagctgggagggagccctctccgttgggtgactcttgtgtgccctttagacaggctggcctgccggttccacagggtacagttaggacttgagtctttctttttctgttttgagttggtgagtgagtgatagggtaacatgggccttcaggatgaccccttggaactgtgccgagttccttaaatctcagctgggatcctggacctgggaggcccctgtgagggccagctctggaaaaacctgggagttgatgccggaggctgtggaagaactctgctcgagggcagggtgccctggaacactggtagttctggggctgggagggagaggggctccggctttctctgaaatgaacactgctcttcagcagttcaagtacttgttctcaaaacattttctaattgattggtaggttttcataagcattgtttctttaaggcatggaaagggaagaatgctcaagcaagtcatgtttgttttcagtgggatgggcccgcgttctcactgctgggggcttccccttcatgtggcacctttgtgccaggccaccaggcagactcttcccaccttctcccactgaagcaccaaggggcttgaaccgtaatttggctaatcagaggcattttttttgtcctagtatctttcacacttgtccaaccgtcttatttttttaaaagttctgttgcttgtattaacacgaaactagagagaaatagtttctgaagccagtttattgtgaagatccccaagggggaggttcggtagagaaaaatagtaagctggtttagaaactgacgagggcaaacagccaggacgcattggagaggaatttgccaaagatctaccctgagataacgcctgtccagtgtcttcaccacgtgaataaccagcgctccaaagtgtttttctgctttgaaaaaaaaaattccacaagcttttaaaggtgcatttaagaatccatgtgactttagaatggaactgccggccctggcaactgtcacgtgtgctagaaggttcgatgcctctggaatgcatgtgatactcatctccattttgtttccttgattgcatttttgttcttttagcagatctgtccctgtgggtggtgtctaagaagtcggacaccttggtttttgtgttagattgagctgggcagctgcaatcagcttctttatatgcaaattaggcacgacccatctgtggttcctggttggtggctaatgaagtgaggggagggagggatgtcaccccaaaagtaggccctcccattggctttggccaggccagacacttcacatcgtttacatggttctgtgtaattttaaagtttatgtgtataaagcgaagctgtttctgtgaaactgtatattttgtaaataaatatattgctactttgaggttcatga

SEQ ID NO: 445273 - DNA, 2205 bp, Homo sapiens
cgacgcgctatgtcaaacagcaggctttaaaacgacggcaagtactataacggtctaaggtaagagcaaaaggacaggctgtccaaggtagaaactgtacatagccggtgaccgaatgcgacctttgccagccagagctgctgccagagctgcgttccctgcagtggaggtggactggacacccacgtgcagcgggtttggctcatttgaaaatgagggtccgtggtagctgtgcgttttgctatcattgctaagagattcccgctgattgggctcagtgccagctgttattctgcttccactgtgttggggagaggtgttcggtttccccagcctgttaatgaacagccatacgtgtaagctttttcttgagtgttaagtcttttaccaaaagtgtctgtacagcagccatccaagttgcccctacttagtggcttgccctctgcctgcctcagctgctgcctgaccggctgggggaggcactggcgggaggcctcgggctcccctggaagggcgctgggctggcgggtcagctggtggttcttaggtttccttctgtttgttaaaagggacaatgtggccacttctctgtggaaagggagttggttggggggttgagatggcccgtgttcataactcagtttcctgttttgcacgatgtaaaaaccctgtctttttgcacgatacagccaaaagtattggctgatttcttgctgagtgccctcattctggtagcagcataaaggttaggcaatcactgggacccgcatggtgttcctccaaagaatagggtaaaggagagctgggagggagccctctccgttgggtgactcttgtgtgccctttagacaggctggcctgccggttccacagggtacagttaggacttgagtctttctttttctgttttgagttggtgagtgagtgatagggtaacatgggccttcaggatgaccccttggaactgtgccgagttccttaaatctcagctgggatcctggacctgggaggcccctgtgagggccagctctggaaaaacctgggagttgatgccggaggctgtggaagaactctgctcgagggcagggtgccctggaacactggtagttctggggctgggagggagaggggctccggctttctctgaaatgaacactgctcttcagcagttcaagtacttgttctcaaaacattttctaattgattggtaggttttcataagcattgtttctttaaggcatggaaagggaagaatgctcaagcaagtcatgtttgttttcagtgggatgggcccgcgttctcactgctgggggcttccccttcatgtggcacctttgtgccaggccaccaggcagactcttcccaccttctcccactgaagcaccaaggggcttgaaccgtaatttggctaatcagaggcattttttttgtcctagtatctttcacacttgtccaaccgtcttatttttttaaaagttctgttgcttgtattaacacgaaactagagagaaatagtttctgaagccagtttattgtgaagatccccaagggggaggttcggtagagaaaaatagtaagctggtttagaaactgacgagggcaaacagccaggacgcattggagaggaatttgccaaagatctaccctgagataacgcctgtccagtgtcttcaccacgtgaataaccagcgctccaaagtgtttttctgctttgaaaaaaaaaattccacaagcttttaaaggtgcatttaagaatccatgtgactttagaatggaactgccggccctggcaactgtcacgtgtgctagaaggttcgatgcctctggaatgcatgtgatactcatctccattttgtttccttgattgcatttttgttcttttagcagatctgtccctgtgggtggtgtctaagaagtcggacaccttggtttttgtgttagattgagctgggcagctgcaatcagcttctttatatgcaaattaggcacgacccatctgtggttcctggttggtggctaatgaagtgaggggagggagggatgtcaccccaaaagtaggccctcccattggctttggccaggccagacacttcacatcgtttacatggttctgtgtaattttaaagtttatgtgtataaagcgaagctgtttctgtgaaactgtatattttgtaaataaatatattgctactttgaggttcatga

SEQ ID NO: 445274 - DNA, 3816 bp, Homo sapiens
ctgcccctccccccgcggccgagccggcgcgggcccccgcacctcccccgctcgcgcggcctcgagtccagaagacccgcctccacacaccggggccgccgccgcggagcctcatgggggttggagtccccaaggtttcctttgtgcgcagtattggcggggccttggactaccactcccacaaggcaccgcgcccgcctcccgcgccacgccccctcgccgctggcttccagtcgccacccagactacatttcccgacaggcctcccggctctcccgccctccctcccgagacacgagccgaactgggcgtcaggtcggggagccggtcgggttcccgctcaccgccgccgccgccgccccctgcagccactctcccgcctctaccgccgcgggagctgcatcgtccactccggtcggcggtggaaccgccagtccggggtcacagagcttgagaagcgacgcgctgagccccccatcacctccagcccgggcgacccctcccgggtccgccctcgccctgcgcagccgcccgagcccccagccccgggcggccccgctccagcatcccagctcctgcactctcgcagccgccgccgccccccgcccggaacatggactctgactcttgcgccgccgccttccacccggaggaatactcccccagttgcaagaggcgcaggaccgtggaagacttcaacaaattctgcacctttgtcttggcctatgctggctacatcccttatccgaaggaggaactccctttaaggagcagccccagccctgctaacagcactgctggtaccattgacagcgacggctgggacgcgggtttctcagacatcgcgtcctcagtgcccttgccagtctctgaccgctgctttagccacctgcagcctactctcttgcagcgagccaagcccagtaacttcctgctggacagaaagaaaacggacaagctgaagaagaagaagaagaggaagcgcagggacagtgatgcgcctgggaaagaggggtacagggggggcttgctgaagctggaagccgctgacccctacgtggagacccccacgagtcccaccttgcaggatatcccccaggctcccagcgacccctgctcgggctgggactccgatactccctcgagtggatcttgtgccactgtgtcacctgatcaggtcaaagaaataaaaactgaaggcaaacggactatcgtccggcagggaaagcaggtggtgttccgagatgaggacagcactggcaatgatgaggacatcatggtggactcagatgacgattcctgggacctcgtgacctgcttctgcatgaagccatttgccggccgccccatgatcgagtgtaatgagtgccacacctggattcacctgtcctgtgcgaaaatccggaaatccaatgttccagaagtgtttgtctgccaaaagtgccgggactccaagtttgacatccgccgttccaaccgctcgcggacgggctcccggaagctgttcctggactgactgctggctggcgaggaggctgcgagcgtggaatcggaagcgaccgcgggcttttttgcccttctcttagttgagcacagaaccctcagctctggtgcgggcagatccctgccatttaggtgcctaagcaaaaggacaggctgtccaaggtagaaactgtacatagccggtgaccgaatgcgacctttgccagccagagctgctgccagagctgcgttccctgcagtggaggtggactggacacccacgtgcagcgggtttggctcatttgaaaatgagggtccgtggtagctgtgcgttttgctatcattgctaagagattcccgctgattgggctcagtgccagctgttattctgcttccactgtgttggggagaggtgttcggtttccccagcctgttaatgaacagccatacgtgtaagctttttcttgagtgttaagtcttttaccaaaagtgtctgtacagcagccatccaagttgcccctacttagtggcttgccctctgcctgcctcagctgctgcctgaccggctgggggaggcactggcgggaggcctcgggctcccctggaagggcgctgggctggcgggtcagctggtggttcttaggtttccttctgtttgttaaaagggacaatgtggccacttctctgtggaaagggagttggttggggggttgagatggcccgtgttcataactcagtttcctgttttgcacgatgtaaaaaccctgtctttttgcacgatacagccaaaagtattggctgatttcttgctgagtgccctcttagttggtgtgtgaggtcttggtgggctcaggccagctgtttgcgagtgtgggaactcataggttctgtctttgtctcttcctttcacctcattctggtagcagcataaaggttaggcaatcactgggacccgcatggtgttcctccaaagaatagggtaaaggagagctgggagggagccctctccgttgggtgactcttgtgtgccctttagacaggctggcctgccggttccacagggtacagttaggacttgagtctttctttttctgttttgagttggtgagtgagtgatagggtaacatgggccttcaggatgaccccttggaactgtgccgagttccttaaatctcagctgggatcctggacctgggaggcccctgtgagggccagctctggaaaaacctgggagttgatgccggaggctgtggaagaactctgctcgagggcagggtgccctggaacactggtagttctggggctgggagggagaggggctccggctttctctgaaatgaacactgctcttcagcagttcaagtacttgttctcaaaacattttctaattgattggtaggttttcataagcattgtttctttaaggcatggaaagggaagaatgctcaagcaagtcatgtttgttttcagtgggatgggcccgcgttctcactgctgggggcttccccttcatgtggcacctttgtgccaggccaccaggcagactcttcccaccttctcccactgaagcaccaaggggcttgaaccgtaatttggctaatcagaggcattttttttgtcctagtatctttcacacttgtccaaccgtcttatttttttaaaagttctgttgcttgtattaacacgaaactagagagaaatagtttctgaagccagtttattgtgaagatccccaagggggaggttcggtagagaaaaatagtaagctggtttagaaactgacgagggcaaacagccaggacgcattggagaggaatttgccaaagatctaccctgagataacgcctgtccagtgtcttcaccacgtgaataaccagcgctccaaagtgtttttctgctttgaaaaaaaaaattccacaagcttttaaaggtgcatttaagaatccatgtgactttagaatggaactgccggccctggcaactgtcacgtgtgctagaaggttcgatgcctctggaatgcatgtgatactcatctccattttgtttccttgattgcatttttgttcttttagcagattgggcagctgcaatcagcttctttatatgcaaattaggcacgacccatctgtggttcctggttggtggctaatgaagtgaggggagggagggatgtcaccccaaaagtaggccctcccattggctttggccaggccagacacttcacatcgtttacatggttctgtgtaattttaaagtttatgtgtataaagcgaagctgtttctgtgaaactgtatattttgtaaataaatatattgctactttgaggttcatga

SEQ ID NO: 445275 - DNA, 3295 bp, Homo sapiens
ctgcccctccccccgcggccgagccggcgcgggcccccgcacctcccccgctcgcgcggcctcgagtccagaagacccgcctccacacaccggggccgccgccgcggagcctcatgggggttggagtccccaaggtttcctttgtgcgcagtattggcggggccttggactaccactcccacaaggcaccgcgcccgcctcccgcgccacgccccctcgccgctggcttccagtcgccacccagactacatttcccgacaggcctcccggctctcccgccctccctcccgagacacgagccgaactgggcgtcaggtcggggagccggtcgggttcccgctcaccgccgccgccgccgccccctgcagccactctcccgcctctaccgccgcgggagctgcatcgtccactccggtcggcggtggaaccgccagtccggggtcacagagcttgagaagcgacgcgctgagccccccatcacctccagcccgggcgacccctcccgggtccgccctcgccctgcgcagccgcccgagcccccagccccgggcggccccgctccagcatcccagctcctgcactctcgcagccgccgccgccccccgcccggaacatggactctgactcttgcgccgccgccttccacccggaggaatactcccccagttgcaagaggcgcaggaccgtggaagacttcaacaaattctgcacctttgtcttggcctatgctggctacatcccttatccgaaggaggaactccctttaaggagcagccccagccctgctaacagcactgctggtaccattgacagcgacggctgggacgcgggtttctcagacatcgcgtcctcagtgcccttgccagtctctgaccgctgctttagccacctgcagcctactctcttgcagcgagccaagcccagtaacttcctgctggacagaaagaaaacggacaagctgaagaagaagaagaagaggaagcgcagggacagtgatgcgcctgggaaagaggggtacagggggggcttgctgaagctggaagccgctgacccctacgtggagacccccacgagtcccaccttgcaggatatcccccaggctcccagcgacccctgctcgggctgggactccgatactccctcgagtggatcttgtgccactgtgtcacctgatcaggtcaaagaaataaaaactgaaggcaaacggactatcgtccggcagggaaagcaggtggtgttccgagatgaggacagcactggcaatgatgaggacatcatggtggactcagatgacgattcctgggacctcgtgacctgcttctgcatgaagccatttgccggccgccccatgatcgagtgtaatgagtgccacacctggattcacctgtcctgtgcgaaaatccggaaatccaatgttccagaagtgtttgtctgccaaaagtgccgggactccaagtttgacatccgccgttccaaccgctcgcggacgggctcccggaagctgttcctggactgactgctggctggcgaggaggctgcgagcgtggaatcggaagcgaccgcgggcttttttgcccttctcttagttgagcacagaaccctcagctctggtgcgggcagatccctgccatttaggtgcctaagcaaaaggacaggctgtccaaggtagaaactgtacatagccggtgaccgaatgcgacctttgccagccagagctgctgccagagctgcgttccctgcagtggaggtggactggacacccacgtgcagcgggtttggctcatttgaaaatgagggtccgtggtagctgtgcgttttgctatcattgctaagagattcccgctgattgggctcagtgccagctgttattctgcttccactgtgttggggagaggtgttcggtttccccagcctgttaatgaacagccatacgtgtaagctttttcttgagtgttaagtcttttaccaaaagtgtctgtacagcagccatccaagttgcccctacttagtggcttgccctctgcctgcctcagctgctgcctgaccggctgggggaggcactggcgggaggcctcgggctcccctggaagggcgctgggctggcgggtcagctggtggttcttaggtttccttctgtttgttaaaagggacaatgtggccacttctctgtggaaagggagttggttggggggttgagatggcccgtgttcataactcagtttcctgttttgcacgatgtaaaaaccctgtctttttgcacgatacagccaaaagtattggctgatttcttgctgagtgccctcttagttggtgtgtgaggtcttggtgggctcaggccagctgtttgcgagtgtgggaactcataggttctgtctttgtctcttcctttcacctcattctggtagcagcataaaggttaggcaatcactgggacccgcatggtgttcctccaaagaatagggtaaaggagagctgggagggagccctctccgttgggtgactcttgtgtgccctttagacaggctggcctgccggttccacagggtacagttaggacttgagtctttctttttctgttttgagttggtgagtgagtgatagggtaacatgggccttcaggatgaccccttggaactgtgccgagttccttaaatctcagctgggatcctggacctgggaggcccctgtgagggccagctctggaaaaacctgggagttgatgccggaggctgtggaagaactctgctcgagggcagggtgccctggaacactggtagttctggggctgggagggagaggggctccggctttctctgaaatgaacactgctcttcagcagttcaagtacttgttctcaaaacattttctaattgattggtaggttttcataagcattgtttctttaaggcatggaaagggaagaatgctcaagcaagtcatgtttgttttcagtgggatgggcccgcgttctcactgctgggggcttccccttcatgtggcacctttgtgccaggccaccaggcagactcttcccaccttctcccactgaagcaccaaggggcttgaaccgtaatttggctaatcagaggcattttttttgtcctagtatctttcacacttgtccaaccgtcttatttttttaaaagttctgttgcttgtattaacacgaaactagagagaaatagtttctgaagccagtttattgtgaagatccccaagggggaggaggaggaggaggaggaataaggaggaggaggaatgccccaggaggaggaggatgcgcacaggaggagga

SEQ ID NO: 445276 - DNA, 357 bp, Homo sapiens
gttccagcttacttccttttgtttctgtgattccgcctggaagcctctccttcaaacacattcccttttctctccccttaataggaatactcccccagttgcaagaggcgcaggaccgtggaagacttcaacaaattctgcacctttgtcttggcctatgctggctacatcccttatccgaaggaggtaatcttctgagtttctgagacctttcttgatgagtagtcaaacccagtgcctccaccgcaagttcgtgggcttctgactggtcagagggtcagtaggtttggaaggggctgcttgtggtgaccccagtcactagtctggcagaaatctgtttcttgagagtttgaatta

SEQ ID NO: 445277 - DNA, 3914 bp, Homo sapiens
ctgcccctccccccgcggccgagccggcgcgggcccccgcacctcccccgctcgcgcggcctcgagtccagaagacccgcctccacacaccggggccgccgccgcggagcctcatgggggttggagtccccaaggtttcctttgtgcgcagtattggcggggccttggactaccactcccacaaggcaccgcgcccgcctcccgcgccacgccccctcgccgctggcttccagtcgccacccagactacatttcccgacaggcctcccggctctcccgccctccctcccgagacacgagccgaactgggcgtcaggtcggggagccggtcgggttcccgctcaccgccgccgccgccgccccctgcagccactctcccgcctctaccgccgcgggagctgcatcgtccactccggtcggcggtggaaccgccagtccggggtcacagagcttgagaagcgacgcgctgagccccccatcacctccagcccgggcgacccctcccgggtccgccctcgccctgcgcagccgcccgagcccccagccccgggcggccccgctccagcatcccagctcctgcactctcgcagccgccgccgccccccgcccggaacatggactctgactcttgcgccgccgccttccacccggaggaatactcccccagttgcaagaggcgcaggaccgtggaagacttcaacaaattctgcacctttgtcttggcctatgctggctacatcccttatccgaaggaggaactccctttaaggagcagccccagccctgctaacagcactgctggtaccattgacagcgacggctgggacgcgggtttctcagacatcgcgtcctcagtgcccttgccagtctctgaccgctgctttagccacctgcagcctactctcttgcagcgagccaagcccagtaacttcctgctggacagaaagaaaacggacaagctgaagaagaagaagaagaggaagcgcagggacagtgatgcgcctgggaaagaggggtacagggggggcttgctgaagctggaagccgctgacccctacgtggagacccccacgagtcccaccttgcaggatatcccccaggctcccagcgacccctgctcgggctgggactccgatactccctcgagtggatcttgtgccactgtgtcacctgatcaggtcaaagaaataaaaactgaaggcaaacggactatcgtccggcagggaaagcaggtggtgttccgagatgaggacagcactggcaatgatgaggacatcatggtggactcagatgacgattcctgggacctcgtgacctgcttctgcatgaagccatttgccggccgccccatgatcgagtgtaatgagtgccacacctggattcacctgtcctgtgcgaaaatccggaaatccaatgttccagaagtgtttgtctgccaaaagtgccgggactccaagtttgacatccgccgttccaaccgctcgcggacgggctcccggaagctgttcctggactgactgctggctggcgaggaggctgcgagcgtggaatcggaagcgaccgcgggcttttttgcccttctcttagttgagcacagaaccctcagctctggtgcgggcagatccctgccatttaggtgcctaagcaaaaggacaggctgtccaaggtagaaactgtacatagccggtgaccgaatgcgacctttgccagccagagctgctgccagagctgcgttccctgcagtggaggtggactggacacccacgtgcagcgggtttggctcatttgaaaatgagggtccgtggtagctgtgcgttttgctatcattgctaagagattcccgctgattgggctcagtgccagctgttattctgcttccactgtgttggggagaggtgttcggtttccccagcctgttaatgaacagccatacgtgtaagctttttcttgagtgttaagtcttttaccaaaagtgtctgtacagcagccatccaagttgcccctacttagtggcttgccctctgcctgcctcagctgctgcctgaccggctgggggaggcactggcgggaggcctcgggctcccctggaagggcgctgggctggcgggtcagctggtggttcttaggtttccttctgtttgttaaaagggacaatgtggccacttctctgtggaaagggagttggttggggggttgagatggcccgtgttcataactcagtttcctgttttgcacgatgtaaaaaccctgtctttttgcacgatacagccaaaagtattggctgatttcttgctgagtgccctcttagttggtgtgtgaggtcttggtgggctcaggccagctgtttgcgagtgtgggaactcataggttctgtctttgtctcttcctttcacctcattctggtagcagcataaaggttaggcaatcactgggacccgcatggtgttcctccaaagaatagggtaaaggagagctgggagggagccctctccgttgggtgactcttgtgtgccctttagacaggctggcctgccggttccacagggtacagttaggacttgagtctttctttttctgttttgagttggtgagtgagtgatagggtaacatgggccttcaggatgaccccttggaactgtgccgagttccttaaatctcagctgggatcctggacctgggaggcccctgtgagggccagctctggaaaaacctgggagttgatgccggaggctgtggaagaactctgctcgagggcagggtgccctggaacactggtagttctggggctgggagggagaggggctccggctttctctgaaatgaacactgctcttcagcagttcaagtacttgttctcaaaacattttctaattgattggtaggttttcataagcattgtttctttaaggcatggaaagggaagaatgctcaagcaagtcatgtttgttttcagtgggatgggcccgcgttctcactgctgggggcttccccttcatgtggcacctttgtgccaggccaccaggcagactcttcccaccttctcccactgaagcaccaaggggcttgaaccgtaatttggctaatcagaggcattttttttgtcctagtatctttcacacttgtccaaccgtcttatttttttaaaagttctgttgcttgtattaacacgaaactagagagaaatagtttctgaagccagtttattgtgaagatccccaagggggaggttcggtagagaaaaatagtaagctggtttagaaactgacgagggcaaacagccaggacgcattggagaggaatttgccaaagatctaccctgagataacgcctgtccagtgtcttcaccacgtgaataaccagcgctccaaagtgtttttctgctttgaaaaaaaaaattccacaagcttttaaaggtgcatttaagaatccatgtgactttagaatggaactgccggccctggcaactgtcacgtgtgctagaaggttcgatgcctctggaatgcatgtgatactcatctccattttgtttccttgattgcatttttgttcttttagcagatctgtccctgtgggtggtgtctaagaagtcggacaccttggtttttgtgttagattgagctgggcagctgcaatcagcttctttatatgcaaattaggcacgacccatctgtggttcctggttggtggctaatgaagtgaggggagggagggatgtcaccccaaaagtaggccctcccattggctttggccaggccagacacttcacatcgtttacatggttctgtgtaattttaaagtttatgtgtataaagcgaagctgtttctgtgaaactgtatattttgtaaataaatatattgctactttgaggttcatgattcaaggttcaggcgattgcgttctgtgctgaaggaaaa

SEQ ID NO: 445278 - DNA, 4595 bp, Homo sapiens
ctgcccctccccccgcggccgagccggcgcgggcccccgcacctcccccgctcgcgcggcctcgagtccagaagacccgcctccacacaccggggccgccgccgcggagcctcatgggggttggagtccccaaggtttcctttgtgcgcagtattggcggggccttggactaccactcccacaaggcaccgcgcccgcctcccgcgccacgccccctcgccgctggcttccagtcgccacccagactacatttcccgacaggcctcccggctctcccgccctccctcccgagacacgagccgaactgggcgtcaggtcggggagccggtcgggttcccgctcaccgccgccgccgccgccccctgcagccactctcccgcctctaccgccgcgggagctgcatcgtccactccggtcggcggtggaaccgccagtccggggtcacagagcttgagaagcgacgcgctgagccccccatcacctccagcccgggcgacccctcccgggtccgccctcgccctgcgcagccgcccgagcccccagccccgggcggccccgctccagcatcccagctcctgcactctcgcagccgccgccgccccccgcccggaacatggactctgactcttgcgccgccgccttccacccggaggaatactcccccagttgcaagaggcgcaggaccgtggaagacttcaacaaattctgcacctttgtcttggcctatgctggctacatcccttatccgaaggaggaactccctttaaggagcagccccagccctgctaacagcactgctggtaccattgacagcgacggctgggacgcgggtttctcagacatcgcgtcctcagtgcccttgccagtctctgaccgctgctttagccacctgcagcctactctcttgcagcgagccaagcccagtaacttcctgctggacagaaagaaaacggacaagctgaagaagaagaagaagaggaagcgcagggacagtgatgcgcctgggaaagaggggtacagggggggcttgctgaagctggaagccgctgacccctacgtggagacccccacgagtcccaccttgcaggatatcccccaggctcccagcgacccctgctcgggctgggactccgatactccctcgagtggatcttgtgccactgtgtcacctgatcaggtcaaagaaataaaaactgaaggcaaacggactatcgtccggcagggaaagcaggtggtgttccgagatgaggacagcactggcaatgatgaggacatcatggtggactcagatgacgattcctgggacctcgtgacctgcttctgcatgaagccatttgccggccgccccatgatcgagtgtaatgagtgccacacctggattcacctgtcctgtgcgaaaatccggaaatccaatgttccagaagtgtttgtctgccaaaagtgccgggactccaagtttgacatccgccgttccaaccgctcgcggacgggctcccggaagctgttcctggactgactgctggctggcgaggaggctgcgagcgtggaatcggaagcgaccgcgggcttttttgcccttctcttagttgagcacagaaccctcagctctggtgcgggcagatccctgccatttaggtgcctaagcaaaaggacaggctgtccaaggtagaaactgtacatagccggtgaccgaatgcgacctttgccagccagagctgctgccagagctgcgttccctgcagtggaggtggactggacacccacgtgcagcgggtttggctcatttgaaaatgagggtccgtggtagctgtgcgttttgctatcattgctaagagattcccgctgattgggctcagtgccagctgttattctgcttccactgtgttggggagaggtgttcggtttccccagcctgttaatgaacagccatacgtgtaagctttttcttgagtgttaagtcttttaccaaaagtgtctgtacagcagccatccaagttgcccctacttagtggcttgccctctgcctgcctcagctgctgcctgaccggctgggggaggcactggcgggaggcctcgggctcccctggaagggcgctgggctggcgggtcagctggtggttcttaggtttccttctgtttgttaaaagggacaatgtggccacttctctgtggaaagggagttggttggggggttgagatggcccgtgttcataactcagtttcctgttttgcacgatgtaaaaaccctgtctttttgcacgatacagccaaaagtattggctgatttcttgctgagtgccctcttagttggtgtgtgaggtcttggtgggctcaggccagctgtttgcgagtgtgggaactcataggttctgtctttgtctcttcctttcacctcattctggtagcagcataaaggttaggcaatcactgggacccgcatggtgttcctccaaagaatagggtaaaggagagctgggagggagccctctccgttgggtgactcttgtgtgccctttagacaggctggcctgccggttccacagggtacagttaggacttgagtctttctttttctgttttgagttggtgagtgagtgatagggtaacatgggccttcaggatgaccccttggaactgtgccgagttccttaaatctcagctgggatcctggacctgggaggcccctgtgagggccagctctggaaaaacctgggagttgatgccggaggctgtggaagaactctgctcgagggcagggtgccctggaacactggtagttctggggctgggagggagaggggctccggctttctctgaaatgaacactgctcttcagcagttcaagtacttgttctcaaaacattttctaattgattggtaggttttcataagcattgtttctttaaggcatggaaagggaagaatgctcaagcaagtcatgtttgttttcagtgggatgggcccgcgttctcactgctgggggcttccccttcatgtggcacctttgtgccaggccaccaggcagactcttcccaccttctcccactgaagcaccaaggggcttgaaccgtaatttggctaatcagaggcattttttttgtcctagtatctttcacacttgtccaaccgtcttatttttttaaaagttctgttgcttgtattaacacgaaactagagagaaatagtttctgaagccagtttattgtgaagatccccaagggggaggttcggtagagaaaaatagtaagctggtttagaaactgacgagggcaaacagccaggacgcattggagaggaatttgccaaagatctaccctgagataacgcctgtccagtgtcttcaccacgtgaataaccagcgctccaaagtgtttttctgctttgaaaaaaaaaattccacaagcttttaaaggtgcatttaagaatccatgtgactttagaatggaactgccggccctggcaactgtcacgtgtgctagaaggttcgatgcctctggaatgcatgtgatactcatctccattttgtttccttgattgcatttttgttcttttagcagatctgtccctgtgggtggtgtctaagaagtcggacaccttggtttttgtgttagattgagctgggcagctgcaatcagcttctttatatgcaaattaggcacgacccatctgtggttcctggttggtggctaatgaagtgaggggagggagggatgtcaccccaaaagtaggccctcccattggctttggccaggccagacacttcacatcgtttacatggttctgtgtaattttaaagtttatgtgtataaagcgaagctgtttctgtgaaactgtatattttgtaaataaatatattgctactttgaggttcatgaaaaaaaaaaaaaaaaaaaaacctccgagagtttttttttttttttttttttttttttttttttttttttttttttttttttaagaacccccccacaaaagagtggggggaacaccaccagagaagagaaaactccccacccctcttctctttcaaaaggaggcccgaaaggggggggggcgattccgacacagccagaagcgtggtgtgcgtgtgcggttgtctcacgagcagcaaaaccatcatgacggcggcggcagacaagcagcgacatgttgggagcaagaaagcgaggtgcgcgcccaaactagtcgtgggaggaatcgccgctggagagaacccgccggtggggaccaccaagaaatgggttttgggccgcccaaattgtccgcccgagaaaggatggtggaaggaggacgccccaccaaaaccctccagggggggcagtaggcgggcaggtaaactaaacaccccccccgtaatgattgcataaagaagccggcgtgacaacataaggggacgacgggagtaccaaacacacgggggggacgcgcggagatagaaccctgccagaggaacaacagcgtgtccacacaagggcacccaacgagcaaagggggagaacgccgggggacacgcccccaaagcggggggcagcagcggtggaaggcacaacatctcggaaaacctggggcaaaacgtccccgaggctgatgattgt

SEQ ID NO: 445279 - DNA, 3819 bp, Homo sapiens
ctgcccctccccccgcggccgagccggcgcgggcccccgcacctcccccgctcgcgcggcctcgagtccagaagacccgcctccacacaccggggccgccgccgcggagcctcatgggggttggagtccccaaggtttcctttgtgcgcagtattggcggggccttggactaccactcccacaaggcaccgcgcccgcctcccgcgccacgccccctcgccgctggcttccagtcgccacccagactacatttcccgacaggcctcccggctctcccgccctccctcccgagacacgagccgaactgggcgtcaggtcggggagccggtcgggttcccgctcaccgccgccgccgccgccccctgcagccactctcccgcctctaccgccgcgggagctgcatcgtccactccggtcggcggtggaaccgccagtccggggtcacagagcttgagaagcgacgcgctgagccccccatcacctccagcccgggcgacccctcccgggtccgccctcgccctgcgcagccgcccgagcccccagccccgggcggccccgctccagcatcccagctcctgcactctcgcagccgccgccgccccccgcccggaacatggactctgactcttgcgccgccgccttccacccggaggaatactcccccagttgcaagaggcgcaggaccgtggaagacttcaacaaattctgcacctttgtcttggcctatgctggctacatcccttatccgaaggaggaactccctttaaggagcagccccagccctgctaacagcactgctggtaccattgacagcgacggctgggacgcgggtttctcagacatcgcgtcctcagtgcccttgccagtctctgaccgctgctttagccacctgcagcctactctcttgcagcgagccaagcccagtaacttcctgctggacagaaagaaaacggacaagctgaagaagaagaagaagaggaagcgcagggacagtgatgcgcctgggaaagaggggtacagggggggcttgctgaagctggaagccgctgacccctacgtggagacccccacgagtcccaccttgcaggatatcccccaggctcccagcgacccctgctcgggctgggactccgatactccctcgagtggatcttgtgccactgtgtcacctgatcaggtcaaagaaataaaaactgaaggcaaacggactatcgtccggcagggaaagcaggtggtgttccgagatgaggacagcactggcaatgatgaggacatcatggtggactcagatgacgattcctgggacctcgtgacctgcttctgcatgaagccatttgccggccgccccatgatcgagtgtaatgagtgccacacctggattcacctgtcctgtgcgaaaatccggaaatccaatgttccagaagtgtttgtctgccaaaagtgccgggactccaagtttgacatccgccgttccaaccgctcgcggacgggctcccggaagctgttcctggactgactgctggctggcgaggaggctgcgagcgtggaatcggaagcgaccgcgggcttttttgcccttctcttagttgagcacagaaccctcagctctggtgcgggcagatccctgccatttaggtgcctaagcaaaaggacaggctgtccaaggtagaaactgtacatagccggtgaccgaatgcgacctttgccagccagagctgctgccagagctgcgttccctgcagtggaggtggactggacacccacgtgcagcgggtttggctcatttgaaaatgagggtccgtggtagctgtgcgttttgctatcattgctaagagattcccgctgattgggctcagtgccagctgttattctgcttccactgtgttggggagaggtgttcggtttccccagcctgttaatgaacagccatacgtgtaagctttttcttgagtgttaagtcttttaccaaaagtgtctgtacagcagccatccaagttgcccctacttagtggcttgccctctgcctgcctcagctgctgcctgaccggctgggggaggcactggcgggaggcctcgggctcccctggaagggcgctgggctggcgggtcagctggtggttcttaggtttccttctgtttgttaaaagggacaatgtggccacttctctgtggaaagggagttggttggggggttgagatggcccgtgttcataactcagtttcctgttttgcacgatgtaaaaaccctgtctttttgcacgatacagccaaaagtattggctgatttcttgctgagtgccctcttagttggtgtgtgaggtcttggtgggctcaggccagctgtttgcgagtgtgggaactcataggttctgtctttgtctcttcctttcacctcattctggtagcagcataaaggttaggcaatcactgggacccgcatggtgttcctccaaagaatagggtaaaggagagctgggagggagccctctccgttgggtgactcttgtgtgccctttagacaggctggcctgccggttccacagggtacagttaggacttgagtctttctttttctgttttgagttggtgagtgagtgatagggtaacatgggccttcaggatgaccccttggaactgtgccgagttccttaaatctcagctgggatcctggacctgggaggcccctgtgagggccagctctggaaaaacctgggagttgatgccggaggctgtggaagaactctgctcgagggcagggtgccctggaacactggtagttctggggctgggagggagaggggctccggctttctctgaaatgaacactgctcttcagcagttcaagtacttgttctcaaaacattttctaattgattggtaggttttcataagcattgtttctttaaggcatggaaagggaagaatgctcaagcaagtcatgtttgttttcagtgggatgggcccgcgttctcactgctgggggcttccccttcatgtggcacctttgtgccaggccaccaggcagactcttcccaccttctcccactgaagcaccaaggggcttgaaccgtaatttggctaatcagaggcattttttttgtcctagtatctttcacacttgtccaaccgtcttatttttttaaaagttctgttgcttgtattaacacgaaactagagagaaatagtttctgaagccagtttattgtgaagatccccaagggggaggttcggtagagaaaaatagtaagctggtttagaaactgacgagggcaaacagccaggacgcattggagaggaatttgccaaagatctaccctgagataacgcctgtccagtgtcttcaccacgtgaataaccagcgctccaaagtgtttttctgtttagaatggaactgccggccctggcaactgtcacgtgtgctagaaggttcgatgcctctggaatgcatgtgatactcatctccattttgtttccttgattgcatttttgttcttttagcagatctgtccctgtgggtggtgtctaagaagtcggacaccttggtttttgtgttagattgagctgggcagctgcaatcagcttctttatatgcaaattaggcacgacccatctgtggttcctggttggtggctaatgaagtgaggggagggagggatgtcaccccaaaagtaggccctcccattggctttggccaggccagacacttcacatcgtttacatggttctgtgtaattttaaagtttatgtgtataaagcgaagctgtttctgtgaaactgtatattttgtaaataaatatattgctactttgaggttcatga

SEQ ID NO: 445280 - DNA, 945 bp, Homo sapiens
aattgaaacaattggaatacttttaattctactttcacaccctactctcatcccccaaaccatggggctggtggagatagttgatgtctgaaggtataaaagtaatacagctaaggatttttttaaaaaatcatttttaggcctctatagggagcaatatttaacttataatatgaaagcctattaatcagctttcagatattgagcattaaatgacatttttagggatgaagacaacagcaaagttgaatttagaccttgtcaaaatttaaggaggtctccaacattaaggtgttcccaactccccaaaagaatataagtatattcaaataatgagttagcaaagttaccaagtacaatggtgaaagaaaaaaaaagaatacctgcccataagatgttgtgaaaaaatacgaggatcaaacataaaaaaaaaaattcagatgtaaccacccacaaatcagggggccacattcacattcagccaggaaatcttaaggaggagaatttatatctaaagtggttctgggctggttgtgtagagaatataaggttaaaggatatgtacattcaaattgactttcaacttaaaagattgcctacaatccttccaaaggctccactgctcccagtttgatctgccttcatggaatcacagagatagcctatgttggaagccaaagctgtgtaataccctgactataatcatcattctcagtgctttcctttactgttattacctgagtgggaatattaccctggctgaatttggagtccctctctcaccaactgtccagccatttccaaagtgagtttaatgagtattcttatatctctagtgttagcagaagactagacaacagagtgcattgaacaggactctcctgggcaacgctggaacctcagaccagcatgggtcatttgaacccattcaatgaattagcgtct

SEQ ID NO: 445281 - DNA, 333 bp, Homo sapiens
cacaggacacacaaacaggaagagaaagatttgaagacgctacactgctggctttgaaagtggaagaaagggcaaagagaatgcaggtggcctgcagaaagtagaaaacgcaagaaaacagatttctccctacagctttcagaagaaatacaagcctgccaactccttgatttgaagacttctgactttcagaacagttagtagatttgtgttgatttaagccactgcatttatggtaattgatcactgcagccacaggaaaccaatacaggaagtcttatgactcaacccacttgacaaatgaggaaactggggatcagcaaggcacagcag

SEQ ID NO: 445282 - DNA, 727 bp, Homo sapiens
ggcggggcttccggtcgggagggtccgcccgctctcgcgtcctttgctgggtccagacaccggttccgttgcaaacatttttaaagggctggttattcttcctgaaatgagtttggtgattagaaatctgcagcgagtcatccccatcaggagagcgccacttcgcagtaagatcgagattgtaaggaggattttaggagtgcagaaatttgacctggggatcatctgtgttgacaacaagaatattcagcacattaatagaatctacagagatagaaatgtcccaaccgatgtgctttcttttccatttcatgagcatctgaaagcaggtgaatttccccagcctgattttccagatgactacaatttgggagacattttcctaggagtggagtatatcttccatcagtgtaaagaaaatgaagattacaatgacgtcctgactgtgacggccacccacggactctgtcacttgctgggattcacacacggcacggaggcagagtggcagcagatgttccagaaggagaaggcggtgctggacgagctgggccgacgcacggggacccggctgcagcccctgacccggggcctcttcggagggagctgagggccgcgttccttctgaaagcgggacgcgggaggggtggaggctgcggggagccggggtcgcacacaaataaataacgaatgaacgtacgaggggaacctcctcttatttccttca

SEQ ID NO: 445283 - DNA, 759 bp, Homo sapiens
cgctccttccgctccgcccgcctggagtccttctggccggattccgcggcatccttccatagaccctcgttgttgcttcctccttgtggtaaatgttccgttgcaaacatttttaaagggctggttattcttcctgaaatgagtttggtgattagaaatctgcagcgagtcatccccatcaggagagcgccacttcgcagtaagatcgagattgtaaggaggattttaggagtgcagaaatttgacctggggatcatctgtgttgacaacaagaatattcagcacattaatagaatctacagagatagaaatgtcccaaccgatgtgctttcttttccatttcatgagcatctgaaagcaggtgaatttccccagcctgattttccagatgactacaatttgggagacattttcctaggagtggagtatatcttccatcagtgtaaagaaaatgaagattacaatgacgtcctgactgtgacggccacccacggactctgtcacttgctgggattcacacacggcacggaggcagagtggcagcagatgttccagaaggagaaggcggtgctggacgagctgggccgacgcacggggacccggctgcagcccctgacccggggcctcttcggagggagctgagggccgcgttccttctgaaagcgggacgcgggaggggtggaggctgcggggagccggggtcgcacacaaataaataacgaatgaacgtacgaggggaacctcctcttatttccttca

SEQ ID NO: 445284 - DNA, 1768 bp, Homo sapiens
ggcggggcttccggtcgggagggtccgcccgctctcgcgtcctttgctgggtccagacaccggttccgttgcaaacatttttaaagggctggttattcttcctgaaatgagtttggtgattagaaatctgcagcgagtcatccccatcaggagagcgccacttcgcagtaagatcgagattgtaaggaggattttaggagtgcagaaatttgacctggggatcatctgtgttgacaacaagaatattcagcacattaatagaatctacagagatagaaatgtcccaaccgatgtgctttcttttccatttcatgagcatctgaaagcaggtgaatttccccagcctgattttccagatgactacaatttgggagacattttcctaggagtggagtatatcttccatcagtgtaaagaaaatgaagattacaatgacgtcctgactgtaagcggggatgctgaaatcatataacctggctcatggaacatgggccttgcaaaggggtcaagatcacaaccctgcatccatgtgtgtccgtgggtaccgtaagggctactgggggaagaacctgtaagcagggtgtgaggagcacccaggctgggtagggactgcatgccccatgccacagttgaaggagggagagaacacgctgtgaaaacacagaagctcccagagaagccttctcagcttttatctctggagtagagcagactatgttgagctaacacagacctgctgaatcagcttctttctgagctgccagaagtacagaagttggagcctccaccaccttccagatctgtttctcctcagtgtaatccacctatgggttcttcctgcccactgcacagacaaaaccaattcactgcaattgtggtattgcagtagagaaagagtttaacacagagctagccaagcagaaaggctggagttattattcaactcaatctcccagagaactcagaggctacagtttctacaggcaatttggcaggcaggggctagggaatgcctgctgctgatcggctgcagacggaccatggggtgtcaacgatttttgtcccctgagtccgcctctgcgtggagccacgggatcagctgagtcatgagtctcaggtccaggtggagtctgtaggttgccagaactcaaaagtctgaaaaacatcccaaaagaccattcttaggttgtactattgacgttatcttattggggagcaattggggcggtcacaaatctcgtgacctctggctgcgtgagtcctgagcagtagggaattacagcagggcaagctggggaagcaaggcctgcgggctggttctcctcaggacacctacatctgagcagaattcaggcccctcccatcatcctaatcttgtggcccttcacaagcttcacagaggtggcttcggtcttgagcaaggaggggattcgttttagggagggatgattactattcttgatttaaagttaaactctagattaaattcctcccgtggttagcttggcctgtgcccgggactgagtggggacagccacacaagttaaactctagattaaattcctcccgcggttagcctgacccgtgcccgggactcagtggggacagccacgcaagttaaactctagattaaattcctcccgcggttagcctgacccgtgcccgggactcagtggggacagccacgcaagttagactctagattaaattcctcccgcggttagcctgacccgtgcccgggactcagtggagtcagccacacaagtta

SEQ ID NO: 445285 - DNA, 630 bp, Homo sapiens
cgctccttccgctccgcccgcctggagtccttctggccggattccgcggcatccttccatagaccctcgttgttgcttcctccttgtggtaaatgttccgttgcaaacatttttaaagggctggttattcttcctgaaatgagtttggtgattagaaatctgcagcgagtcatccccatcaggagagcgccacttcgcagtaagatcgagattgtaaggaggattttaggagtgcagaaatttgacctggggatcatctgtgttgacaacaagaatattcagcacattaatagaatctacagagatagaaatgtcccaaccgatgtgctttcttttccatttcatgaggtgacggccacccacggactctgtcacttgctgggattcacacacggcacggaggcagagtggcagcagatgttccagaaggagaaggcggtgctggacgagctgggccgacgcacggggacccggctgcagcccctgacccggggcctcttcggagggagctgagggccgcgttccttctgaaagcgggacgcgggaggggtggaggctgcggggagccggggtcgcacacaaataaataacgaatgaacgtacgaggggaacctcctcttatttccttca

SEQ ID NO: 445286 - DNA, 431 bp, Homo sapiens
tgagccctcctcccctcctcccccttcccttcccacctcccatgcccccctttcttcctcccactcccctcccgaggccccgcttattctcccggcctgtggcggttcgtgcactcgctgagctcaggttctggtgaaggtgcccggagccgggtcccgccttcggcctgagctagagccgcgcgggcggccggcttcccccaaaccctgtgggaggggcatcccgaggaggcgaccccagagagtggggcgcggacaccttccctggggagggccagcgcgcttccttccttccagatgttccagaaggagaaggcggtgctggacgagctgggccgacgcacggggacccggctgcagcccctgacccggggcctcttcggagggagctgagggccgcgttccttctgaaagcgggacgcgggaggggt

SEQ ID NO: 445287 - DNA, 607 bp, Homo sapiens
  misc_feature (4)..(4): n is a, c, g, or t
  misc_feature (10)..(10): n is a, c, g, or t
  misc_feature (44)..(44): n is a, c, g, or t
cccnttgggnatttggcctcgaggcaaaaattcgcacgaggcgnccctttcgcgtcctttgctgggtccagacaccggttccgttgcaaacatttttaaagggctggttattcttcctgaaatgagtttggtgattagaaatctgcagcgagtcatccccatcaggagagcgccacttcgcagtaagatcgagattcatctgaaagcaggtgaatttccccagcctgattttccagatgactacaatttgggagacattttcctaggagtggagtatatcttccatcagtgtaaagaaaatgaagattacaatgacgtcctgactgtgacggccacccacggactctgtcacttgctgggattcacacacggcacggaggcagagtggcagcagatgttccagaaggagaaggcggtgctggacgagctgggccgacgcacggggacccggctgcagcccctgacccggggcctcttcggagggagctgagggccgcgttccttctgaaagcgggacgcgggaggggtggaggctgcggggagccggggtcgcacacaaataaataacgaatgaacgtacgaggggaacctcctcttatttccttca

SEQ ID NO: 445288 - DNA, 860 bp, Homo sapiens
ggcggggcttccggtcgggagggtccgcccgctctcgcgtcctttgctgggtccagacaccggttccgttgcaaacatttttaaagggctggttattcttcctgaaatgagtttggtgattagaaatctgcagcgagtcatccccatcaggagagcgccacttcgcagtaagatcgagattgtaaggaggattttaggagtgcagaaatttgacctggggatcatctgtgttgacaacaagaatattcagcacattaatagaatctacagagatagaaatgtcccaaccgatgtgctttcttttccatttcatgagcatctgaaagcaggtgaatttccccagcctgattttccagatgactacaatttgggagacattttcctaggagtggagtatatcttccatcagtgtaaagaaaatgaagattacaatgacgtcctgactgtgacggccacccacggactctgtcacttgctgggattcacacacggcacggaggcagagtggcagcagatgttccagaaggagaaggcggtgctggacgagctgggccgacgcacggggacccggctgcagcccctgacccggggcctcttcggagggagctgagggccgcgttccttctgaaagcgggacgcgggaggggtggaggctgcggggagccggggtcgcacacaaataaataacgaatgaacgtacgaggggaacctcctcttatttccttcaaaaaacaaataaaccaaaaacacactacaccaagtcatttaagaacacaaaaaacggggcgcgccccacaaaaatcccccgggggggcgccaatttccgctacccaccttttgttaaaaagggggcccaggag

SEQ ID NO: 445289 - DNA, 463 bp, Homo sapiens
ggcggggcttccggtcgggagggtccgcccgctctcgcgtcctttgctgggtccagacaccggttccgttgcaaacatttttaaagggctggttattcttcctgaaatgagtttggtgattagaaatctgcagcgagtcatccccatcaggagagcgccacttcgcagtaagatcgagattgtgacggccacccacggactctgtcacttgctgggattcacacacggcacggaggcagagtggcagcagatgttccagaaggagaaggcggtgctggacgagctgggccgacgcacggggacccggctgcagcccctgacccggggcctcttcggagggagctgagggccgcgttccttctgaaagcgggacgcgggaggggtggaggctgcggggagccggggtcgcacacaaataaataacgaatgaacgtacgaggggaacctcctcttatttccttca

SEQ ID NO: 445290 - DNA, 384 bp, Homo sapiens
gtacgtccgggcgggtttttagtctcccaagcgagagcgtcgcattcacccgcgtgggtctgcgggcgccccagaccccagaggacccggcccccaacgcttacctgtcccctctcctgtccctcccccattccagccccttctctccccagccgttgcccctccccgcaccccgccgcgtccgcgcgcctctctccgcgcgcacccccaacccgcccccttttctctgggaaccgctccttccgctccgcccgcctggagtccttctggccggattccgcggcatccttccatagaccctcgttgttgcttcctccttgtggtaaatgtaaattcccttaagattttcaatcagttccaccaaataaagtgatctgattgcgc

SEQ ID NO: 445291 - DNA, 647 bp, Homo sapiens
  misc_feature (110)..(110): n is a, c, g, or t
tccttgccctccgctctcactctggctgggagcagaaggcagcctcggtctctgggcggcggcggcggcccactctgccctggccgcgctgtgtggtgaccgcaggcccnagacatgagggcggcccgtgctctgctgcccctgctgctgcaggcctgctggacagccgcgcaggatgagccggagaccccgagggccgtggccttccaggactgccccgtggacctgttctttgtgctggacacctctgagagcgtggccctgaggctgaagccctacggggccctcgtggacaaagtcaagtccttcaccaagcgcttcatcgacaacctgagggacaggtactaccgctgtgaccgaaacctggtgtggaacgcaggcgcgctgcactacagtgacgaggtggaggccggccgtggtggctcacgcctgtaatcccagcactttgggaggccaaggcgggtggatcacctgaggtcaggagttcgagacaacctgaccatatggtgaaaccttgtctctactaaaaaaacaaaaaatagccaggtgtggtggcgtgcgcctgtaatcccagcttctcaggaagcttgagcaagagaatcgttgaaatcttggagtttggaggtgcattaaaccaaaataccccc

SEQ ID NO: 445292 - DNA, 4237 bp, Homo sapiens
  misc_feature (110)..(110): n is a, c, g, or t
tccttgccctccgctctcactctggctgggagcagaaggcagcctcggtctctgggcggcggcggcggcccactctgccctggccgcgctgtgtggtgaccgcaggcccnagacatgagggcggcccgtgctctgctgcccctgctgctgcaggcctgctggacagccgcgcaggatgagccggagaccccgagggccgtggccttccaggactgccccgtggacctgttctttgtgctggacacctctgagagcgtggccctgaggctgaagccctacggggccctcgtggacaaagtcaagtccttcaccaagcgcttcatcgacaacctgagggacaggtactaccgctgtgaccgaaacctggtgtggaacgcaggcgcgctgcactacagtgacgaggtggagatcatccaaggcctcacgcgcatgcctggcggccgcgacgcactcaaaagcagcgtggacgcggtcaagtactttgggaagggcacctacaccgactgcgctatcaagaaggggctggagcagctcctcgtggggggctcccacctgaaggagaataagtacctgattgtggtgaccgacgggcaccccctggagggctacaaggaaccctgtggggggctggaggatgctgtgaacgaggccaagcacctgggcgtcaaagtcttctcggtggccatcacacccgaccacctggagccgcgtctgagcatcatcgccacggaccacacgtaccggcgcaacttcacggcggctgactggggccagagccgcgacgcagaggaggccatcagccagaccatcgacaccatcgtggacatgatcaaaaataacgtggagcaagtgtgctgctccttcgaatgccagcctgcaagaggacctccggggctccggggcgaccccggctttgagggagaacgaggcaagccggggctcccaggagagaagggagaagccggagatcctggaagacccggggacctcggacctgttgggtaccagggaatgaagggagaaaaagggagccgtggggagaagggctccaggggacccaagggctacaagggagagaagggcaagcgtggcatcgacggggtggacggcgtgaagggggagatggggtacccaggcctgccaggctgcaagggctcgcccgggtttgacggcattcaaggaccccctggccccaagggagaccccggtgcctttggactgaaaggagaaaagggcgagcctggagctgacggggaggcggggagaccagggagctcgggaccatctggagacgagggccagccgggagagcctgggccccccggagagaaaggagaggcgggcgacgaggggaacccaggacctgacggtgcccccggggagcggggtggccctggagagagaggaccacgggggaccccaggcacgcggggaccaagaggagaccctggtgaagctggcccgcagggtgatcagggaagagaaggccccgttggtgtccctggagacccgggcgaggctggccctatcggacctaaaggctaccgaggcgatgagggtcccccagggtccgagggtgccagaggagccccaggacctgccggaccccctggagacccggggctgatgggtgaaaggggagaagacggccccgctggaaatggcaccgagggcttccccggcttccccgggtatccgggcaacaggggcgctcccgggataaacggcacgaagggctaccccggcctcaagggggacgagggagaagccggggaccccggagacgataacaacgacattgcaccccgaggagtcaaaggagcaaaggggtaccggggtcccgagggcccccagggacccccaggacaccaaggaccgcctgggccggacgaatgcgagattttggacatcatcatgaaaatgtgctcttgctgtgaatgcaagtgcggccccatcgacctcctgttcgtgctggacagctcagagagcattggcctgcagaacttcgagattgccaaggacttcgtcgtcaaggtcatcgaccggctgagccgggacgagctggtcaagttcgagccagggcagtcgtacgcgggtgtggtgcagtacagccacagccagatgcaggagcacgtgagcctgcgcagccccagcatccggaacgtgcaggagctcaaggaagccatcaagagcctgcagtggatggcgggcggcaccttcacgggggaggccctgcagtacacgcgggaccagctgctgccgcccagcccgaacaaccgcatcgccctggtcatcactgacgggcgctcagacactcagagggacaccacaccgctcaacgtgctctgcagccccggcatccaggtggtctccgtgggcatcaaagacgtgtttgacttcatcccaggctcagaccagctcaatgtcatttcttgccaaggcctggcaccatcccagggccggcccggcctctcgctggtcaaggagaactatgcagagctgctggaggatgccttcctgaagaatgtcaccgcccagatctgcatagacaagaagtgtccagattacacctgccccatcacgttctcctccccggctgacatcaccatcctgctggacggctccgccagcgtgggcagccacaactttgacaccaccaagcgcttcgccaagcgcctggccgagcgcttcctcacagcgggcaggacggaccccgcccacgacgtgcgggtggcggtggtgcagtacagcggcacgggccagcagcgcccagagcgggcgtcgctgcagttcctgcagaactacacggccctggccagtgccgtcgatgccatggactttatcaacgacgccaccgacgtcaacgatgccctgggctatgtgacccgcttctaccgcgaggcctcgtccggcgctgccaagaagaggctgctgctcttctcagatggcaactcgcagggcgccacgcccgctgccatcgagaaggccgtgcaggaagcccagcgggcaggcatcgagatcttcgtggtggtcgtgggccgccaggtgaatgagccccacatccgcgtcctggtcaccggcaagacggccgagtacgacgtggcctacggcgagagccacctgttccgtgtccccagctaccaggccctgctccgcggtgtcttccaccagacagtctccaggaaggtggcgctgggctagcccaccctgcacgccggcaccaaaccctgtcctcccacccctccccactcatcactaaacagagtaaaatgtgatgcgaattttcccgaccaacctgattcgctagattttttttaaggaaaagcttggaaagccaggacacaacgctgctgcctgctttgtgcagggtcctccggggctcagccctgagttggcatcacctgcgcagggccctctgggggctcagccctgagctagtgtcacctgcacagggccctctggggctcagccctgagctggcgtcacctgtgcagggccctctggggctcagccctgagctggcctcacctgggttccccaccccgggctctcctgccctgccctcctgcccgccctccctcctgcctgcgcagctccttccctaggcacctctgtgctgcgtcccaccagcctgagcaagacgccctctcggggcctgtgccgcactagcctccctctcctctgtccccatagctggtttttcccaccaatcctcacctaacagttactttacaattaaactcaaagcaagctcttctcctcagcttggggcagccattggcctctgtctcgttttgggaaaccaaggtcaggaggccgttgcagacataaatctcggcgactcggccccgtctcctgagggtcctgctggtgaccggcctggaccttggccctacagccctggaggccgctgctgaccagcactgaccccgacctcagagagtactcgcaggggcgctggctgcactcaagaccctcgagattaacggtgctaaccccgtctgctcctccctcccgcagagactggggcctggactggacatgagagccccttggtgccacagagggctgtgtcttactagaaacaacgcaaacctctccttcctcagaatagtgatgtgttcgacgttttatcaaaggccccctttctatgttcatgttagttttgctccttctgtgtttttttctgaaccatatccatgttgctgacttttccaaataaaggttttcactcctc

SEQ ID NO: 445293 - DNA, 3947 bp, Homo sapiens
ggtgttattgatgccaccccaatgcgctcatctgacaacctgagtggacaggtactaccgctgtgaccgaaacctggtgtggaacgcaggcgcgctgcactacagtgacgaggtggagatcatccaaggcctcacgcgcatgcctggcggccgcgacgcactcaaaagcagcgtggacgcggtcaagtactttgggaagggcacctacaccgactgcgctatcaagaaggggctggagcagctcctcgtggggggctcccacctgaaggagaataagtacctgattgtggtgaccgacgggcaccccctggagggctacaaggaaccctgtggggggctggaggatgctgtgaacgaggccaagcacctgggcgtcaaagtcttctcggtggccatcacacccgaccacctggagccgcgtctgagcatcatcgccacggaccacacgtaccggcgcaacttcacggcggctgactggggccagagccgcgacgcagaggaggccatcagccagaccatcgacaccatcgtggacatgatcaaaaataacgtggagcaagtgtgctgctccttcgaatgccagcctgcaagaggacctccggggctccggggcgaccccggctttgagggagaacgaggcaagccggggctcccaggagagaagggagaagccggagatcctggaagacccggggacctcggacctgttgggtaccagggaatgaagggagaaaaagggagccgtggggagaagggctccaggggacccaagggctacaagggagagaagggcaagcgtggcatcgacggggtggacggcgtgaagggggagatggggtacccaggcctgccaggctgcaagggctcgcccgggtttgacggcattcaaggaccccctggccccaagggagaccccggtgcctttggactgaaaggagaaaagggcgagcctggagctgacggggaggcggggagaccagggagctcgggaccatctggagacgagggccagccgggagagcctgggccccccggagagaaaggagaggcgggcgacgaggggaacccaggacctgacggtgcccccggggagcggggtggccctggagagagaggaccacgggggaccccaggcacgcggggaccaagaggagaccctggtgaagctggcccgcagggtgatcagggaagagaaggccccgttggtgtccctggagacccgggcgaggctggccctatcggacctaaaggctaccgaggcgatgagggtcccccagggtccgagggtgccagaggagccccaggacctgccggaccccctggagacccggggctgatgggtgaaaggggagaagacggccccgctggaaatggcaccgagggcttccccggcttccccgggtatccgggcaacaggggcgctcccgggataaacggcacgaagggctaccccggcctcaagggggacgagggagaagccggggaccccggagacgataacaacgacattgcaccccgaggagtcaaaggagcaaaggggtaccggggtcccgagggcccccagggacccccaggacaccaaggaccgcctgggccggacgaatgcgagattttggacatcatcatgaaaatgtgctcttgctgtgaatgcaagtgcggccccatcgacctcctgttcgtgctggacagctcagagagcattggcctgcagaacttcgagattgccaaggacttcgtcgtcaaggtcatcgaccggctgagccgggacgagctggtcaagttcgagccagggcagtcgtacgcgggtgtggtgcagtacagccacagccagatgcaggagcacgtgagcctgcgcagccccagcatccggaacgtgcaggagctcaaggaagccatcaagagcctgcagtggatggcgggcggcaccttcacgggggaggccctgcagtacacgcgggaccagctgctgccgcccagcccgaacaaccgcatcgccctggtcatcactgacgggcgctcagacactcagagggacaccacaccgctcaacgtgctctgcagccccggcatccaggtggtctccgtgggcatcaaagacgtgtttgacttcatcccaggctcagaccagctcaatgtcatttcttgccaaggcctggcaccatcccagggccggcccggcctctcgctggtcaaggagaactatgcagagctgctggaggatgccttcctgaagaatgtcaccgcccagatctgcatagacaagaagtgtccagattacacctgccccatcacgttctcctccccggctgacatcaccatcctgctggacggctccgccagcgtgggcagccacaactttgacaccaccaagcgcttcgccaagcgcctggccgagcgcttcctcacagcgggcaggacggaccccgcccacgacgtgcgggtggcggtggtgcagtacagcggcacgggccagcagcgcccagagcgggcgtcgctgcagttcctgcagaactacacggccctggccagtgccgtcgatgccatggactttatcaacgacgccaccgacgtcaacgatgccctgggctatgtgacccgcttctaccgcgaggcctcgtccggcgctgccaagaagaggctgctgctcttctcagatggcaactcgcagggcgccacgcccgctgccatcgagaaggccgtgcaggaagcccagcgggcaggcatcgagatcttcgtggtggtcgtgggccgccaggtgaatgagccccacatccgcgtcctggtcaccggcaagacggccgagtacgacgtggcctacggcgagagccacctgttccgtgtccccagctaccaggccctgctccgcggtgtcttccaccagacagtctccaggaaggtggcgctgggctagcccaccctgcacgccggcaccaaaccctgtcctcccacccctccccactcatcactaaacagagtaaaatgtgatgcgaattttcccgaccaacctgattcgctagattttttttaaggaaaagcttggaaagccaggacacaacgctgctgcctgctttgtgcagggtcctccggggctcagccctgagttggcatcacctgcgcagggccctctgggggctcagccctgagctagtgtcacctgcacagggccctctggggctcagccctgagctggcgtcacctgtgcagggccctctggggctcagccctgagctggcctcacctgggttccccaccccgggctctcctgccctgccctcctgcccgccctccctcctgcctgcgcagctccttccctaggcacctctgtgctgcgtcccaccagcctgagcaagacgccctctcggggcctgtgccgcactagcctccctctcctctgtccccatagctggtttttcccaccaatcctcacctaacagttactttacaattaaactcaaagcaagctcttctcctcagcttggggcagccattggcctctgtctcgttttgggaaaccaaggtcaggaggccgttgcagacataaatctcggcgactcggccccgtctcctgagggtcctgctggtgaccggcctggaccttggccctacagccctggaggccgctgctgaccagcactgaccccgacctcagagagtactcgcaggggcgctggctgcactcaagaccctcgagattaacggtgctaaccccgtctgctcctccctcccgcagagactggggcctggactggacatgagagccccttggtgccacagagggctgtgtcttactagaaacaacgcaaacctctccttcctcagaatagtgatgtgttcgacgttttatcaaaggccccctttctatgttcatgttagttttgctccttctgtgtttttttctgaaccatatccatgttgctgacttttccaaataaaggttttcactcctc

SEQ ID NO: 445294 - DNA, 4198 bp, Homo sapiens
  misc_feature (110)..(110): n is a, c, g, or t
tccttgccctccgctctcactctggctgggagcagaaggcagcctcggtctctgggcggcggcggcggcccactctgccctggccgcgctgtgtggtgaccgcaggcccnagacatgagggcggcccgtgctctgctgcccctgctgctgcaggcctgctggacagccgcgcaggatgagccggagaccccgagggccgtggccttccaggactgccccgtggacctgttctttgtgctggacacctctgagagcgtggccctgaggctgaagccctacggggccctcgtggacaaagtcaagtccttcaccaagcgcttcatcgacaacctgagggacaggtactaccgctgtgaccgaaacctggtgtggaacgcaggcgcgctgcactacagtgacgaggtggagatcatccaaggcctcacgcgcatgcctggcggccgcgacgcactcaaaagcagcgtggacgcggtcaagtactttgggaagggcacctacaccgactgcgctatcaagaaggggctggagcagctcctcgtggggggctcccacctgaaggagaataagtacctgattgtggtgaccgacgggcaccccctggagggctacaaggaaccctgtggggggctggaggatgctgtgaacgaggccaagcacctgggcgtcaaagtcttctcggtggccatcacacccgaccacctggagccgcgtctgagcatcatcgccacggaccacacgtaccggcgcaacttcacggcggctgactggggccagagccgcgacgcagaggaggccatcagccagaccatcgacaccatcgtggacatgatcaaaaataacgtggagcaagtgtgctgctccttcgaatgccagcctgcaagaggacctccggggctccggggcgaccccggctttgagggagaacgaggcaagccggggctcccaggagagaagggagaagccggagatcctggaagacccggggacctcggacctgttgggtaccagggaatgaagggagaaaaagggagccgtggggagaagggctccaggggacccaagggctacaagggagagaagggcaagcgtggcatcgacggggtggacggcgtgaagggggagatggggtacccaggcctgccaggctgcaagggctcgcccgggtttgacggcattcaaggaccccctggccccaagggagaccccggtgcctttggactgaaaggagaaaagggcgagcctggagctgacggggaggcggggagaccagggagctcgggaccatctggagacgagggccagccgggagagcctgggccccccggagagaaaggagaggcgggcgacgaggggaacccaggacctgacggtgcccccggggagcggggtggccctggagagagaggaccacgggggaccccaggcacgcggggaccaagaggagaccctggtgaagctggcccgcagggtgatcagggaagagaaggccccgttggtgtccctggagacccgggcgaggctggccctatcggacctaaaggctaccgaggcgatgagggtcccccagggtccgagggtgccagaggagccccaggacctgccggaccccctggagacccggggctgatgggtgaaaggggagaagacggccccgctggaaatggcaccgagggcttccccggcttccccgggtatccgggcaacaggggcgctcccgggataaacggcacgaagggctaccccggcctcaagggggacgagggagaagccggggaccccggagacgataacaacgacattgcaccccgaggagtcaaaggagcaaaggggtaccggggtcccgagggcccccagggacccccaggacaccaaggaccgcctgggccggacgaatgcgagattttggacatcatcatgaaaatgtgctcttgctgtgaatgcaagtgcggccccatcgacctcctgttcgtgctggacagctcagagagcattggcctgcagaacttcgagattgccaaggacttcgtcgtcaaggtcatcgaccggctgagccgggacgagctggtcaagttcgagccagggcagtcgtacgcgggtgtggtgcagtacagccacagccagatgcaggagcacgtgagcctgcgcagccccagcatccggaacgtgcaggagctcaaggaagccatcaagagcctgcagtggatggcgggcggcaccttcacgggggaggccctgcagtacacgcgggaccagctgctgccgcccagcccgaacaaccgcatcgccctggtcatcactgacgggcgctcagacactcagagggacaccacaccgctcaacgtgctctgcagccccggcatccaggtggtctccgtgggcatcaaagacgtgtttgacttcatcccaggctcagaccagctcaatgtcatttcttgccaaggcctggcaccatcccagggccggcccggcctctcgctggtcaaggagaactatgcagagctgctggaggatgccttcctgaagaatgtcaccgcccagatctgcatagacaagaagtgtccagattacacctgccccatcacgttctcctccccggctgacatcaccatcctgctggacggctccgccagcgtgggcagccacaactttgacaccaccaagcgcttcgccaagcgcctggccgagcgcttcctcacagcgggcaggacggaccccgcccacgacgtgcgggtggcggtggtgcagtacagcggcacgggccagcagcgcccagagcgggcgtcgctgcagttcctgcagaactacacggccctggccagtgccgtcgatgccatggactttatcaacgacgccaccgacgtcaacgatgccctgggctatgtgacccgcttctaccgcgaggcctcgtccggcgctgccaagaagaggctgctgctcttctcagatggcaactcgcagggcgccacgcccgctgccatcgagaaggccgtgcaggaagcccagcgggcaggcatcgagatcttcgtggtggtcgtgggccgccaggtgaatgagccccacatccgcgtcctggtcaccggcaagacggccgagtacgacgtggcctacggcgagagccacctgttccgtgtccccagctaccaggccctgctccgcggtgtcttccaccagacagtctccaggaaggtggcgctgggctagcccaccctgcacgccggcaccaaaccctgtcctcccacccctccccactcatcactaaacagactagattttttttaaggaaaagcttggaaagccaggacacaacgctgctgcctgctttgtgcagggtcctccggggctcagccctgagttggcatcacctgcgcagggccctctgggggctcagccctgagctagtgtcacctgcacagggccctctggggctcagccctgagctggcgtcacctgtgcagggccctctggggctcagccctgagctggcctcacctgggttccccaccccgggctctcctgccctgccctcctgcccgccctccctcctgcctgcgcagctccttccctaggcacctctgtgctgcgtcccaccagcctgagcaagacgccctctcggggcctgtgccgcactagcctccctctcctctgtccccatagctggtttttcccaccaatcctcacctaacagttactttacaattaaactcaaagcaagctcttctcctcagcttggggcagccattggcctctgtctcgttttgggaaaccaaggtcaggaggccgttgcagacataaatctcggcgactcggccccgtctcctgagggtcctgctggtgaccggcctggaccttggccctacagccctggaggccgctgctgaccagcactgaccccgacctcagagagtactcgcaggggcgctggctgcactcaagaccctcgagattaacggtgctaaccccgtctgctcctccctcccgcagagactggggcctggactggacatgagagccccttggtgccacagagggctgtgtcttactagaaacaacgcaaacctctccttcctcagaatagtgatgtgttcgacgttttatcaaaggccccctttctatgttcatgttagttttgctccttctgtgtttttttctgaaccatatccatgttgctgacttttccaaataaaggttttcactcctc

SEQ ID NO: 445295 - DNA, 3851 bp, Homo sapiens
cagactcggagaggaccatggagctctgctacaacacactgtccaacgtccttgaccatcatgccatctttggaaggacccacaccaccaccagactccagtagcgtatctcatgaccgctatcgggcagcaggagtgctaccttctgttcagcggctgcctccctgaaggaagacagcatcaaggtcttgctgcgcaactcaactaagctagaaagcctcagaggaaagctctgaagaccaggggggatgctgtgaacgaggccaagcacctgggcgtcaaagtcttctcggtggccatcacacccgaccacctggagccgcgtctgagcatcatcgccacggaccacacgtaccggcgcaacttcacggcggctgactggggccagagccgcgacgcagaggaggccatcagccagaccatcgacaccatcgtggacatgatcaaaaataacgtggagcaagtgtgctgctccttcgaatgccagcctgcaagaggacctccggggctccggggcgaccccggctttgagggagaacgaggcaagccggggctcccaggagagaagggagaagccggagatcctggaagacccggggacctcggacctgttgggtaccagggaatgaagggagaaaaagggagccgtggggagaagggctccaggggacccaagggctacaagggagagaagggcaagcgtggcatcgacggggtggacggcgtgaagggggagatggggtacccaggcctgccaggctgcaagggctcgcccgggtttgacggcattcaaggaccccctggccccaagggagaccccggtgcctttggactgaaaggagaaaagggcgagcctggagctgacggggaggcggggagaccagggagctcgggaccatctggagacgagggccagccgggagagcctgggccccccggagagaaaggagaggcgggcgacgaggggaacccaggacctgacggtgcccccggggagcggggtggccctggagagagaggaccacgggggaccccaggcacgcggggaccaagaggagaccctggtgaagctggcccgcagggtgatcagggaagagaaggccccgttggtgtccctggagacccgggcgaggctggccctatcggacctaaaggctaccgaggcgatgagggtcccccagggtccgagggtgccagaggagccccaggacctgccggaccccctggagacccggggctgatgggtgaaaggggagaagacggccccgctggaaatggcaccgagggcttccccggcttccccgggtatccgggcaacaggggcgctcccgggataaacggcacgaagggctaccccggcctcaagggggacgagggagaagccggggaccccggagacgataacaacgacattgcaccccgaggagtcaaaggagcaaaggggtaccggggtcccgagggcccccagggacccccaggacaccaaggaccgcctgggccggacgaatgcgagattttggacatcatcatgaaaatgtgctcttgctgtgaatgcaagtgcggccccatcgacctcctgttcgtgctggacagctcagagagcattggcctgcagaacttcgagattgccaaggacttcgtcgtcaaggtcatcgaccggctgagccgggacgagctggtcaagttcgagccagggcagtcgtacgcgggtgtggtgcagtacagccacagccagatgcaggagcacgtgagcctgcgcagccccagcatccggaacgtgcaggagctcaaggaagccatcaagagcctgcagtggatggcgggcggcaccttcacgggggaggccctgcagtacacgcgggaccagctgctgccgcccagcccgaacaaccgcatcgccctggtcatcactgacgggcgctcagacactcagagggacaccacaccgctcaacgtgctctgcagccccggcatccaggtggtctccgtgggcatcaaagacgtgtttgacttcatcccaggctcagaccagctcaatgtcatttcttgccaaggcctggcaccatcccagggccggcccggcctctcgctggtcaaggagaactatgcagagctgctggaggatgccttcctgaagaatgtcaccgcccagatctgcatagacaagaagtgtccagattacacctgccccatcacgttctcctccccggctgacatcaccatcctgctggacggctccgccagcgtgggcagccacaactttgacaccaccaagcgcttcgccaagcgcctggccgagcgcttcctcacagcgggcaggacggaccccgcccacgacgtgcgggtggcggtggtgcagtacagcggcacgggccagcagcgcccagagcgggcgtcgctgcagttcctgcagaactacacggccctggccagtgccgtcgatgccatggactttatcaacgacgccaccgacgtcaacgatgccctgggctatgtgacccgcttctaccgcgaggcctcgtccggcgctgccaagaagaggctgctgctcttctcagatggcaactcgcagggcgccacgcccgctgccatcgagaaggccgtgcaggaagcccagcgggcaggcatcgagatcttcgtggtggtcgtgggccgccaggtgaatgagccccacatccgcgtcctggtcaccggcaagacggccgagtacgacgtggcctacggcgagagccacctgttccgtgtccccagctaccaggccctgctccgcggtgtcttccaccagacagtctccaggaaggtggcgctgggctagcccaccctgcacgccggcaccaaaccctgtcctcccacccctccccactcatcactaaacagagtaaaatgtgatgcgaattttcccgaccaacctgattcgctagattttttttaaggaaaagcttggaaagccaggacacaacgctgctgcctgctttgtgcagggtcctccggggctcagccctgagttggcatcacctgcgcagggccctctgggggctcagccctgagctagtgtcacctgcacagggccctctggggctcagccctgagctggcgtcacctgtgcagggccctctggggctcagccctgagctggcctcacctgggttccccaccccgggctctcctgccctgccctcctgcccgccctccctcctgcctgcgcagctccttccctaggcacctctgtgctgcgtcccaccagcctgagcaagacgccctctcggggcctgtgccgcactagcctccctctcctctgtccccatagctggtttttcccaccaatcctcacctaacagttactttacaattaaactcaaagcaagctcttctcctcagcttggggcagccattggcctctgtctcgttttgggaaaccaaggtcaggaggccgttgcagacataaatctcggcgactcggccccgtctcctgagggtcctgctggtgaccggcctggaccttggccctacagccctggaggccgctgctgaccagcactgaccccgacctcagagagtactcgcaggggcgctggctgcactcaagaccctcgagattaacggtgctaaccccgtctgctcctccctcccgcagagactggggcctggactggacatgagagccccttggtgccacagagggctgtgtcttactagaaacaacgcaaacctctccttcctcagaatagtgatgtgttcgacgttttatcaaaggccccctttctatgttcatgttagttttgctccttctgtgtttttttctgaaccatatccatgttgctgacttttccaaataaaggttttcactcctc

SEQ ID NO: 445296 - DNA, 3652 bp, Homo sapiens
  misc_feature (110)..(110): n is a, c, g, or t
tccttgccctccgctctcactctggctgggagcagaaggcagcctcggtctctgggcggcggcggcggcccactctgccctggccgcgctgtgtggtgaccgcaggcccnagacatgagggcggcccgtgctctgctgcccctgctgctgcaggcctgctggacagccgcgcaggatgagccggagaccccgagggccgtggccttccaggactgccccgtggacctgttctttgtgctggacacctctgagagcgtggccctgaggctgaagccctacggggccctcgtggacaaagtcaagtccttcaccaagcgcttcatcgacaacctgagggacaggtactaccgctgtgaccgaaacctggtgtggaacgcaggcgcgctgcactacagtgacgaggtggagatcatccaaggcctcacgcgcatgcctggcggccgcgacgcactcaaaagcagcgtggacgcggtcaagtactttgggggagagaagggcaagcgtggcatcgacggggtggacggcgtgaagggggagatggggtacccaggcctgccaggctgcaagggctcgcccgggtttgacggcattcaaggaccccctggccccaagggagaccccggtgcctttggactgaaaggagaaaagggcgagcctggagctgacggggaggcggggagaccagggagctcgggaccatctggagacgagggccagccgggagagcctgggccccccggagagaaaggagaggcgggcgacgaggggaacccaggacctgacggtgcccccggggagcggggtggccctggagagagaggaccacgggggaccccaggcacgcggggaccaagaggagaccctggtgaagctggcccgcagggtgatcagggaagagaaggccccgttggtgtccctggagacccgggcgaggctggccctatcggacctaaaggctaccgaggcgatgagggtcccccagggtccgagggtgccagaggagccccaggacctgccggaccccctggagacccggggctgatgggtgaaaggggagaagacggccccgctggaaatggcaccgagggcttccccggcttccccgggtatccgggcaacaggggcgctcccgggataaacggcacgaagggctaccccggcctcaagggggacgagggagaagccggggaccccggagacgataacaacgacattgcaccccgaggagtcaaaggagcaaaggggtaccggggtcccgagggcccccagggacccccaggacaccaaggaccgcctgggccggacgaatgcgagattttggacatcatcatgaaaatgtgctcttgctgtgaatgcaagtgcggccccatcgacctcctgttcgtgctggacagctcagagagcattggcctgcagaacttcgagattgccaaggacttcgtcgtcaaggtcatcgaccggctgagccgggacgagctggtcaagttcgagccagggcagtcgtacgcgggtgtggtgcagtacagccacagccagatgcaggagcacgtgagcctgcgcagccccagcatccggaacgtgcaggagctcaaggaagccatcaagagcctgcagtggatggcgggcggcaccttcacgggggaggccctgcagtacacgcgggaccagctgctgccgcccagcccgaacaaccgcatcgccctggtcatcactgacgggcgctcagacactcagagggacaccacaccgctcaacgtgctctgcagccccggcatccaggtggtctccgtgggcatcaaagacgtgtttgacttcatcccaggctcagaccagctcaatgtcatttcttgccaaggcctggcaccatcccagggccggcccggcctctcgctggtcaaggagaactatgcagagctgctggaggatgccttcctgaagaatgtcaccgcccagatctgcatagacaagaagtgtccagattacacctgccccatcacgttctcctccccggctgacatcaccatcctgctggacggctccgccagcgtgggcagccacaactttgacaccaccaagcgcttcgccaagcgcctggccgagcgcttcctcacagcgggcaggacggaccccgcccacgacgtgcgggtggcggtggtgcagtacagcggcacgggccagcagcgcccagagcgggcgtcgctgcagttcctgcagaactacacggccctggccagtgccgtcgatgccatggactttatcaacgacgccaccgacgtcaacgatgccctgggctatgtgacccgcttctaccgcgaggcctcgtccggcgctgccaagaagaggctgctgctcttctcagatggcaactcgcagggcgccacgcccgctgccatcgagaaggccgtgcaggaagcccagcgggcaggcatcgagatcttcgtggtggtcgtgggccgccaggtgaatgagccccacatccgcgtcctggtcaccggcaagacggccgagtacgacgtggcctacggcgagagccacctgttccgtgtccccagctaccaggccctgctccgcggtgtcttccaccagacagtctccaggaaggtggcgctgggctagcccaccctgcacgccggcaccaaaccctgtcctcccacccctccccactcatcactaaacagagtaaaatgtgatgcgaattttcccgaccaacctgattcgctagattttttttaaggaaaagcttggaaagccaggacacaacgctgctgcctgctttgtgcagggtcctccggggctcagccctgagttggcatcacctgcgcagggccctctgggggctcagccctgagctagtgtcacctgcacagggccctctggggctcagccctgagctggcgtcacctgtgcagggccctctggggctcagccctgagctggcctcacctgggttccccaccccgggctctcctgccctgccctcctgcccgccctccctcctgcctgcgcagctccttccctaggcacctctgtgctgcgtcccaccagcctgagcaagacgccctctcggggcctgtgccgcactagcctccctctcctctgtccccatagctggtttttcccaccaatcctcacctaacagttactttacaattaaactcaaagcaagctcttctcctcagcttggggcagccattggcctctgtctcgttttgggaaaccaaggtcaggaggccgttgcagacataaatctcggcgactcggccccgtctcctgagggtcctgctggtgaccggcctggaccttggccctacagccctggaggccgctgctgaccagcactgaccccgacctcagagagtactcgcaggggcgctggctgcactcaagaccctcgagattaacggtgctaaccccgtctgctcctccctcccgcagagactggggcctggactggacatgagagccccttggtgccacagagggctgtgtcttactagaaacaacgcaaacctctccttcctcagaatagtgatgtgttcgacgttttatcaaaggccccctttctatgttcatgttagttttgctccttctgtgtttttttctgaaccatatccatgttgctgacttttccaaataaaggttttcactcctc

SEQ ID NO: 445297 - DNA, 2998 bp, Homo sapiens
tacaaatagctgacctagttaggcgggagacaggagctcgggaccatctggagacgaggccagccgggagagcctgggccccccggagagaaaggagaggcgggcgacgaggggaacccaggacctgacggtgcccccggggagcggggtggccctggagagagaggaccacgggggaccccaggcacgcggggaccaagaggagaccctggtgaagctggcccgcagggtgatcagggaagagaaggccccgttggtgtccctggagacccgggcgaggctggccctatcggacctaaaggctaccgaggcgatgagggtcccccagggtccgagggtgccagaggagccccaggacctgccggaccccctggagacccggggctgatgggtgaaaggggagaagacggccccgctggaaatggcaccgagggcttccccggcttccccgggtatccgggcaacaggggcgctcccgggataaacggcacgaagggctaccccggcctcaagggggacgagggagaagccggggaccccggagacgataacaacgacattgcaccccgaggagtcaaaggagcaaaggggtaccggggtcccgagggcccccagggacccccaggacaccaaggaccgcctgggccggacgaatgcgagattttggacatcatcatgaaaatgtgctcttgctgtgaatgcaagtgcggccccatcgacctcctgttcgtgctggacagctcagagagcattggcctgcagaacttcgagattgccaaggacttcgtcgtcaaggtcatcgaccggctgagccgggacgagctggtcaagttcgagccagggcagtcgtacgcgggtgtggtgcagtacagccacagccagatgcaggagcacgtgagcctgcgcagccccagcatccggaacgtgcaggagctcaaggaagccatcaagagcctgcagtggatggcgggcggcaccttcacgggggaggccctgcagtacacgcgggaccagctgctgccgcccagcccgaacaaccgcatcgccctggtcatcactgacgggcgctcagacactcagagggacaccacaccgctcaacgtgctctgcagccccggcatccaggtggtctccgtgggcatcaaagacgtgtttgacttcatcccaggctcagaccagctcaatgtcatttcttgccaaggcctggcaccatcccagggccggcccggcctctcgctggtcaaggagaactatgcagagctgctggaggatgccttcctgaagaatgtcaccgcccagatctgcatagacaagaagtgtccagattacacctgccccatcacgttctcctccccggctgacatcaccatcctgctggacggctccgccagcgtgggcagccacaactttgacaccaccaagcgcttcgccaagcgcctggccgagcgcttcctcacagcgggcaggacggaccccgcccacgacgtgcgggtggcggtggtgcagtacagcggcacgggccagcagcgcccagagcgggcgtcgctgcagttcctgcagaactacacggccctggccagtgccgtcgatgccatggactttatcaacgacgccaccgacgtcaacgatgccctgggctatgtgacccgcttctaccgcgaggcctcgtccggcgctgccaagaagaggctgctgctcttctcagatggcaactcgcagggcgccacgcccgctgccatcgagaaggccgtgcaggaagcccagcgggcaggcatcgagatcttcgtggtggtcgtgggccgccaggtgaatgagccccacatccgcgtcctggtcaccggcaagacggccgagtacgacgtggcctacggcgagagccacctgttccgtgtccccagctaccaggccctgctccgcggtgtcttccaccagacagtctccaggaaggtggcgctgggctagcccaccctgcacgccggcaccaaaccctgtcctcccacccctccccactcatcactaaacagagtaaaatgtgatgcgaattttcccgaccaacctgattcgctagattttttttaaggaaaagcttggaaagccaggacacaacgctgctgcctgctttgtgcagggtcctccggggctcagccctgagttggcatcacctgcgcagggccctctgggggctcagccctgagctagtgtcacctgcacagggccctctggggctcagccctgagctggcgtcacctgtgcagggccctctggggctcagccctgagctggcctcacctgggttccccaccccgggctctcctgccctgccctcctgcccgccctccctcctgcctgcgcagctccttccctaggcacctctgtgctgcgtcccaccagcctgagcaagacgccctctcggggcctgtgccgcactagcctccctctcctctgtccccatagctggtttttcccaccaatcctcacctaacagttactttacaattaaactcaaagcaagctcttctcctcagcttggggcagccattggcctctgtctcgttttgggaaaccaaggtcaggaggccgttgcagacataaatctcggcgactcggccccgtctcctgagggtcctgctggtgaccggcctggaccttggccctacagccctggaggccgctgctgaccagcactgaccccgacctcagagagtactcgcaggggcgctggctgcactcaagaccctcgagattaacggtgctaaccccgtctgctcctccctcccgcagagactggggcctggactggacatgagagccccttggtgccacagagggctgtgtcttactagaaacaacgcaaacctctccttcctcagaatagtgatgtgttcgacgttttatcaaaggccccctttctatgttcatgttagttttgctccttctgtgtttttttctgaaccatatccatgttgctgacttttccaaataaaggttttcactcctc

SEQ ID NO: 445298 - DNA, 4297 bp, Homo sapiens
  misc_feature (110)..(110): n is a, c, g, or t
tccttgccctccgctctcactctggctgggagcagaaggcagcctcggtctctgggcggcggcggcggcccactctgccctggccgcgctgtgtggtgaccgcaggcccnagacatgagggcggcccgtgctctgctgcccctgctgctgcaggcctgctggacagccgcgcaggatgagccggagaccccgagggccgtggccttccaggactgccccgtggacctgttctttgtgctggacacctctgagagcgtggccctgaggctgaagccctacggggccctcgtggacaaagtcaagtccttcaccaagcgcttcatcgacaacctgagggacaggtactaccgctgtgaccgaaacctggtgtggaacgcaggcgcgctgcactacagtgacgaggtggagatcatccaaggcctcacgcgcatgcctggcggccgcgacgcactcaaaagcagcgtggacgcggtcaagtactttgggaagggcacctacaccgactgcgctatcaagaaggggctggagcagctcctcgtggggggctcccacctgaaggagaataagtacctgattgtggtgaccgacgggcaccccctggagggctacaaggaaccctgtggggggctggaggatgctgtgaacgaggccaagcacctgggcgtcaaagtcttctcggtggccatcacacccgaccacctggagccgcgtctgagcatcatcgccacggaccacacgtaccggcgcaacttcacggcggctgactggggccagagccgcgacgcagaggaggccatcagccagaccatcgacaccatcgtggacatgatcaaaaataacgtggagcaagtgtgctgctccttcgaatgccagcctgcaagaggacctccggggctccggggcgaccccggctttgagggagaacgaggcaagccggggctcccaggagagaagggagaagccggagatcctggaagacccggggacctcggacctgttgggtaccagggaatgaagggagaaaaagggagccgtggggagaagggctccaggggacccaagggctacaagggagagaagggcaagcgtggcatcgacggggtggacggcgtgaagggggagatggggtacccaggcctgccaggctgcaagggctcgcccgggtttgacggcattcaaggaccccctggccccaagggagaccccggtgcctttggactgaaaggagaaaagggcgagcctggagctgacggggaggcggggagaccagggagctcgggaccatctggagacgagggccagccgggagagcctgggccccccggagagaaaggagaggcgggcgacgaggggaacccaggacctgacggtgcccccggggagcggggtggccctggagagagaggaccacgggggaccccaggcacgcggggaccaagaggagaccctggtgaagctggcccgcagggtgatcagggaagagaaggccccgttggtgtccctggagacccgggcgaggctggccctatcggacctaaaggctaccgaggcgatgagggtcccccagggtccgagggtgccagaggagccccaggacctgccggaccccctggagacccggggctgatgggtgaaaggggagaagacggccccgctggaaatggcaccgagggcttccccggcttccccgggtatccgggcaacaggggcgctcccgggataaacggcacgaagggctaccccggcctcaagggggacgagggagaagccggggaccccggagacgataacaacgacattgcaccccgaggagtcaaaggagcaaaggggtaccggggtcccgagggcccccagggacccccaggacaccaaggaccgcctgggccggacgaatgcgagattttggacatcatcatgaaaatgtgctcttgctgtgaatgcaagtgcggccccatcgacctcctgttcgtgctggacagctcagagagcattggcctgcagaacttcgagattgccaaggacttcgtcgtcaaggtcatcgaccggctgagccgggacgagctggtcaagttcgagccagggcagtcgtacgcgggtgtggtgcagtacagccacagccagatgcaggagcacgtgagcctgcgcagccccagcatccggaacgtgcaggagctcaaggaagccatcaagagcctgcagtggatggcgggcggcaccttcacgggggaggccctgcagtacacgcgggaccagctgctgccgcccagcccgaacaaccgcatcgccctggtcatcactgacgggcgctcagacactcagagggacaccacaccgctcaacgtgctctgcagccccggcatccaggtggtctccgtgggcatcaaagacgtgtttgacttcatcccaggctcagaccagctcaatgtcatttcttgccaaggcctggcaccatcccagggccggcccggcctctcgctggtcaaggagaactatgcagagctgctggaggatgccttcctgaagaatgtcaccgcccagatctgcatagacaagaagtgtccagattacacctgccccatcacgttctcctccccggctgacatcaccatcctgctggacggctccgccagcgtgggcagccacaactttgacaccaccaagcgcttcgccaagcgcctggccgagcgcttcctcacagcgggcaggacggaccccgcccacgacgtgcgggtggcggtggtgcagtacagcggcacgggccagcagcgcccagagcgggcgtcgctgcagttcctgcagaactacacggccctggccagtgccgtcgatgccatggactttatcaacgacgccaccgacgtcaacgatgccctgggctatgtgacccgcttctaccgcgaggcctcgtccggcgctgccaagaagaggctgctgctcttctcagatggcaactcgcagggcgccacgcccgctgccatcgagaaggccgtgcaggaagcccagcgggcaggcatcgagatcttcgtggtggtcgtgggccgccaggtgaatgagccccacatccgcgtcctggtcaccggcaagacggccgagtacgacgtggcctacggcgagagccacctgttccgtgtccccagctaccaggccctgctccgcggtgtcttccaccagacagtctccaggaaggtggcgctgggctagcccaccctgcacgccggcaccaaaccctgtcctcccacccctccccactcatcactaaacagagtaaaatgtgatgcgaattttcccgaccaacctgattcgctagattttttttaaggaaaagcttggaaagccaggacacaacgctgctgcctgctttgtgcagggtcctccggggctcagccctgagttggcatcacctgcgcagggccctctgggggctcagccctgagctagtgtcacctgcacagggccctctggggctcagccctgagctggcgtcacctgtgcagggccctctggggctcagccctgagctggcctcacctgggttccccaccccgggctctcctgccctgccctcctgcccgccctccctcctgcctgcgcagctccttccctaggcacctctgtgctgcgtcccaccagcctgagcaagacgccctctcggggcctgtgccgcactagcctccctctcctctgtccccatagctggtttttcccaccaatcctcacctaacagttactttacaattaaactcaaagcaagctcttctcctcagcttggggcagccattggcctctgtctcgttttgggaaaccaaggtcaggaggccgttgcagacataaatctcggcgactcggccccgtctcctgagggtcctgctggtgaccggcctggaccttggccctacagccctggaggccgctgctgaccagcactgaccccgacctcagagagtactcgcaggggcgctggctgcactcaagaccctcgagattaacggtgctaaccccgtctgctcctccctcccgcagagactggggcctggactggacatgagagccccttggtgccacagagggctgtgtcttactagaaacaacgcaaacctctccttcctcagaatagtgatgtgttcgacgttttatcaaaggccccctttctatgttcatgttagttttgctccttctgtgtttttttctgaaccatatccatgttgctgacttttccaaataaaggttttcactcctcaaaaaaaaagcacgcggggtgccggattgggggaaagagagtttcgcccgataatgagtg

SEQ ID NO: 445299 - DNA, 4753 bp, Homo sapiens
  misc_feature (110)..(110): n is a, c, g, or t
tccttgccctccgctctcactctggctgggagcagaaggcagcctcggtctctgggcggcggcggcggcccactctgccctggccgcgctgtgtggtgaccgcaggcccnagacatgagggcggcccgtgctctgctgcccctgctgctgcaggcctgctggacagccgcgcaggatgagccggagaccccgagggccgtggccttccaggactgccccgtggacctgttctttgtgctggacacctctgagagcgtggccctgaggctgaagccctacggggccctcgtggacaaagtcaagtccttcaccaagcgcttcatcgacaacctgagggacaggtactaccgctgtgaccgaaacctggtgtggaacgcaggcgcgctgcactacagtgacgaggtggagatcatccaaggcctcacgcgcatgcctggcggccgcgacgcactcaaaagcagcgtggacgcggtcaagtactttgggaagggcacctacaccgactgcgctatcaagaaggggctggagcagctcctcgtggggggctcccacctgaaggagaataagtacctgattgtggtgaccgacgggcaccccctggagggctacaaggaaccctgtggggggctggaggatgctgtgaacgaggccaagcacctgggcgtcaaagtcttctcggtggccatcacacccgaccacctggagccgcgtctgagcatcatcgccacggaccacacgtaccggcgcaacttcacggcggctgactggggccagagccgcgacgcagaggaggccatcagccagaccatcgacaccatcgtggacatgatcaaaaataacgtggagcaagtgtgctgctccttcgaatgccagcctgcaagaggacctccggggctccggggcgaccccggctttgagggagaacgaggcaagccggggctcccaggagagaagggagaagccggagatcctggaagacccggggacctcggacctgttgggtaccagggaatgaagggagaaaaagggagccgtggggagaagggctccaggggacccaagggctacaagggagagaagggcaagcgtggcatcgacggggtggacggcgtgaagggggagatggggtacccaggcctgccaggctgcaagggctcgcccgggtttgacggcattcaaggaccccctggccccaagggagaccccggtgcctttggactgaaaggagaaaagggcgagcctggagctgacggggaggcggggagaccagggagctcgggaccatctggagacgagggccagccgggagagcctgggccccccggagagaaaggagaggcgggcgacgaggggaacccaggacctgacggtgcccccggggagcggggtggccctggagagagaggaccacgggggaccccaggcacgcggggaccaagaggagaccctggtgaagctggcccgcagggtgatcagggaagagaaggccccgttggtgtccctggagacccgggcgaggctggccctatcggacctaaaggctaccgaggcgatgagggtcccccagggtccgagggtgccagaggagccccaggacctgccggaccccctggagacccggggctgatgggtgaaaggggagaagacggccccgctggaaatggcaccgagggcttccccggcttccccgggtatccgggcaacaggggcgctcccgggataaacggcacgaagggctaccccggcctcaagggggacgagggagaagccggggaccccggagacgataacaacgacattgcaccccgaggagtcaaaggagcaaaggggtaccggggtcccgagggcccccagggacccccaggacaccaaggaccgcctgggccggacgaatgcgagattttggacatcatcatgaaaatgtgctcttgctgtgaatgcaagtgcggccccatcgacctcctgttcgtgctggacagctcagagagcattggcctgcagaacttcgagattgccaaggacttcgtcgtcaaggtcatcgaccggctgagccgggacgagctggtcaagttcgagccagggcagtcgtacgcgggtgtggtgcagtacagccacagccagatgcaggagcacgtgagcctgcgcagccccagcatccggaacgtgcaggagctcaaggaagccatcaagagcctgcagtggatggcgggcggcaccttcacgggggaggccctgcagtacacgcgggaccagctgctgccgcccagcccgaacaaccgcatcgccctggtcatcactgacgggcgctcagacactcagagggacaccacaccgctcaacgtgctctgcagccccggcatccaggtggtctccgtgggcatcaaagacgtgtttgacttcatcccaggctcagaccagctcaatgtcatttcttgccaaggcctggcaccatcccagggccggcccggcctctcgctggtcaaggagaactatgcagagctgctggaggatgccttcctgaagaatgtcaccgcccagatctgcatagacaagaagtgtccagattacacctgccccatcacgttctcctccccggctgacatcaccatcctgctggacggctccgccagcgtgggcagccacaactttgacaccaccaagcgcttcgccaagcgcctggccgagcgcttcctcacagcgggcaggacggaccccgcccacgacgtgcgggtggcggtggtgcagtacagcggcacgggccagcagcgcccagagcgggcgtcgctgcagttcctgcagaactacacggccctggccagtgccgtcgatgccatggactttatcaacgacgccaccgacgtcaacgatgccctgggctatgtgacccgcttctaccgcgaggcctcgtccggcgctgccaagaagaggctgctgctcttctcagatggcaactcgcagggcgccacgcccgctgccatcgagaaggccgtgcaggaagcccagcgggcaggcatcgagatcttcgtggtggtcgtgggccgccaggtgaatgagccccacatccgcgtcctggtcaccggcaagacggccgagtacgacgtggcctacggcgagagccacctgttccgtgtccccagctaccaggccctgctccgcggtgtcttccaccagacagtctccaggaaggtggcgctgggctagcccaccctgcacgccggcaccaaaccctgtcctcccacccctccccactcatcactaaacagagtaaaatgtgatgcgaattttcccgaccaacctgattcgctagattttttttaaggaaaagcttggaaagccaggacacaacgctgctgcctgctttgtgcagggtcctccggggctcagccctgagttggcatcacctgcgcagggccctctgggggctcagccctgagctagtgtcacctgcacagggccctctggggctcagccctgagctggcgtcacctgtgcagggccctctggggctcagccctgagctggcctcacctgggttccccaccccgggctctcctgccctgccctcctgcccgccctccctcctgcctgcgcagctccttccctaggcacctctgtgctgcgtcccaccagcctgagcaagacgccctctcggggcctgtgccgcactagcctccctctcctctgtccccatagctggtttttcccaccaatcctcacctaacagttactttacaattaaactcaaagcaagctcttctcctcagcttggggcagccattggcctctgtctcgttttgggaaaccaaggtcaggaggccgttgcagacataaatctcggcgactcggccccgtctcctgagggtcctgctggtgaccggcctggaccttggccctacagccctggaggccgctgctgaccagcactgaccccgacctcagagagtactcgcaggggcgctggctgcactcaagaccctcgagattaacggtgctaaccccgtctgctcctccctcccgcagagactggggcctggactggacatgagagccccttggtgccacagagggctgtgtcttactagaaacaacgcaaacctctccttcctcagaatagtgatgtgttcgacgttttatcaaaggccccctttctatgttcatgttagttttgctccttctgtgtttttttctgaaccatatccatgttgctgacttttccaaataaaggttttcactcctcaaaaaagaaaacaaacaaacacaaacaatacaaaaaaaaaaaaaaaaagaaaacaaacagaagggggggggcgagcgagcgcacacaagaaaaactcaccgcaggaggaggagggcccccaaaagcatgcaccaccgcacagacgcagcgcaattcgtgcgaggaccaaacaggcgcggagacgccaaactaagggagagacagccctacagcgctccaaacacgagccgcagcaaagcgcgctcgcacggcatccaaacaaaaacagcaggccggacgcacgccggcaacccacccgccgcgcaaacgcggcaggcgagacgacccgtggacgcagaggaacgaccccccacaacaacccgggccggggcgaagcaccacaaccgcggcgcgccaacagacccaacccaacgaaagttgacaagcgcccaccccacggggcaccacatcacaacacacccgctcgacggggaccaaccaggccgctcctcacaacagacgggcaaaaaacggcag

SEQ ID NO: 445300 - DNA, 4261 bp, Homo sapiens
  misc_feature (110)..(110): n is a, c, g, or t
  misc_feature (4202)..(4202): n is a, c, g, or t
  misc_feature (4237)..(4237): n is a, c, g, or t
tccttgccctccgctctcactctggctgggagcagaaggcagcctcggtctctgggcggcggcggcggcccactctgccctggccgcgctgtgtggtgaccgcaggcccnagacatgagggcggcccgtgctctgctgcccctgctgctgcaggcctgctggacagccgcgcaggatgagccggagaccccgagggccgtggccttccaggactgccccgtggacctgttctttgtgctggacacctctgagagcgtggccctgaggctgaagccctacggggccctcgtggacaaagtcaagtccttcaccaagcgcttcatcgacaacctgagggacaggtactaccgctgtgaccgaaacctggtgtggaacgcaggcgcgctgcactacagtgacgaggtggagatcatccaaggcctcacgcgcatgcctggcggccgcgacgcactcaaaagcagcgtggacgcggtcaagtactttgggaagggcacctacaccgactgcgctatcaagaaggggctggagcagctcctcgtggggggctcccacctgaaggagaataagtacctgattgtggtgaccgacgggcaccccctggagggctacaaggaaccctgtggggggctggaggatgctgtgaacgaggccaagcacctgggcgtcaaagtcttctcggtggccatcacacccgaccacctggagccgcgtctgagcatcatcgccacggaccacacgtaccggcgcaacttcacggcggctgactggggccagagccgcgacgcagaggaggccatcagccagaccatcgacaccatcgtggacatgatcaaaaataacgtggagcaagtgtgctgctccttcgaatgccagcctgcaagaggacctccggggctccggggcgaccccggctttgagggagaacgaggcaagccggggctcccaggagagaagggagaagccggagatcctggaagacccggggacctcggacctgttgggtaccagggaatgaagggagaaaaagggagccgtggggagaagggctccaggggacccaagggctacaagggagagaagggcaagcgtggcatcgacggggtggacggcgtgaagggggagatggggtacccaggcctgccaggctgcaagggctcgcccgggtttgacggcattcaaggaccccctggccccaagggagaccccggtgcctttggactgaaaggagaaaagggcgagcctggagctgacggggaggcggggagaccagggagctcgggaccatctggagacgagggccagccgggagagcctgggccccccggagagaaaggagaggcgggcgacgaggggaacccaggacctgacggtgcccccggggagcggggtggccctggagagagaggaccacgggggaccccaggcacgcggggaccaagaggagaccctggtgaagctggcccgcagggtgatcagggaagagaaggccccgttggtgtccctggagacccgggcgaggctggccctatcggacctaaaggctaccgaggcgatgagggtcccccagggtccgagggtgccagaggagccccaggacctgccggaccccctggagacccggggctgatgggtgaaaggggagaagacggccccgctggaaatggcaccgagggcttccccggcttccccgggtatccgggcaacaggggcgctcccgggataaacggcacgaagggctaccccggcctcaagggggacgagggagaagccggggaccccggagacgataacaacgacattgcaccccgaggagtcaaaggagcaaaggggtaccggggtcccgagggcccccagggacccccaggacaccaaggaccgcctgggccggacgaatgcgagattttggacatcatcatgaaaatgtgctcttgctgtgaatgcaagtgcggccccatcgacctcctgttcgtgctggacagctcagagagcattggcctgcagaacttcgagattgccaaggacttcgtcgtcaaggtcatcgaccggctgagccgggacgagctggtcaagttcgagccagggcagtcgtacgcgggtgtggtgcagtacagccacagccagatgcaggagcacgtgagcctgcgcagccccagcatccggaacgtgcaggagctcaaggaagccatcaagagcctgcagtggatggcgggcggcaccttcacgggggaggccctgcagtacacgcgggaccagctgctgccgcccagcccgaacaaccgcatcgccctggtcatcactgacgggcgctcagacactcagagggacaccacaccgctcaacgtgctctgcagccccggcatccaggtggtctccgtgggcatcaaagacgtgtttgacttcatcccaggctcagaccagctcaatgtcatttcttgccaaggcctggcaccatcccagggccggcccggcctctcgctggtcaaggagaactatgcagagctgctggaggatgccttcctgaagaatgtcaccgcccagatctgcatagacaagaagtgtccagattacacctgccccatcacgttctcctccccggctgacatcaccatcctgctggacggctccgccagcgtgggcagccacaactttgacaccaccaagcgcttcgccaagcgcctggccgagcgcttcctcacagcgggcaggacggaccccgcccacgacgtgcgggtggcggtggtgcagtacagcggcacgggccagcagcgcccagagcgggcgtcgctgcagttcctgcagaactacacggccctggccagtgccgtcgatgccatggactttatcaacgacgccaccgacgtcaacgatgccctgggctatgtgacccgcttctaccgcgaggcctcgtccggcgctgccaagaagaggctgctgctcttctcagatggcaactcgcagggcgccacgcccgctgccatcgagaaggccgtgcaggaagcccagcgggcaggcatcgagatcttcgtggtggtcgtgggccgccaggtgaatgagccccacatccgcgtcctggtcaccggcaagacggccgagtacgacgtggcctacggcgagagccacctgttccgtgtccccagctaccaggccctgctccgcggtgtcttccaccagacagtctccaggaaggtggcgctgggctagcccaccctgcacgccggcaccaaaccctgtcctcccacccctccccactcatcactaaacagagtaaaatgtgatgcgaattttcccgaccaacctgattcgctagattttttttaaggaaaagcttggaaagccaggacacaacgctgctgcctgctttgtgcagggtcctccggggctcagccctgagttggcatcacctgcgcagggccctctgggggctcagccctgagctagtgtcacctgcacagggccctctggggctcagccctgagctggcgtcacctgtgcagggccctctggggctcagccctgagctggcctcacctgggttccccaccccgggctctcctgccctgccctcctgcccgccctccctcctgcctgcgcagctccttccctaggcacctctgtgctgcgtcccaccagcctgagcaagacgccctctcggggcctgtgccgcactagcctccctctcctctgtccccatagctggtttttcccaccaatcctcacctaacagttactttacaattaaactcaaagcaagctcttctcctcagcttggggcagccattggcctctgtctcgttttgggaaaccaaggtcaggaggccgttgcagacataaatctcggcgactcggccccgtctcctgagggtcctgctggtgaccggcctggaccttggccctacagccctggaggccgctgctgaccagcactgaccccgacctcagagagtactcgcaggggcgctggctgcactcaagaccctcgagattaacggtgctaaccccgtctgctcctccctcccgcagagactggggcctggactggacatgagagccccttggtgccacagagggctgtgtcttactagaaacaacgcaaacctctccttcctcagaatagtgatgtgttcgacgttttatcaaaggccccctttctatgttcatgttagttttgctccttctgtgtttttttcttggaggaaggcccncaattattaaacaacacccgggttgggcctgaacntgtgtttcccaacatagtttttcc

SEQ ID NO: 445301 - DNA, 4222 bp, Homo sapiens
  misc_feature (110)..(110): n is a, c, g, or t
tccttgccctccgctctcactctggctgggagcagaaggcagcctcggtctctgggcggcggcggcggcccactctgccctggccgcgctgtgtggtgaccgcaggcccnagacatgagggcggcccgtgctctgctgcccctgctgctgcaggcctgctggacagccgcgcaggatgagccggagaccccgagggccgtggccttccaggactgccccgtggacctgttctttgtgctggacacctctgagagcgtggccctgaggctgaagccctacggggccctcgtggacaaagtcaagtccttcaccaagcgcttcatcgacaacctgagggacaggtactaccgctgtgaccgaaacctggtgtggaacgcaggcgcgctgcactacagtgacgaggtggagatcatccaaggcctcacgcgcatgcctggcggccgcgacgcactcaaaagcagcgtggacgcggtcaagtactttgggaagggcacctacaccgactgcgctatcaagaaggggctggagcagctcctcgtggggggctcccacctgaaggagaataagtacctgattgtggtgaccgacgggcaccccctggagggctacaaggaaccctgtggggggctggaggatgctgtgaacgaggccaagcacctgggcgtcaaagtcttctcggtggccatcacacccgaccacctggagccgcgtctgagcatcatcgccacggaccacacgtaccggcgcaacttcacggcggctgactggggccagagccgcgacgcagaggaggccatcagccagaccatcgacaccatcgtggacatgatcaaaaataacgtggagcaagtgtgctgctccttcgaatgccagcctgcaagaggacctccggggctccggggcgaccccggctttgagggagaacgaggcaagccggggctcccaggagagaagggagaagccggagatcctggaagacccggggacctcggacctgttgggtaccagggaatgaagggagaaaaagggagccgtggggagaagggctccaggggacccaagggctacaagggagagaagggcaagcgtggcatcgacggggtggacggcgtgaagggggagatggggtacccaggcctgccaggctgcaagggctcgcccgggtttgacggcattcaaggaccccctggccccaagggagaccccggtgcctttggactgaaaggagaaaagggcgagcctggagctgacggggaggcggggagaccagggagctcgggaccatctggagacgagggccagccgggagagcctgggccccccggagagaaaggagaggcgggcgacgaggggaacccaggacctgacggtgcccccggggagcggggtggccctggagagagaggaccacgggggaccccaggcacgcggggaccaagaggagaccctggtgaagctggcccgcagggtgatcagggaagagaaggccccgttggtgtccctggagacccgggcgaggctggccctatcggacctaaaggctaccgaggcgatgagggtcccccagggtccgagggtgccagaggagccccaggacctgccggaccccctggagacccggggctgatgggtgaaaggggagaagacggccccgctggaaatggcaccgagggcttccccggcttccccgggtatccgggcaacaggggcgctcccgggataaacggcacgaagggctaccccggcctcaagggggacgagggagaagccggggaccccggagacgataacaacgacattgcaccccgaggagtcaaaggagcaaaggggtaccggggtcccgagggcccccagggacccccaggacaccaaggaccgcctgggccggacgaatgcgagattttggacatcatcatgaaaatgtgctcttgctgtgaatgcaagtgcggccccatcgacctcctgttcgtgctggacagctcagagagcattggcctgcagaacttcgagattgccaaggacttcgtcgtcaaggtcatcgaccggctgagccgggacgagctggtcaagttcgagccagggcagtcgtacgcgggtgtggtgcagtacagccacagccagatgcaggagcacgtgagcctgcgcagccccagcatccggaacgtgcaggagctcaaggaagccatcaagagcctgcagtggatggcgggcggcaccttcacgggggaggccctgcagtacacgcgggaccagctgctgccgcccagcccgaacaaccgcatcgccctggtcatcactgacgggcgctcagacactcagagggacaccacaccgctcaacgtgctctgcagccccggcatccaggtggtctccgtgggcatcaaagacgtgtttgacttcatcccaggctcagaccagctcaatgtcatttcttgccaaggcctggcaccatcccagggccggcccggcctctcgctggtcaaggagaactatgcagagctgctggaggatgccttcctgaagaatgtcaccgcccagatctgcatagacaagaagtgtccagattacacctgccccatcacgttctcctccccggctgacatcaccatcctgctggacggctccgccagcgtgggcagccacaactttgacaccaccaagcgcttcgccaagcgcctggccgagcgcttcctcacagcgggcaggacggaccccgcccacgacgtgcgggtggcggtggtgcagtacagcggcacgggccagcagcgcccagagcgggcgtcgctgcagttcctgcagaactacacggccctggccagtgccgtcgatgccatggactttatcaacgacgccaccgacgtcaacgatgccctgggctatgtgacccgcttctaccgcgaggcctcgtccggcgctgccaagaagaggctgctgctcttctcagatggcaactcgcagggcgccacgcccgctgccatcgagaaggccgtgcaggaagcccagcgggcaggcatcgagatcttcgtggtggtcgtgggccgccaggtgaatgagccccacatccgcgtcctggtcaccggcaagacggccgagtacgacgtggcctacggcgagagccacctgttccgtgtccccagctaccaggccctgctccgcggtgtcttccaccagacagtctccaggaaggtggcgctgggctagcccaccctgcacgccggcaccaaaccctgtcctcccacccctccccactcatcactaaacagagtaaaatgtgatgcgaattttcccgaccaacctgattcgctagattttttttaaggaaaagcttggaaagccaggacacaacgctgctgcctgctttgtgcagggtcctccggggctcagccctgagttggcatcacctgcgcagggccctctgggggctcagccctgagctagtgtcacctgcacagggccctctggggctcagccctgagctggcgtcacctgtgcagggccctctggggctcagccctgagctggcctcacctgggttccccaccccgggctctcctgccctgccctcctgcccgccctccctcctgcctgcgcagctccttccctaggcacctctgtgctgcgtcccaccagcctgagcaagacgccctctcggggcctgtgccgcactagcctccctctcctctgtccccatagctggtttttcccaccaatcctcacctaacagttactttacaattaaactcaaagcaagctcttctcctcagcttggggcagccattggcctctgtctcgttttgggaaaccaaggtcaggaggccgttgcagacataaatctcggcgactcggccccgtctcctgagggtcctgctggtgaccggcctggaccttggccctacagccctggaggccgctgctgaccagcactgaccccgacctcagagagtactcgcaggggcgctggctgcactcaagaccctcgagattaacggtgctaaccccgtctgctcctccctcccgcagagactggggcctggactggacatgagagccccttggtgccacagagggctgtgtcttactagaaacaacgcaaacctctccttcctcagaatagtgatgtgttcgacgttttatcaaaggccccctttctatgttcatgttagttttagggcatgggatacatgccctgcacgaagtacttgaaggcctcagcgagcttggc

SEQ ID NO: 445302 - DNA, 2087 bp, Homo sapiens
  misc_feature (110)..(110): n is a, c, g, or t
tccttgccctccgctctcactctggctgggagcagaaggcagcctcggtctctgggcggcggcggcggcccactctgccctggccgcgctgtgtggtgaccgcaggcccnagacatgagggcggcccgtgctctgctgcccctgctgctgcaggcctgctggacagccgcgcaggatgagccggagaccccgagggccgtggccttccaggactgccccgtggacctgttctttgtgctggacacctctgagagcgtggccctgaggctgaagccctacggggccctcgtggacaaagtcaagtccttcaccaagcgcttcatcgacaacctgagggacaggtactaccgctgtgaccgaaacctggtgtggaacgcaggcgcgctgcactacagtgacgaggtggagatcatccaaggcctcacgcgcatgcctggcggccgcgacgcactcaaaagcagcgtggacgcggtcaagtactttgggaagggcacctacaccgactgcgctatcaagaaggggctggagcagctcctcgtggggggctcccacctgaaggagaataagtacctgattgtggtgaccgacgggcaccccctggagggctacaaggaaccctgtggggggctggaggatgctgtgaacgaggccaagcacctgggcgtcaaagtcttctcggtggccatcacacccgaccacctggagccgcgtctgagcatcatcgccacggaccacacgtaccggcgcaacttcacggcggctgactggggccagagccgcgacgcagaggaggccatcagccagaccatcgacaccatcgtggacatgatcaaaaataacgtggagcaagtgtgctgctccttcgaatgccagcctgcaagaggacctccggggctccggggcgaccccggctttgagggagaacgaggcaagccggggctcccaggagagaagggagaagccggagatcctggaagacccggggacctcggacctgttgggtaccagggaatgaagggagaaaaagggagccgtggggagaagggctccaggggacccaagggctacaagggagagaagggcaagcgtggcatcgacggggtggacggcgtgaagggggagatggggtacccaggcctgccaggctgcaagggctcgcccgggtttgacggcattcaaggaccccctggccccaagggagaccccggtgcctttggactgaaaggagaaaagggcgagcctggagctgacggggaggcggggagaccagggagctcgggaccatctggagacgagggccagccgggagagcctgggccccccggagagaaaggagaggcgggcgacgaggggaacccaggacctgacggtgcccccggggagcggggtggccctggagagagaggaccacgggggaccccaggcacgcggggaccaagaggagaccctccctaggcacctctgtgctgcgtcccaccagcctgagcaagacgccctctcggggcctgtgccgcactagcctccctctcctctgtccccatagctggtttttcccaccaatcctcacctaacagttactttacaattaaactcaaagcaagctcttctcctcagcttggggcagccattggcctctgtctcgttttgggaaaccaaggtcaggaggccgttgcagacataaatctcggcgactcggccccgtctcctgagggtcctgctggtgaccggcctggaccttggccctacagccctggaggccgctgctgaccagcactgaccccgacctcagagagtactcgcaggggcgctggctgcactcaagaccctcgagattaacggtgctaaccccgtctgctcctccctcccgcagagactggggcctggactggacatgagagccccttggtgccacagagggctgtgtcttactagaaacaacgcaaacctctccttcctcagaatagtgatgtgttcgacgttttatcaaaggccccctttctatgttcatgttagttttgctccttctgtgtttttttctgaaccatatccatgttgctgacttttccaaataaaggttttcactcctc

SEQ ID NO: 445303 - DNA, 1346 bp, Homo sapiens
  misc_feature (198)..(198): n is a, c, g, or t
taataactcctcgggccctgatggtagccaatcttccaagccactttcaggtacagacaactgtgggtggctgacaacaggcactttttcctctttgctgatggggacattgaggctcgtggagatgacaagacttgccgtctcctggcacagacctctttccctctgcctcaaagcctttccatgcatccacctccntggggcattctcagccatccccacagccctctgacgccagtcctgctcccaggtcaccccagccccagcttacccacctggttccttagttcagccaagatcgtctccagctcctgtactcgactcatgctgtgcaccctgtcctcccacccctccccactcatcactaaacagagtaaaatgtgatgcgaattttcccgaccaacctgattcgctagattttttttaaggaaaagcttggaaagccaggacacaacgctgctgcctgctttgtgcagggtcctccggggctcagccctgagttggcatcacctgcgcagggccctctgggggctcagccctgagctagtgtcacctgcacagggccctctggggctcagccctgagctggcgtcacctgtgcagggccctctggggctcagccctgagctggcctcacctgggttccccaccccgggctctcctgccctgccctcctgcccgccctccctcctgcctgcgcagctccttccctaggcacctctgtgctgcgtcccaccagcctgagcaagacgccctctcggggcctgtgccgcactagcctccctctcctctgtccccatagctggtttttcccaccaatcctcacctaacagttactttacaattaaactcaaagcaagctcttctcctcagcttggggcagccattggcctctgtctcgttttgggaaaccaaggtcaggaggccgttgcagacataaatctcggcgactcggccccgtctcctgagggtcctgctggtgaccggcctggaccttggccctacagccctggaggccgctgctgaccagcactgaccccgacctcagagagtactcgcaggggcgctggctgcactcaagaccctcgagattaacggtgctaaccccgtctgctcctccctcccgcagagactggggcctggactggacatgagagccccttggtgccacagagggctgtgtcttactagaaacaacgcaaacctctccttcctcagaatagtgatgtgttcgacgttttatcaaaggccccctttctatgttcatgttagttttgctccttctgtgtttttttctgaaccatatccatgttgctgacttttccaaataaaggttttcactcctc

SEQ ID NO: 445304 - DNA, 3385 bp, Homo sapiens
  misc_feature (110)..(110): n is a, c, g, or t
tccttgccctccgctctcactctggctgggagcagaaggcagcctcggtctctgggcggcggcggcggcccactctgccctggccgcgctgtgtggtgaccgcaggcccnagacatgagggcggcccgtgctctgctgcccctgctgctgcaggcctgctggacagccgcgcaggatgagccggagaccccgagggccgtggccttccaggactgccccgtggacctgttctttgtgctggacacctctgagagcgtggccctgaggctgaagccctacggggccctcgtggacaaagtcaagtccttcaccaagcgcttcatcgacaacctgagggacaggtactaccgctgtgaccgaaacctggtgtggaacgcaggcgcgctgcactacagtgacgaggtggagatcatccaaggcctcacgcgcatgcctggcggccgcgacgcactcaaaagcagcgtggacgcggtcaagtactttgggaagggcacctacaccgactgcgctatcaagaaggggctggagcagctcctcgtggggggctcccacctgaaggagaataagtacctgattgtggtgaccgacgggcaccccctggagggctacaaggaaccctgtggggggctggaggatgctgtgaacgaggccaagcacctgggcgtcaaagtcttctcggtggccatcacacccgaccacctggagccgcgtctgagcatcatcgccacggaccacacgtaccggcgcaacttcacggcggctgactggggccagagccgcgacgcagaggaggccatcagccagaccatcgacaccatcgtggacatgatcaaaaataacgtggagcaagtgtgctgctccttcgaatgccagcctgcaagaggacctccggggctccggggcgaccccggctttgagggagaacgaggcaagccggggctcccaggagagaagggagaagccggagatcctggaagacccggggacctcggacctgttgggtaccagggaatgaagggagaaaaagggagccgtggggagaagggctccaggggacccaagggctacaagggagagaagggcaagcgtggcatcgacggggtggacggcgtgaagggggagatggggtacccaggcctgccaggctgcaagggctcgcccgggtttgacggcattcaaggaccccctggccccaagggagaccccggtgcctttggactgaaaggagaaaagggcgagcctggagctgacggggaggcggggagaccagggagctcgggaccatctggagacgagggccagccgggagagcctgggccccccggagagaaaggagaggcgggcgacgaggggaacccaggacctgacggtgcccccggggagcggggtggccctggagagagaggaccacgggggaccccaggcacgcggggaccaagaggagaccctggtgaagctggcccgcagggtgatcagggaagagaaggccccgttggtgtccctggagacccgggcgaggctggccctatcggacctaaaggctaccgaggcgatgagggtcccccagggtccgagggtgccagaggagccccaggacctgccggaccccctggagacccggggctgatgggtgaaaggggagaagacggccccgctggaaatggcaccgagggcttccccggcttccccgggtatccgggcaacaggggcgctcccgggataaacggcacgaagggctaccccggcctcaagggggacgagggagaagccggggaccccggagacgataacaacgacattgcaccccgaggagtcaaaggagcaaaggggtaccggggtcccgagggcccccagggacccccaggacaccaaggaccgcctgggccggacgaatgcgagattttggacatcatcatgaaaatgtgctcttgctgtgaatgcaagtgcggccccatcgacctcctgttcgtgctggacagctcagagagcattggcctgcagaacttcgagattgccaaggacttcgtcgtcaaggtcatcgaccggctgagccgggacgagctggtcaagttcgagccagggcagtcgtacgcgggtgtggtgcagtacagccacagccagatgcaggagcacgtgagcctgcgcagccccagcatccggaacgtgcaggagctcaaggaagccatcaagagcctgcagtggatggcgggcggcaccttcacgggggaggccctgcagtacacgcgggaccagctgctgccgcccagcccgaacaaccgcatcgccctggtcatcactgacgggcgctcagacactcagagggacaccacaccgctcaacgtgctctgcagccccggcatccaggtggtctccgtgggcatcaaagacgtgtttgacttcatcccaggctcagaccagctcaatgtcatttcttgccaaggcctggcaccatcccagggccggcccggcctctcgctggtcaaggagaactatgcagagctgctggaggatgccttcctgaagaatgtcaccgcccagatctgcatagacaagaagtgtccagattacacctgccccatcacgttctcctccccggctgacatcaccatcctgctggacggctccgccagcgtgggcagccacaactttgacaccaccaagcgcttcgccaagcgcctggccgagcgcttcctcacagcgggcaggacggaccccgcccacgacgtgcgggtggcggtggtgcagtacagcggcacgggccagcagcgcccagagcgggcgtcgctgcagttcctgcagaactacacggccctggccagtgccgtcgatgccatggactttatcaacgacgccaccgacgtcaacgatgccctgggctatgtgacccgcttctaccgcgaggcctcgtccggcgctgccaagaagaggctgctgctcttctcagatggcaactcgcagggcgccacgcccgctgccatcgagaaggccgtgcaggaagcccagcgggcaggcatcgagatcttcgtggtggtcgtgggccgccaggtgaatgagccccacatccgcgtcctggtcaccggcaagacggccgagtacgacgtggcctacggcgagagccacctgttccgtgtccccagctaccaggccctgctccgcggtgtcttccaccagacagtctccaggaaggtggcgctgggctagcccaccctgcacgccggcaccaaaccctgtcctcccacccctccccactcatcactaaacagagtaaaatgtgatgcgaattttcccgaccaacctgattcgctagattttttttaaggaaaagcttggaaagccaggacacaacgctggcctacagcacatgccggtaccggctcgtcactgg

SEQ ID NO: 445305 - DNA, 3373 bp, Homo sapiens
  misc_feature (110)..(110): n is a, c, g, or t
tccttgccctccgctctcactctggctgggagcagaaggcagcctcggtctctgggcggcggcggcggcccactctgccctggccgcgctgtgtggtgaccgcaggcccnagacatgagggcggcccgtgctctgctgcccctgctgctgcaggcctgctggacagccgcgcaggatgagccggagaccccgagggccgtggccttccaggactgccccgtggacctgttctttgtgctggacacctctgagagcgtggccctgaggctgaagccctacggggccctcgtggacaaagtcaagtccttcaccaagcgcttcatcgacaacctgagggacaggtactaccgctgtgaccgaaacctggtgtggaacgcaggcgcgctgcactacagtgacgaggtggagatcatccaaggcctcacgcgcatgcctggcggccgcgacgcactcaaaagcagcgtggacgcggtcaagtactttgggaagggcacctacaccgactgcgctatcaagaaggggctggagcagctcctcgtggggggctcccacctgaaggagaataagtacctgattgtggtgaccgacgggcaccccctggagggctacaaggaaccctgtggggggctggaggatgctgtgaacgaggccaagcacctgggcgtcaaagtcttctcggtggccatcacacccgaccacctggagccgcgtctgagcatcatcgccacggaccacacgtaccggcgcaacttcacggcggctgactggggccagagccgcgacgcagaggaggccatcagccagaccatcgacaccatcgtggacatgatcaaaaataacgtggagcaagtgtgctgctccttcgaatgccagcctgcaagaggacctccggggctccggggcgaccccggctttgagggagaacgaggcaagccggggctcccaggagagaagggagaagccggagatcctggaagacccggggacctcggacctgttgggtaccagggaatgaagggagaaaaagggagccgtggggagaagggctccaggggacccaagggctacaagggagagaagggcaagcgtggcatcgacggggtggacggcgtgaagggggagatggggtacccaggcctgccaggctgcaagggctcgcccgggtttgacggcattcaaggaccccctggccccaagggagaccccggtgcctttggactgaaaggagaaaagggcgagcctggagctgacggggaggcggggagaccagggagctcgggaccatctggagacgagggccagccgggagagcctgggccccccggagagaaaggagaggcgggcgacgaggggaacccaggacctgacggtgcccccggggagcggggtggccctggagagagaggaccacgggggaccccaggcacgcggggaccaagaggagaccctggtgaagctggcccgcagggtgatcagggaagagaaggccccgttggtgtccctggagacccgggcgaggctggccctatcggacctaaaggctaccgaggcgatgagggtcccccagggtccgagggtgccagaggagccccaggacctgccggaccccctggagacccggggctgatgggtgaaaggggagaagacggccccgctggaaatggcaccgagggcttccccggcttccccgggtatccgggcaacaggggcgctcccgggataaacggcacgaagggctaccccggcctcaagggggacgagggagaagccggggaccccggagacgataacaacgacattgcaccccgaggagtcaaaggagcaaaggggtaccggggtcccgagggcccccagggacccccaggacaccaaggaccgcctgggccggacgaatgcgagattttggacatcatcatgaaaatgtgctcttgctgtgaatgcaagtgcggccccatcgacctcctgttcgtgctggacagctcagagagcattggcctgcagaacttcgagattgccaaggacttcgtcgtcaaggtcatcgaccggctgagccgggacgagctggtcaagttcgagccagggcagtcgtacgcgggtgtggtgcagtacagccacagccagatgcaggagcacgtgagcctgcgcagccccagcatccggaacgtgcaggagctcaaggaagccatcaagagcctgcagtggatggcgggcggcaccttcacgggggaggccctgcagtacacgcgggaccagctgctgccgcccagcccgaacaaccgcatcgccctggtcatcactgacgggcgctcagacactcagagggacaccacaccgctcaacgtgctctgcagccccggcatccaggtggtctccgtgggcatcaaagacgtgtttgacttcatcccaggctcagaccagctcaatgtcatttcttgccaaggcctggcaccatcccagggccggcccggcctctcgctggtcaaggagaactatgcagagctgctggaggatgccttcctgaagaatgtcaccgcccagatctgcatagacaagaagtgtccagattacacctgccccatcacgttctcctccccggctgacatcaccatcctgctggacggctccgccagcgtgggcagccacaactttgacaccaccaagcgcttcgccaagcgcctggccgagcgcttcctcacagcgggcaggacggaccccgcccacgacgtgcgggtggcggtggtgcagtacagcggcacgggccagcagcgcccagagcgggcgtcgctgcagttcctgcagaactacacggccctggccagtgccgtcgatgccatggactttatcaacgacgccaccgacgtcaacgatgccctgggctatgtgacccgcttctaccgcgaggcctcgtccggcgctgccaagaagaggctgctgctcttctcagatggcaactcgcagggcgccacgcccgctgccatcgagaaggccgtgcaggaagcccagcgggcaggcatcgagatcttcgtggtggtcgtgggccgccaggtgaatgagccccacatccgcgtcctggtcaccggcaagacggccgagtacgacgtggcctacggcgagagccacctgttccgtgtccccagctaccaggccctgctccgcggtgtcttccaccagacagtctccaggaaggtggcgctgggctagcccaccctgcacgccggcaccaaaccctgtcctcccacccctccccactcatcactaaacagagtaaaatgtgatgcgaattttcccgaccaacctgattcggctccttctgtgtttttttctgaaccatatccatgttgctgacttttccaaataaaggttttcactcctc

SEQ ID NO: 445306 - DNA, 557 bp, Homo sapiens
ccgcaccccaacaccaagggactctgaaccagcccccagcccccggcatggatgagagcatgtcctccaagctcttctcctcagcttggggcagccattggcctctgtctcgttttgggaaaccaaggtcaggaggccgttgcagacataaatctcggcgactcggccccgtctcctgagggtcctgctggtgaccggcctggaccttggccctacagccctggaggccgctgctgaccagcactgaccccgacctcagagagtactcgcaggggcgctggctgcactcaagaccctcgagattaacggtgctaaccccgtctgctcctccctcccgcagagactggggcctggactggacatgagagccccttggtgccacagagggctgtgtcttactagaaacaacgcaaacctctccttcctcagaatagtgatgtgttcgacgttttatcaaaggccccctttctatgttcatgttagttttgctccttctgtgtttttttctgaaccatatccatgttgctgacttttccaaataaaggttttcactcctc

SEQ ID NO: 445307 - DNA, 3350 bp, Homo sapiens
  misc_feature (110)..(110): n is a, c, g, or t
tccttgccctccgctctcactctggctgggagcagaaggcagcctcggtctctgggcggcggcggcggcccactctgccctggccgcgctgtgtggtgaccgcaggcccnagacatgagggcggcccgtgctctgctgcccctgctgctgcaggcctgctggacagccgcgcaggatgagccggagaccccgagggccgtggccttccaggactgccccgtggacctgttctttgtgctggacacctctgagagcgtggccctgaggctgaagccctacggggccctcgtggacaaagtcaagtccttcaccaagcgcttcatcgacaacctgagggacaggtactaccgctgtgaccgaaacctggtgtggaacgcaggcgcgctgcactacagtgacgaggtggagatcatccaaggcctcacgcgcatgcctggcggccgcgacgcactcaaaagcagcgtggacgcggtcaagtactttgggaagggcacctacaccgactgcgctatcaagaaggggctggagcagctcctcgtggggggctcccacctgaaggagaataagtacctgattgtggtgaccgacgggcaccccctggagggctacaaggaaccctgtggggggctggaggatgctgtgaacgaggccaagcacctgggcgtcaaagtcttctcggtggccatcacacccgaccacctggagccgcgtctgagcatcatcgccacggaccacacgtaccggcgcaacttcacggcggctgactggggccagagccgcgacgcagaggaggccatcagccagaccatcgacaccatcgtggacatgatcaaaaataacgtggagcaagtgtgctgctccttcgaatgccagcctgcaagaggacctccggggctccggggcgaccccggctttgagggagaacgaggcaagccggggctcccaggagagaagggagaagccggagatcctggaagacccggggacctcggacctgttgggtaccagggaatgaagggagaaaaagggagccgtggggagaagggctccaggggacccaagggctacaagggagagaagggcaagcgtggcatcgacggggtggacggcgtgaagggggagatggggtacccaggcctgccaggctgcaagggctcgcccgggtttgacggcattcaaggaccccctggccccaagggagaccccggtgcctttggactgaaaggagaaaagggcgagcctggagctgacggggaggcggggagaccagggagctcgggaccatctggagacgagggccagccgggagagcctgggccccccggagagaaaggagaggcgggcgacgaggggaacccaggacctgacggtgcccccggggagcggggtggccctggagagagaggaccacgggggaccccaggcacgcggggaccaagaggagaccctggtgaagctggcccgcagggtgatcagggaagagaaggccccgttggtgtccctggagacccgggcgaggctggccctatcggacctaaaggctaccgaggcgatgagggtcccccagggtccgagggtgccagaggagccccaggacctgccggaccccctggagacccggggctgatgggtgaaaggggagaagacggccccgctggaaatggcaccgagggcttccccggcttccccgggtatccgggcaacaggggcgctcccgggataaacggcacgaagggctaccccggcctcaagggggacgagggagaagccggggaccccggagacgataacaacgacattgcaccccgaggagtcaaaggagcaaaggggtaccggggtcccgagggcccccagggacccccaggacaccaaggaccgcctgggccggacgaatgcgagattttggacatcatcatgaaaatgtgctcttgctgtgaatgcaagtgcggccccatcgacctcctgttcgtgctggacagctcagagagcattggcctgcagaacttcgagattgccaaggacttcgtcgtcaaggtcatcgaccggctgagccgggacgagctggtcaagttcgagccagggcagtcgtacgcgggtgtggtgcagtacagccacagccagatgcaggagcacgtgagcctgcgcagccccagcatccggaacgtgcaggagctcaaggaagccatcaagagcctgcagtggatggcgggcggcaccttcacgggggaggccctgcagtacacgcgggaccagctgctgccgcccagcccgaacaaccgcatcgccctggtcatcactgacgggcgctcagacactcagagggacaccacaccgctcaacgtgctctgcagccccggcatccaggtggtctccgtgggcatcaaagacgtgtttgacttcatcccaggctcagaccagctcaatgtcatttcttgccaaggcctggcaccatcccagggccggcccggcctctcgctggtcaaggagaactatgcagagctgctggaggatgccttcctgaagaaaagacaccacccaaaacaacaaaaacaagagaagaccagatagacaccaaccccaatacactaagacgacctaaccccaggatgctaaaaacagacagccaaaccgaagcgaaaagcagagcgttcgcggccaggcggaagtgatcaggacgcacgaagtgagagaaaaagcagtgcagtcaaagtcacggacgtccccaaagtcctgctcaagatgtcgaatgtcactagccgaacacaggtcagaggcaataacggatactccccatcccaacaaacataacaaataaagcaatagagagacataaaacaacaaacacggggatcccaacaagacacccccaagaagccaaagcgagacatctaaaccagaaacccaaaccaagaaatcgaacagcagagcccctaaagcccatgggtggcccggttcgtatgctgagaggggacctgattatattaccaaacgaacgagccgagccgagacgataagaaaaggaacaagcccgcgaagggtccgaaggagtaggacccgcaggtagaacgaagcgcagcgtggaggacgcgactgggacgagatggcgggcgaggcgcagggtggaaagaatgtcgaacgaaagtgagccgagctaccaggtaataagtagttaaggtggccgcaacggagggctgccgaggtagcgggcggtgaaggccataacatagagagaaggatccgcaggaggcgagggaaagtgcgcgagtgtgaggccgtagggcgacgtagataagacgagtctcgggtggaagggcggagtgggcgggggcgaggagtagaggggagtcgcc

SEQ ID NO: 445308 - DNA, 1177 bp, Homo sapiens
  misc_feature (110)..(110): n is a, c, g, or t
tccttgccctccgctctcactctggctgggagcagaaggcagcctcggtctctgggcggcggcggcggcccactctgccctggccgcgctgtgtggtgaccgcaggcccnagacatgagggcggcccgtgctctgctgcccctgctgctgcaggcctgctggacagccgcgcaggatgagccggagaccccgagggccgtggccttccaggactgccccgtggacctgttctttgtgctggacacctctgagagcgtggccctgaggctgaagccctacggggccctcgtggacaaagtcaagtccttcaccaagcgcttcatcgacaacctgagggacaggtactaccgctgtgaccgaaacctggtgtggaacgcaggcgcgctgcactacagtgacgaggtggagatcatccaaggcctcacgcgcatgcctggcggccgcgacgcactcaaaagcagcgtggacgcggtcaagtactttgggaagggcacctacaccgactgcgctatcaagaaggggctggagcagctcctcgtggggggctcccacctgaaggagaataagtacctgattgtggtgaccgacgggcaccccctggagggctacaaggaaccctgtggggggctggaggatgctgtgaacgaggccaagcacctgggcgtcaaagtcttctcggtggccatcacacccgaccacctggagccgcgtctgagcatcatcgccacggaccacacgtaccggcgcaacttcacggcggctgactggggccagagccgcgacgcagaggaggccatcagccagaccatcgacaccatcgtggacatgatccctacagccctggaggccgctgctgaccagcactgaccccgacctcagagagtactcgcaggggcgctggctgcactcaagaccctcgagattaacggtgctaaccccgtctgctcctccctcccgcagagactggggcctggactggacatgagagccccttggtgccacagagggctgtgtcttactagaaacaacgcaaacctctccttcctcagaatagtgatgtgttcgacgttttatcaaaggccccctttctatgttcatgttagttttgctccttctgtgtttttttctgaaccatatccatgttgctgacttttccaaataaaggttttcactcctc

SEQ ID NO: 445309 - DNA, 1042 bp, Homo sapiens
  misc_feature (110)..(110): n is a, c, g, or t
tccttgccctccgctctcactctggctgggagcagaaggcagcctcggtctctgggcggcggcggcggcccactctgccctggccgcgctgtgtggtgaccgcaggcccnagacatgagggcggcccgtgctctgctgcccctgctgctgcaggcctgctggacagccgcgcaggatgagccggagaccccgagggccgtggccttccaggactgccccgtggacctgttctttgtgctggacacctctgagagcgtggccctgaggctgaagccctacggggccctcgtggacaaagtcaagtccttcaccaagcgcttcatcgacaacctgagggacaggtactaccgctgtgaccgaaacctggtgtggaacgcaggcgcgctgcactacagtgacgaggtggagatcatccaaggcctcacgcgcatgcctggcggccgcgacgcactcaaaagcagcgtggacgcggtcaagtactttgggaagggcacctacaccgactgcgctatcaagaaggggctggagcagctcctcgtggggggctcccacctgaaggagaataagtacctgattgtggtgaccgacgggcaccccctggagggctacaaggaaccctgtggggggctggaggatgctgtgaacgaggccaagcacctgggcgtcaaagtcttctcggtggccatcacacccgaccacctggagccgcgtctgagcatcatcgccacggaccacacgtaccggcgcaacttcacggcggctgactggggccagagccgcgacgcagaggaggccatcagccagaccatcgacaccatcgtggacatgatcaaaaataacgtggagcaagtgtgctgctccttcgaatgccagcctgcaagaggacctccggggctccggggcgaccccggctttgagggagaacgaggcaagccggggctcccaggagagaagggagaagccggagatcctggaagacccggggacctcggacctgttggtaccagcgatgatggagtccactgggatcctctagaacgcc

SEQ ID NO: 445310 - DNA, 4047 bp, Homo sapiens
cgcccagcccgaacaaccgcatcgccctggtcatcactgacgggcgctcagacacctctgagagcgtggccctgaggctgaagccctacggggccctcgtggacaaagtcaagtccttcaccaagcgcttcatcgacaacctgagggacaggtactaccgctgtgaccgaaacctggtgtggaacgcaggcgcgctgcactacagtgacgaggtggagatcatccaaggcctcacgcgcatgcctggcggccgcgacgcactcaaaagcagcgtggacgcggtcaagtactttgggaagggcacctacaccgactgcgctatcaagaaggggctggagcagctcctcgtggggggctcccacctgaaggagaataagtacctgattgtggtgaccgacgggcaccccctggagggctacaaggaaccctgtggggggctggaggatgctgtgaacgaggccaagcacctgggcgtcaaagtcttctcggtggccatcacacccgaccacctggagccgcgtctgagcatcatcgccacggaccacacgtaccggcgcaacttcacggcggctgactggggccagagccgcgacgcagaggaggccatcagccagaccatcgacaccatcgtggacatgatcaaaaataacgtggagcaagtgtgctgctccttcgaatgccagcctgcaagaggacctccggggctccggggcgaccccggctttgagggagaacgaggcaagccggggctcccaggagagaagggagaagccggagatcctggaagacccggggacctcggacctgttgggtaccagggaatgaagggagaaaaagggagccgtggggagaagggctccaggggacccaagggctacaagggagagaagggcaagcgtggcatcgacggggtggacggcgtgaagggggagatggggtacccaggcctgccaggctgcaagggctcgcccgggtttgacggcattcaaggaccccctggccccaagggagaccccggtgcctttggactgaaaggagaaaagggcgagcctggagctgacggggaggcggggagaccagggagctcgggaccatctggagacgagggccagccgggagagcctgggccccccggagagaaaggagaggcgggcgacgaggggaacccaggacctgacggtgcccccggggagcggggtggccctggagagagaggaccacgggggaccccaggcacgcggggaccaagaggagaccctggtgaagctggcccgcagggtgatcagggaagagaaggccccgttggtgtccctggagacccgggcgaggctggccctatcggacctaaaggctaccgaggcgatgagggtcccccagggtccgagggtgccagaggagccccaggacctgccggaccccctggagacccggggctgatgggtgaaaggggagaagacggccccgctggaaatggcaccgagggcttccccggcttccccgggtatccgggcaacaggggcgctcccgggataaacggcacgaagggctaccccggcctcaagggggacgagggagaagccggggaccccggagacgataacaacgacattgcaccccgaggagtcaaaggagcaaaggggtaccggggtcccgagggcccccagggacccccaggacaccaaggaccgcctgggccggacgaatgcgagattttggacatcatcatgaaaatgtgctcttgctgtgaatgcaagtgcggccccatcgacctcctgttcgtgctggacagctcagagagcattggcctgcagaacttcgagattgccaaggacttcgtcgtcaaggtcatcgaccggctgagccgggacgagctggtcaagttcgagccagggcagtcgtacgcgggtgtggtgcagtacagccacagccagatgcaggagcacgtgagcctgcgcagccccagcatccggaacgtgcaggagctcaaggaagccatcaagagcctgcagtggatggcgggcggcaccttcacgggggaggccctgcagtacacgcgggaccagctgctgccgcccagcccgaacaaccgcatcgccctggtcatcactgacgggcgctcagacactcagagggacaccacaccgctcaacgtgctctgcagccccggcatccaggtggtctccgtgggcatcaaagacgtgtttgacttcatcccaggctcagaccagctcaatgtcatttcttgccaaggcctggcaccatcccagggccggcccggcctctcgctggtcaaggagaactatgcagagctgctggaggatgccttcctgaagaatgtcaccgcccagatctgcatagacaagaagtgtccagattacacctgccccatcacgttctcctccccggctgacatcaccatcctgctggacggctccgccagcgtgggcagccacaactttgacaccaccaagcgcttcgccaagcgcctggccgagcgcttcctcacagcgggcaggacggaccccgcccacgacgtgcgggtggcggtggtgcagtacagcggcacgggccagcagcgcccagagcgggcgtcgctgcagttcctgcagaactacacggccctggccagtgccgtcgatgccatggactttatcaacgacgccaccgacgtcaacgatgccctgggctatgtgacccgcttctaccgcgaggcctcgtccggcgctgccaagaagaggctgctgctcttctcagatggcaactcgcagggcgccacgcccgctgccatcgagaaggccgtgcaggaagcccagcgggcaggcatcgagatcttcgtggtggtcgtgggccgccaggtgaatgagccccacatccgcgtcctggtcaccggcaagacggccgagtacgacgtggcctacggcgagagccacctgttccgtgtccccagctaccaggccctgctccgcggtgtcttccaccagacagtctccaggaaggtggcgctgggctagcccaccctgcacgccggcaccaaaccctgtcctcccacccctccccactcatcactaaacagagtaaaatgtgatgcgaattttcccgaccaacctgattcgctagattttttttaaggaaaagcttggaaagccaggacacaacgctgctgcctgctttgtgcagggtcctccggggctcagccctgagttggcatcacctgcgcagggccctctgggggctcagccctgagctagtgtcacctgcacagggccctctggggctcagccctgagctggcgtcacctgtgcagggccctctggggctcagccctgagctggcctcacctgggttccccaccccgggctctcctgccctgccctcctgcccgccctccctcctgcctgcgcagctccttccctaggcacctctgtgctgcgtcccaccagcctgagcaagacgccctctcggggcctgtgccgcactagcctccctctcctctgtccccatagctggtttttcccaccaatcctcacctaacagttactttacaattaaactcaaagcaagctcttctcctcagcttggggcagccattggcctctgtctcgttttgggaaaccaaggtcaggaggccgttgcagacataaatctcggcgactcggccccgtctcctgagggtcctgctggtgaccggcctggaccttggccctacagccctggaggccgctgctgaccagcactgaccccgacctcagagagtactcgcaggggcgctggctgcactcaagaccctcgagattaacggtgctaaccccgtctgctcctccctcccgcagagactggggcctggactggacatgagagccccttggtgccacagagggctgtgtcttactagaaacaacgcaaacctctccttcctcagaatagtgatgtgttcgacgttttatcaaaggccccctttctatgttcatgttagttttgctccttctgtgtttttttctgaaccatatccatgttgctgacttttccaaataaaggttttcactcctc

SEQ ID NO: 445311 - DNA, 4720 bp, Homo sapiens
  misc_feature (110)..(110): n is a, c, g, or t
  misc_feature (4546)..(4546): n is a, c, g, or t
tccttgccctccgctctcactctggctgggagcagaaggcagcctcggtctctgggcggcggcggcggcccactctgccctggccgcgctgtgtggtgaccgcaggcccnagacatgagggcggcccgtgctctgctgcccctgctgctgcaggcctgctggacagccgcgcaggatgagccggagaccccgagggccgtggccttccaggactgccccgtggacctgttctttgtgctggacacctctgagagcgtggccctgaggctgaagccctacggggccctcgtggacaaagtcaagtccttcaccaagcgcttcatcgacaacctgagggacaggtactaccgctgtgaccgaaacctggtgtggaacgcaggcgcgctgcactacagtgacgaggtggagatcatccaaggcctcacgcgcatgcctggcggccgcgacgcactcaaaagcagcgtggacgcggtcaagtactttgggaagggcacctacaccgactgcgctatcaagaaggggctggagcagctcctcgtggggggctcccacctgaaggagaataagtacctgattgtggtgaccgacgggcaccccctggagggctacaaggaaccctgtggggggctggaggatgctgtgaacgaggccaagcacctgggcgtcaaagtcttctcggtggccatcacacccgaccacctggagccgcgtctgagcatcatcgccacggaccacacgtaccggcgcaacttcacggcggctgactggggccagagccgcgacgcagaggaggccatcagccagaccatcgacaccatcgtggacatgatcaaaaataacgtggagcaagtgtgctgctccttcgaatgccagcctgcaagaggacctccggggctccggggcgaccccggctttgagggagaacgaggcaagccggggctcccaggagagaagggagaagccggagatcctggaagacccggggacctcggacctgttgggtaccagggaatgaagggagaaaaagggagccgtggggagaagggctccaggggacccaagggctacaagggagagaagggcaagcgtggcatcgacggggtggacggcgtgaagggggagatggggtacccaggcctgccaggctgcaagggctcgcccgggtttgacggcattcaaggaccccctggccccaagggagaccccggtgcctttggactgaaaggagaaaagggcgagcctggagctgacggggaggcggggagaccagggagctcgggaccatctggagacgagggccagccgggagagcctgggccccccggagagaaaggagaggcgggcgacgaggggaacccaggacctgacggtgcccccggggagcggggtggccctggagagagaggaccacgggggaccccaggcacgcggggaccaagaggagaccctggtgaagctggcccgcagggtgatcagggaagagaaggccccgttggtgtccctggagacccgggcgaggctggccctatcggacctaaaggctaccgaggcgatgagggtcccccagggtccgagggtgccagaggagccccaggacctgccggaccccctggagacccggggctgatgggtgaaaggggagaagacggccccgctggaaatggcaccgagggcttccccggcttccccgggtatccgggcaacaggggcgctcccgggataaacggcacgaagggctaccccggcctcaagggggacgagggagaagccggggaccccggagacgataacaacgacattgcaccccgaggagtcaaaggagcaaaggggtaccggggtcccgagggcccccagggacccccaggacaccaaggaccgcctgggccggacgaatgcgagattttggacatcatcatgaaaatgtgctcttgctgtgaatgcaagtgcggccccatcgacctcctgttcgtgctggacagctcagagagcattggcctgcagaacttcgagattgccaaggacttcgtcgtcaaggtcatcgaccggctgagccgggacgagctggtcaagttcgagccagggcagtcgtacgcgggtgtggtgcagtacagccacagccagatgcaggagcacgtgagcctgcgcagccccagcatccggaacgtgcaggagctcaaggaagccatcaagagcctgcagtggatggcgggcggcaccttcacgggggaggccctgcagtacacgcgggaccagctgctgccgcccagcccgaacaaccgcatcgccctggtcatcactgacgggcgctcagacactcagagggacaccacaccgctcaacgtgctctgcagccccggcatccaggtggtctccgtgggcatcaaagacgtgtttgacttcatcccaggctcagaccagctcaatgtcatttcttgccaaggcctggcaccatcccagggccggcccggcctctcgctggtcaaggagaactatgcagagctgctggaggatgccttcctgaagaatgtcaccgcccagatctgcatagacaagaagtgtccagattacacctgccccatcacgttctcctccccggctgacatcaccatcctgctggacggctccgccagcgtgggcagccacaactttgacaccaccaagcgcttcgccaagcgcctggccgagcgcttcctcacagcgggcaggacggaccccgcccacgacgtgcgggtggcggtggtgcagtacagcggcacgggccagcagcgcccagagcgggcgtcgctgcagttcctgcagaactacacggccctggccagtgccgtcgatgccatggactttatcaacgacgccaccgacgtcaacgatgccctgggctatgtgacccgcttctaccgcgaggcctcgtccggcgctgccaagaagaggctgctgctcttctcagatggcaactcgcagggcgccacgcccgctgccatcgagaaggccgtgcaggaagcccagcgggcaggcatcgagatcttcgtggtggtcgtgggccgccaggtgaatgagccccacatccgcgtcctggtcaccggcaagacggccgagtacgacgtggcctacggcgagagccacctgttccgtgtccccagctaccaggccctgctccgcggtgtcttccaccagacagtctccaggaaggtggcgctgggctagcccaccctgcacgccggcaccaaaccctgtcctcccacccctccccactcatcactaaacagagtaaaatgtgatgcgaattttcccgaccaacctgattcgctagattttttttaaggaaaagcttggaaagccaggacacaacgctgctgcctgctttgtgcagggtcctccggggctcagccctgagttggcatcacctgcgcagggccctctgggggctcagccctgagctagtgtcacctgcacagggccctctggggctcagccctgagctggcgtcacctgtgcagggccctctggggctcagccctgagctggcctcacctgggttccccaccccgggctctcctgccctgccctcctgcccgccctccctcctgcctgcgcagctccttccctaggcacctctgtgctgcgtcccaccagcctgagcaagacgccctctcggggcctgtgccgcactagcctccctctcctctgtccccatagctggtttttcccaccaatcctcacctaacagttactttacaattaaactcaaagcaagctcttctcctcagcttggggcagccattggcctctgtctcgttttgggaaaccaaggtcaggaggccgttgcagacataaatctcggcgactcggccccgtctcctgagggtcctgctggtgaccggcctggaccttggccctacagccctggaggccgctgctgaccagcactgaccccgacctcagagagtactcgcaggggcgctggctgcactcaagaccctcgagattaacggtgctaaccccgtctgctcctccctcccgcagagactggggcctggactggacatgagagccccttggtgccacagagggctgtgtcttactagaaacaacgcaaacctctccttcctcagaatagtgatgtgttcgacgttttatcaaaggccccctttctatgttcatgttagttttgctccttctgtgtttttttctgaaccatatccatgttgctgacttttccaaataaaggttttcactcctcaaaaaaaaaaaacactaacaacaccaaaaaaacacattttggggggccgctttgcgcccttcgaaaaaggttttataaacaaccatttcggtttgggggcgggggcccccagaggtgtgtaatggacacccggggggccacagcggtgctcccaaaagggaaaaccggggcaagcctaggggtttcgtcttctcccaataaaaacgcgggccgcaccggcgtttgcgaaacacacccaatgggggttcggggccaactcggactctacacaggacccaggagccgattaataccaccccggggtgtatnacaatcaacacacactaacgaaacagacaagcaccaaaatacaaggaacgactaacacaatcatcaatgcaccactcaaacgtatcaacaatgagaagaacacaacacagcatcaataagaacaacatcaggaatcatagcatcatataacaaaatatacaatcacaacacaca

SEQ ID NO: 445312 - DNA, 3721 bp, Homo sapiens
gtctcacgctgccctctcctgtccaggggctcccacctgaaggagaataagtacctgattgtggtgaccgacgggcaccccctggagggctacaaggaaccctgtggggggctggaggatgctgtgaacgaggccaagcacctgggcgtcaaagtcttctcggtggccatcacacccgaccacctggagccgcgtctgagcatcatcgccacggaccacacgtaccggcgcaacttcacggcggctgactggggccagagccgcgacgcagaggaggccatcagccagaccatcgacaccatcgtggacatgatcaaaaataacgtggagcaagtgtgctgctccttcgaatgccagcctgcaagaggacctccggggctccggggcgaccccggctttgagggagaacgaggcaagccggggctcccaggagagaagggagaagccggagatcctggaagacccggggacctcggacctgttgggtaccagggaatgaagggagaaaaagggagccgtggggagaagggctccaggggacccaagggctacaagggagagaagggcaagcgtggcatcgacggggtggacggcgtgaagggggagatggggtacccaggcctgccaggctgcaagggctcgcccgggtttgacggcattcaaggaccccctggccccaagggagaccccggtgcctttggactgaaaggagaaaagggcgagcctggagctgacggggaggcggggagaccagggagctcgggaccatctggagacgagggccagccgggagagcctgggccccccggagagaaaggagaggcgggcgacgaggggaacccaggacctgacggtgcccccggggagcggggtggccctggagagagaggaccacgggggaccccaggcacgcggggaccaagaggagaccctggtgaagctggcccgcagggtgatcagggaagagaaggccccgttggtgtccctggagacccgggcgaggctggccctatcggacctaaaggctaccgaggcgatgagggtcccccagggtccgagggtgccagaggagccccaggacctgccggaccccctggagacccggggctgatgggtgaaaggggagaagacggccccgctggaaatggcaccgagggcttccccggcttccccgggtatccgggcaacaggggcgctcccgggataaacggcacgaagggctaccccggcctcaagggggacgagggagaagccggggaccccggagacgataacaacgacattgcaccccgaggagtcaaaggagcaaaggggtaccggggtcccgagggcccccagggacccccaggacaccaaggaccgcctgggccggacgaatgcgagattttggacatcatcatgaaaatgtgctcttgctgtgaatgcaagtgcggccccatcgacctcctgttcgtgctggacagctcagagagcattggcctgcagaacttcgagattgccaaggacttcgtcgtcaaggtcatcgaccggctgagccgggacgagctggtcaagttcgagccagggcagtcgtacgcgggtgtggtgcagtacagccacagccagatgcaggagcacgtgagcctgcgcagccccagcatccggaacgtgcaggagctcaaggaagccatcaagagcctgcagtggatggcgggcggcaccttcacgggggaggccctgcagtacacgcgggaccagctgctgccgcccagcccgaacaaccgcatcgccctggtcatcactgacgggcgctcagacactcagagggacaccacaccgctcaacgtgctctgcagccccggcatccaggtggtctccgtgggcatcaaagacgtgtttgacttcatcccaggctcagaccagctcaatgtcatttcttgccaaggcctggcaccatcccagggccggcccggcctctcgctggtcaaggagaactatgcagagctgctggaggatgccttcctgaagaatgtcaccgcccagatctgcatagacaagaagtgtccagattacacctgccccatcacgttctcctccccggctgacatcaccatcctgctggacggctccgccagcgtgggcagccacaactttgacaccaccaagcgcttcgccaagcgcctggccgagcgcttcctcacagcgggcaggacggaccccgcccacgacgtgcgggtggcggtggtgcagtacagcggcacgggccagcagcgcccagagcgggcgtcgctgcagttcctgcagaactacacggccctggccagtgccgtcgatgccatggactttatcaacgacgccaccgacgtcaacgatgccctgggctatgtgacccgcttctaccgcgaggcctcgtccggcgctgccaagaagaggctgctgctcttctcagatggcaactcgcagggcgccacgcccgctgccatcgagaaggccgtgcaggaagcccagcgggcaggcatcgagatcttcgtggtggtcgtgggccgccaggtgaatgagccccacatccgcgtcctggtcaccggcaagacggccgagtacgacgtggcctacggcgagagccacctgttccgtgtccccagctaccaggccctgctccgcggtgtcttccaccagacagtctccaggaaggtggcgctgggctagcccaccctgcacgccggcaccaaaccctgtcctcccacccctccccactcatcactaaacagagtaaaatgtgatgcgaattttcccgaccaacctgattcgctagattttttttaaggaaaagcttggaaagccaggacacaacgctgctgcctgctttgtgcagggtcctccggggctcagccctgagttggcatcacctgcgcagggccctctgggggctcagccctgagctagtgtcacctgcacagggccctctggggctcagccctgagctggcgtcacctgtgcagggccctctggggctcagccctgagctggcctcacctgggttccccaccccgggctctcctgccctgccctcctgcccgccctccctcctgcctgcgcagctccttccctaggcacctctgtgctgcgtcccaccagcctgagcaagacgccctctcggggcctgtgccgcactagcctccctctcctctgtccccatagctggtttttcccaccaatcctcacctaacagttactttacaattaaactcaaagcaagctcttctcctcagcttggggcagccattggcctctgtctcgttttgggaaaccaaggtcaggaggccgttgcagacataaatctcggcgactcggccccgtctcctgagggtcctgctggtgaccggcctggaccttggccctacagccctggaggccgctgctgaccagcactgaccccgacctcagagagtactcgcaggggcgctggctgcactcaagaccctcgagattaacggtgctaaccccgtctgctcctccctcccgcagagactggggcctggactggacatgagagccccttggtgccacagagggctgtgtcttactagaaacaacgcaaacctctccttcctcagaatagtgatgtgttcgacgttttatcaaaggccccctttctatgttcatgttagttttgctccttctgtgtttttttctgaaccatatccatgttgctgacttttccaaataaaggttttcactcctc

SEQ ID NO: 445313 - DNA, 3348 bp, Homo sapiens
  misc_feature (110)..(110): n is a, c, g, or t
tccttgccctccgctctcactctggctgggagcagaaggcagcctcggtctctgggcggcggcggcggcccactctgccctggccgcgctgtgtggtgaccgcaggcccnagacatgagggcggcccgtgctctgctgcccctgctgctgcaggcctgctggacagccgcgcaggatgagccggagaccccgagggccgtggccttccaggactgccccgtggacctgttctttgtgctggacacctctgagagcgtggccctgaggctgaagccctacggggccctcgtggacaaagtcaagtccttcaccaagcgcttcatcgacaacctgagggacaggtactaccgctgtgaccgaaacctggtgtggaacgcaggcgcgctgcactacagtgacgaggtggagatcatccaaggcctcacgcgcatgcctggcggccgcgacgcactcaaaagcagcgtggacgcggtcaagtactttgggaagggcacctacaccgactgcgctatcaagaaggggctggagcagctcctcgtggggggctcccacctgaaggagaataagtacctgattgtggtgaccgacgggcaccccctggagggctacaaggaaccctgtggggggctggaggatgctgtgaacgaggccaagcacctgggcgtcaaagtcttctcggtggccatcacacccgaccacctggagccgcgtctgagcatcatcgccacggaccacacgtaccggcgcaacttcacggcggctgactggggccagagccgcgacgcagaggaggccatcagccagaccatcgacaccatcgtggacatgatcaaaaataacgtggagcaagtgtgctgctccttcgaatgccagcctgcaagaggacctccggagacgataacaacgacattgcaccccgaggagtcaaaggagcaaaggggtaccggggtcccgagggcccccagggacccccaggacaccaaggaccgcctgggccggacgaatgcgagattttggacatcatcatgaaaatgtgctcttgctgtgaatgcaagtgcggccccatcgacctcctgttcgtgctggacagctcagagagcattggcctgcagaacttcgagattgccaaggacttcgtcgtcaaggtcatcgaccggctgagccgggacgagctggtcaagttcgagccagggcagtcgtacgcgggtgtggtgcagtacagccacagccagatgcaggagcacgtgagcctgcgcagccccagcatccggaacgtgcaggagctcaaggaagccatcaagagcctgcagtggatggcgggcggcaccttcacgggggaggccctgcagtacacgcgggaccagctgctgccgcccagcccgaacaaccgcatcgccctggtcatcactgacgggcgctcagacactcagagggacaccacaccgctcaacgtgctctgcagccccggcatccaggtggtctccgtgggcatcaaagacgtgtttgacttcatcccaggctcagaccagctcaatgtcatttcttgccaaggcctggcaccatcccagggccggcccggcctctcgctggtcaaggagaactatgcagagctgctggaggatgccttcctgaagaatgtcaccgcccagatctgcatagacaagaagtgtccagattacacctgccccatcacgttctcctccccggctgacatcaccatcctgctggacggctccgccagcgtgggcagccacaactttgacaccaccaagcgcttcgccaagcgcctggccgagcgcttcctcacagcgggcaggacggaccccgcccacgacgtgcgggtggcggtggtgcagtacagcggcacgggccagcagcgcccagagcgggcgtcgctgcagttcctgcagaactacacggccctggccagtgccgtcgatgccatggactttatcaacgacgccaccgacgtcaacgatgccctgggctatgtgacccgcttctaccgcgaggcctcgtccggcgctgccaagaagaggctgctgctcttctcagatggcaactcgcagggcgccacgcccgctgccatcgagaaggccgtgcaggaagcccagcgggcaggcatcgagatcttcgtggtggtcgtgggccgccaggtgaatgagccccacatccgcgtcctggtcaccggcaagacggccgagtacgacgtggcctacggcgagagccacctgttccgtgtccccagctaccaggccctgctccgcggtgtcttccaccagacagtctccaggaaggtggcgctgggctagcccaccctgcacgccggcaccaaaccctgtcctcccacccctccccactcatcactaaacagagtaaaatgtgatgcgaattttcccgaccaacctgattcgctagattttttttaaggaaaagcttggaaagccaggacacaacgctgctgcctgctttgtgcagggtcctccggggctcagccctgagttggcatcacctgcgcagggccctctgggggctcagccctgagctagtgtcacctgcacagggccctctggggctcagccctgagctggcgtcacctgtgcagggccctctggggctcagccctgagctggcctcacctgggttccccaccccgggctctcctgccctgccctcctgcccgccctccctcctgcctgcgcagctccttccctaggcacctctgtgctgcgtcccaccagcctgagcaagacgccctctcggggcctgtgccgcactagcctccctctcctctgtccccatagctggtttttcccaccaatcctcacctaacagttactttacaattaaactcaaagcaagctcttctcctcagcttggggcagccattggcctctgtctcgttttgggaaaccaaggtcaggaggccgttgcagacataaatctcggcgactcggccccgtctcctgagggtcctgctggtgaccggcctggaccttggccctacagccctggaggccgctgctgaccagcactgaccccgacctcagagagtactcgcaggggcgctggctgcactcaagaccctcgagattaacggtgctaaccccgtctgctcctccctcccgcagagactggggcctggactggacatgagagccccttggtgccacagagggctgtgtcttactagaaacaacgcaaacctctccttcctcagaatagtgatgtgttcgacgttttatcaaaggccccctttctatgttcatgttagttttgctccttctgtgtttttttctgaaccatatccatgttgctgacttttccaaataaaggttttcactcctc

SEQ ID NO: 445314 - DNA, 2362 bp, Homo sapiens
ggccagggcactggaggggaggggcgtgctctgctgacaccgcccccgcctgcttgctgtgaatgcaagtgcggccccatcgacctcctgttcgtgctggacagctcagagagcattggcctgcagaacttcgagattgccaaggacttcgtcgtcaaggtcatcgaccggctgagccgggacgagctggtcaagttcgagccagggcagtcgtacgcgggtgtggtgcagtacagccacagccagatgcaggagcacgtgagcctgcgcagccccagcatccggaacgtgcaggagctcaaggaagccatcaagagcctgcagtggatggcgggcggcaccttcacgggggaggccctgcagtacacgcgggaccagctgctgccgcccagcccgaacaaccgcatcgccctggtcatcactgacgggcgctcagacactcagagggacaccacaccgctcaacgtgctctgcagccccggcatccaggtggtctccgtgggcatcaaagacgtgtttgacttcatcccaggctcagaccagctcaatgtcatttcttgccaaggcctggcaccatcccagggccggcccggcctctcgctggtcaaggagaactatgcagagctgctggaggatgccttcctgaagaatgtcaccgcccagatctgcatagacaagaagtgtccagattacacctgccccatcacgttctcctccccggctgacatcaccatcctgctggacggctccgccagcgtgggcagccacaactttgacaccaccaagcgcttcgccaagcgcctggccgagcgcttcctcacagcgggcaggacggaccccgcccacgacgtgcgggtggcggtggtgcagtacagcggcacgggccagcagcgcccagagcgggcgtcgctgcagttcctgcagaactacacggccctggccagtgccgtcgatgccatggactttatcaacgacgccaccgacgtcaacgatgccctgggctatgtgacccgcttctaccgcgaggcctcgtccggcgctgccaagaagaggctgctgctcttctcagatggcaactcgcagggcgccacgcccgctgccatcgagaaggccgtgcaggaagcccagcgggcaggcatcgagatcttcgtggtggtcgtgggccgccaggtgaatgagccccacatccgcgtcctggtcaccggcaagacggccgagtacgacgtggcctacggcgagagccacctgttccgtgtccccagctaccaggccctgctccgcggtgtcttccaccagacagtctccaggaaggtggcgctgggctagcccaccctgcacgccggcaccaaaccctgtcctcccacccctccccactcatcactaaacagagtaaaatgtgatgcgaattttcccgaccaacctgattcgctagattttttttaaggaaaagcttggaaagccaggacacaacgctgctgcctgctttgtgcagggtcctccggggctcagccctgagttggcatcacctgcgcagggccctctgggggctcagccctgagctagtgtcacctgcacagggccctctggggctcagccctgagctggcgtcacctgtgcagggccctctggggctcagccctgagctggcctcacctgggttccccaccccgggctctcctgccctgccctcctgcccgccctccctcctgcctgcgcagctccttccctaggcacctctgtgctgcgtcccaccagcctgagcaagacgccctctcggggcctgtgccgcactagcctccctctcctctgtccccatagctggtttttcccaccaatcctcacctaacagttactttacaattaaactcaaagcaagctcttctcctcagcttggggcagccattggcctctgtctcgttttgggaaaccaaggtcaggaggccgttgcagacataaatctcggcgactcggccccgtctcctgagggtcctgctggtgaccggcctggaccttggccctacagccctggaggccgctgctgaccagcactgaccccgacctcagagagtactcgcaggggcgctggctgcactcaagaccctcgagattaacggtgctaaccccgtctgctcctccctcccgcagagactggggcctggactggacatgagagccccttggtgccacagagggctgtgtcttactagaaacaacgcaaacctctccttcctcagaatagtgatgtgttcgacgttttatcaaaggccccctttctatgttcatgttagttttgctccttctgtgtttttttctgaaccatatccatgttgctgacttttccaaataaaggttttcactcctc

SEQ ID NO: 445315 - DNA, 2531 bp, Homo sapiens
cccgggtgttgggctgggccccgccctctttcacccataactgaaataaccaggagcaggcttgggggggtccctgctccatcattctggcccacaggccccaccctagcctggctgagcaacgccagccctgaccagccgccggacagagcagcctttacggggccatgggagggggtgggcttttctggggctgagacggggggaccccaacgtgtcagcttgctgtgaatgcaagtgcggccccatcgacctcctgttcgtgctggacagctcagagagcattggcctgcagaacttcgagattgccaaggacttcgtcgtcaaggtcatcgaccggctgagccgggacgagctggtcaagttcgagccagggcagtcgtacgcgggtgtggtgcagtacagccacagccagatgcaggagcacgtgagcctgcgcagccccagcatccggaacgtgcaggagctcaaggaagccatcaagagcctgcagtggatggcgggcggcaccttcacgggggaggccctgcagtacacgcgggaccagctgctgccgcccagcccgaacaaccgcatcgccctggtcatcactgacgggcgctcagacactcagagggacaccacaccgctcaacgtgctctgcagccccggcatccaggtggtctccgtgggcatcaaagacgtgtttgacttcatcccaggctcagaccagctcaatgtcatttcttgccaaggcctggcaccatcccagggccggcccggcctctcgctggtcaaggagaactatgcagagctgctggaggatgccttcctgaagaatgtcaccgcccagatctgcatagacaagaagtgtccagattacacctgccccatcacgttctcctccccggctgacatcaccatcctgctggacggctccgccagcgtgggcagccacaactttgacaccaccaagcgcttcgccaagcgcctggccgagcgcttcctcacagcgggcaggacggaccccgcccacgacgtgcgggtggcggtggtgcagtacagcggcacgggccagcagcgcccagagcgggcgtcgctgcagttcctgcagaactacacggccctggccagtgccgtcgatgccatggactttatcaacgacgccaccgacgtcaacgatgccctgggctatgtgacccgcttctaccgcgaggcctcgtccggcgctgccaagaagaggctgctgctcttctcagatggcaactcgcagggcgccacgcccgctgccatcgagaaggccgtgcaggaagcccagcgggcaggcatcgagatcttcgtggtggtcgtgggccgccaggtgaatgagccccacatccgcgtcctggtcaccggcaagacggccgagtacgacgtggcctacggcgagagccacctgttccgtgtccccagctaccaggccctgctccgcggtgtcttccaccagacagtctccaggaaggtggcgctgggctagcccaccctgcacgccggcaccaaaccctgtcctcccacccctccccactcatcactaaacagagtaaaatgtgatgcgaattttcccgaccaacctgattcgctagattttttttaaggaaaagcttggaaagccaggacacaacgctgctgcctgctttgtgcagggtcctccggggctcagccctgagttggcatcacctgcgcagggccctctgggggctcagccctgagctagtgtcacctgcacagggccctctggggctcagccctgagctggcgtcacctgtgcagggccctctggggctcagccctgagctggcctcacctgggttccccaccccgggctctcctgccctgccctcctgcccgccctccctcctgcctgcgcagctccttccctaggcacctctgtgctgcgtcccaccagcctgagcaagacgccctctcggggcctgtgccgcactagcctccctctcctctgtccccatagctggtttttcccaccaatcctcacctaacagttactttacaattaaactcaaagcaagctcttctcctcagcttggggcagccattggcctctgtctcgttttgggaaaccaaggtcaggaggccgttgcagacataaatctcggcgactcggccccgtctcctgagggtcctgctggtgaccggcctggaccttggccctacagccctggaggccgctgctgaccagcactgaccccgacctcagagagtactcgcaggggcgctggctgcactcaagaccctcgagattaacggtgctaaccccgtctgctcctccctcccgcagagactggggcctggactggacatgagagccccttggtgccacagagggctgtgtcttactagaaacaacgcaaacctctccttcctcagaatagtgatgtgttcgacgttttatcaaaggccccctttctatgttcatgttagttttgctccttctgtgtttttttctgaaccatatccatgttgctgacttttccaaataaaggttttcactcctc

SEQ ID NO: 445316 - DNA, 2036 bp, Homo sapiens
agctcggcaccccggtgtggtgctccgccctgcgttggctctagaggtggttgagggggcgctatacgaacaataccgtcgctctgttcaacactgtcaggcgctcagacactgggagggtgaccagaacgctcaacgtgctttgaagtacccgcttccagccgtggtctccgtgggcatcaaagacgtgtttgacttcatcccaggctcagaccagctcaatgtcatttcttgccaaggcctggcaccatcccagggccggcccggcctctcgctggtcaaggagaactatgcagagctgctggaggatgccttcctgaagaatgtcaccgcccagatctgcatagacaagaagtgtccagattacacctgccccatcacgttctcctccccggctgacatcaccatcctgctggacggctccgccagcgtgggcagccacaactttgacaccaccaagcgcttcgccaagcgcctggccgagcgcttcctcacagcgggcaggacggaccccgcccacgacgtgcgggtggcggtggtgcagtacagcggcacgggccagcagcgcccagagcgggcgtcgctgcagttcctgcagaactacacggccctggccagtgccgtcgatgccatggactttatcaacgacgccaccgacgtcaacgatgccctgggctatgtgacccgcttctaccgcgaggcctcgtccggcgctgccaagaagaggctgctgctcttctcagatggcaactcgcagggcgccacgcccgctgccatcgagaaggccgtgcaggaagcccagcgggcaggcatcgagatcttcgtggtggtcgtgggccgccaggtgaatgagccccacatccgcgtcctggtcaccggcaagacggccgagtacgacgtggcctacggcgagagccacctgttccgtgtccccagctaccaggccctgctccgcggtgtcttccaccagacagtctccaggaaggtggcgctgggctagcccaccctgcacgccggcaccaaaccctgtcctcccacccctccccactcatcactaaacagagtaaaatgtgatgcgaattttcccgaccaacctgattcgctagattttttttaaggaaaagcttggaaagccaggacacaacgctgctgcctgctttgtgcagggtcctccggggctcagccctgagttggcatcacctgcgcagggccctctgggggctcagccctgagctagtgtcacctgcacagggccctctggggctcagccctgagctggcgtcacctgtgcagggccctctggggctcagccctgagctggcctcacctgggttccccaccccgggctctcctgccctgccctcctgcccgccctccctcctgcctgcgcagctccttccctaggcacctctgtgctgcgtcccaccagcctgagcaagacgccctctcggggcctgtgccgcactagcctccctctcctctgtccccatagctggtttttcccaccaatcctcacctaacagttactttacaattaaactcaaagcaagctcttctcctcagcttggggcagccattggcctctgtctcgttttgggaaaccaaggtcaggaggccgttgcagacataaatctcggcgactcggccccgtctcctgagggtcctgctggtgaccggcctggaccttggccctacagccctggaggccgctgctgaccagcactgaccccgacctcagagagtactcgcaggggcgctggctgcactcaagaccctcgagattaacggtgctaaccccgtctgctcctccctcccgcagagactggggcctggactggacatgagagccccttggtgccacagagggctgtgtcttactagaaacaacgcaaacctctccttcctcagaatagtgatgtgttcgacgttttatcaaaggccccctttctatgttcatgttagttttgctccttctgtgtttttttctgaaccatatccatgttgctgacttttccaaataaaggttttcactcctc

SEQ ID NO: 445317 - DNA, 4611 bp, Homo sapiens
  misc_feature (110)..(110): n is a, c, g, or t
  misc_feature (4437)..(4437): n is a, c, g, or t
tccttgccctccgctctcactctggctgggagcagaaggcagcctcggtctctgggcggcggcggcggcccactctgccctggccgcgctgtgtggtgaccgcaggcccnagacatgagggcggcccgtgctctgctgcccctgctgctgcaggcctgctggacagccgcgcaggatgagccggagaccccgagggccgtggccttccaggactgccccgtggacctgttctttgtgctggacacctctgagagcgtggccctgaggctgaagccctacggggccctcgtggacaaagtcaagtccttcaccaagcgcttcatcgacaacctgagggacaggtactaccgctgtgaccgaaacctggtgtggaacgcaggcgcgctgcactacagtgacgaggtggagatcatccaaggcctcacgcgcatgcctggcggccgcgacgcactcaaaagcagcgtggacgcggtcaagtactttgggaagggcacctacaccgactgcgctatcaagaaggggctggagcagctcctcgtggggggctcccacctgaaggagaataagtacctgattgtggtgaccgacgggcaccccctggagggctacaaggaaccctgtggggggctggaggatgctgtgaacgaggccaagcacctgggcgtcaaagtcttctcggtggccatcacacccgaccacctggagccgcgtctgagcatcatcgccacggaccacacgtaccggcgcaacttcacggcggctgactggggccagagccgcgacgcagaggaggccatcagccagaccatcgacaccatcgtggacatgatcaaaaataacgtggagcaagtgtgctgctccttcgaatgccagcctgcaagaggacctccggggctccggggcgaccccggctttgagggagaacgaggcaagccggggctcccaggagagaagggagaagccggagatcctggaagacccggggacctcggacctgttgggtaccagggaatgaagggagaaaaagggagccgtggggagaagggctccaggggacccaagggctacaagggagagaagggcaagcgtggcatcgacggggtggacggcgtgaagggggagatggggtacccaggcctgccaggctgcaagggctcgcccgggtttgacggcattcaaggaccccctggccccaagggagaccccggtgcctttggactgaaaggagaaaagggcgagcctggagctgacggggaggcggggagaccagggagctcgggaccatctggagacgagggccagccgggagagcctgggccccccggagagaaaggagaggcgggcgacgaggggaacccaggacctgacggtgcccccggggagcggggtggccctggagagagaggaccacgggggaccccaggcacgcggggaccaagaggagaccctggtgaagctggcccgcagggtgatcagggaagagaaggccccgttggtgtccctggagacccgggcgaggctggccctatcggacctaaaggctaccgaggcgatgagggtcccccagggtccgagggtgccagaggagccccaggacctgccggaccccctggagacccggggctgatgggtgaaaggggagaagacggccccgctggaaatggcaccgagggcttccccggcttccccgggtatccgggcaacaggggcgctcccgggataaacggcacgaagggctaccccggcctcaagggggacgagggagaagccggggaccccggagacgataacaacgacattgcaccccgaggagtcaaaggagcaaaggggtaccggggtcccgagggcccccagggacccccaggacaccaaggaccgcctgggccggacgaatgcgagattttggacatcatcatgaaaatgtgctcttgctgtgaatgcaagtgcggccccatcgacctcctgttcgtgctggacagctcagagagcattggcctgcagaacttcgagattgccaaggacttcgtcgtcaaggtcatcgaccggctgagccgggacgagctggtcaagttcgagccagggcagtcgtacgcgggtgtggtgcagtacagccacagccagatgcaggagcacgtgagcctgcgcagccccagcatccggaacgtgcaggagctcaaggaagccatcaagagcctgcagtggatggcgggcggcaccttcacgggggaggccctgcagtacacgcgggaccagctgctgccgcccagcccgaacaaccgcatcgccctggtcatcactgacgggcgctcagacactcagagggacaccacaccgctcaacgtgctctgcagccccggcatccaggtggtctccgtgggcatcaaagacgtgtttgacttcatcccaggctcagaccagctcaatgtcatttcttgccaaggcctggcaccatcccagggccggcccggcctctcgctggtcaaggagaactatgcagagctgctggaggatgccttcctgaagaatgtcaccgcccagatctgcatagacaagaagtgtccagattacacctgccccatcacgttctcctccccggctgacatcaccatcctgctggacggctccgccagcgtgggcagccacaactttgacaccaccaagcgcttcgccaagcgcctggccgagcgcttcctcacagcgggcaggacggaccccgcccacgacgtgcgggtggcggtggtgcagtacagcggcacgggccagcagcgcccagagcgggcgtcgctgcagttcctgcagaactacacggccctggccagtgccgtcgatgccatggactttatcaacgacgccaccgacgtcaacgatgccctgggctatgtgacccgcttctaccgcgaggcctcgtccggcgctgccaagaagaggctgctgctcttctcagatggcaactcgcagggcgccacgcccgctgccatcgagaaggccgtgcaggaagcccagcgggcaggcatcgagatcttcgtggtggtcgtgggccgccaggtgaatgagccccacatccgcgtcctggtcaccggcaagacggccgagtacgacgtggcctacggcgagagccacctgttccgtgtccccagctaccaggccctgctccgcggtgtcttccaccagacagtctccaggaaggtggcgctgggctagcccaccctgcacgccggcaccaaaccctgtcctcccacccctccccactcatcactaaacagagtaaaatgtgatgcgaattttcccgaccaacctgattcgctagattttttttaaggaaaagcttggaaagccaggacacaacgctgctgcctgctttgtgcagggtcctccggggctcagccctgagttggcatcacctgcgcagggccctctgggggctcagccctgagctagtgtcacctgcacagggccctctggggctcagccctgagctggcgtcacctgtgcagggccctctggggctcagccctgagctggcctcacctgggttccccaccccgggctctcctgccctgccctcctgcccgccctccctcctgcctgcgcagctccttccctaggcacctctgtgctgcgtcccaccagcctgagcaagacgccctctcggggcctgtgccgcactagcctccctctcctctgtccccatagctggtttttcccaccaatcctcacctaacagttactttacaattaaactcaaagcaagctcttctcctcagcttggggcagccattggccctacagccctggaggccgctgctgaccagcactgaccccgacctcagagagtactcgcaggggcgctggctgcactcaagaccctcgagattaacggtgctaaccccgtctgctcctccctcccgcagagactggggcctggactggacatgagagccccttggtgccacagagggctgtgtcttactagaaacaacgcaaacctctccttcctcagaatagtgatgtgttcgacgttttatcaaaggccccctttctatgttcatgttagttttgctccttctgtgtttttttctgaaccatatccatgttgctgacttttccaaataaaggttttcactcctcaaaaaaaaaaaacactaacaacaccaaaaaaacacattttggggggccgctttgcgcccttcgaaaaaggttttataaacaaccatttcggtttgggggcgggggcccccagaggtgtgtaatggacacccggggggccacagcggtgctcccaaaagggaaaaccggggcaagcctaggggtttcgtcttctcccaataaaaacgcgggccgcaccggcgtttgcgaaacacacccaatgggggttcggggccaactcggactctacacaggacccaggagccgattaataccaccccggggtgtatnacaatcaacacacactaacgaaacagacaagcaccaaaatacaaggaacgactaacacaatcatcaatgcaccactcaaacgtatcaacaatgagaagaacacaacacagcatcaataagaacaacatcaggaatcatagcatcatataacaaaatatacaatcacaacacaca

SEQ ID NO: 445318 - DNA, 4644 bp, Homo sapiens
  misc_feature (110)..(110): n is a, c, g, or t
tccttgccctccgctctcactctggctgggagcagaaggcagcctcggtctctgggcggcggcggcggcccactctgccctggccgcgctgtgtggtgaccgcaggcccnagacatgagggcggcccgtgctctgctgcccctgctgctgcaggcctgctggacagccgcgcaggatgagccggagaccccgagggccgtggccttccaggactgccccgtggacctgttctttgtgctggacacctctgagagcgtggccctgaggctgaagccctacggggccctcgtggacaaagtcaagtccttcaccaagcgcttcatcgacaacctgagggacaggtactaccgctgtgaccgaaacctggtgtggaacgcaggcgcgctgcactacagtgacgaggtggagatcatccaaggcctcacgcgcatgcctggcggccgcgacgcactcaaaagcagcgtggacgcggtcaagtactttgggaagggcacctacaccgactgcgctatcaagaaggggctggagcagctcctcgtggggggctcccacctgaaggagaataagtacctgattgtggtgaccgacgggcaccccctggagggctacaaggaaccctgtggggggctggaggatgctgtgaacgaggccaagcacctgggcgtcaaagtcttctcggtggccatcacacccgaccacctggagccgcgtctgagcatcatcgccacggaccacacgtaccggcgcaacttcacggcggctgactggggccagagccgcgacgcagaggaggccatcagccagaccatcgacaccatcgtggacatgatcaaaaataacgtggagcaagtgtgctgctccttcgaatgccagcctgcaagaggacctccggggctccggggcgaccccggctttgagggagaacgaggcaagccggggctcccaggagagaagggagaagccggagatcctggaagacccggggacctcggacctgttgggtaccagggaatgaagggagaaaaagggagccgtggggagaagggctccaggggacccaagggctacaagggagagaagggcaagcgtggcatcgacggggtggacggcgtgaagggggagatggggtacccaggcctgccaggctgcaagggctcgcccgggtttgacggcattcaaggaccccctggccccaagggagaccccggtgcctttggactgaaaggagaaaagggcgagcctggagctgacggggaggcggggagaccagggagctcgggaccatctggagacgagggccagccgggagagcctgggccccccggagagaaaggagaggcgggcgacgaggggaacccaggacctgacggtgcccccggggagcggggtggccctggagagagaggaccacgggggaccccaggcacgcggggaccaagaggagaccctggtgaagctggcccgcagggtgatcagggaagagaaggccccgttggtgtccctggagacccgggcgaggctggccctatcggacctaaaggctaccgaggcgatgagggtcccccagggtccgagggtgccagaggagccccaggacctgccggaccccctggagacccggggctgatgggtgaaaggggagaagacggccccgctggaaatggcaccgagggcttccccggcttccccgggtatccgggcaacaggggcgctcccgggataaacggcacgaagggctaccccggcctcaagggggacgagggagaagccggggaccccggagacgataacaacgacattgcaccccgaggagtcaaaggagcaaaggggtaccggggtcccgagggcccccagggacccccaggacaccaaggaccgcctgggccggacgaatgcgagattttggacatcatcatgaaaatgtgctcttgctgtgaatgcaagtgcggccccatcgacctcctgttcgtgctggacagctcagagagcattggcctgcagaacttcgagattgccaaggacttcgtcgtcaaggtcatcgaccggctgagccgggacgagctggtcaagttcgagccagggcagtcgtacgcgggtgtggtgcagtacagccacagccagatgcaggagcacgtgagcctgcgcagccccagcatccggaacgtgcaggagctcaaggaagccatcaagagcctgcagtggatggcgggcggcaccttcacgggggaggccctgcagtacacgcgggaccagctgctgccgcccagcccgaacaaccgcatcgccctggtcatcactgacgggcgctcagacactcagagggacaccacaccgctcaacgtgctctgcagccccggcatccaggtggtctccgtgggcatcaaagacgtgtttgacttcatcccaggctcagaccagctcaatgtcatttcttgccaaggcctggcaccatcccagggccggcccggcctctcgctggtcaaggagaactatgcagagctgctggaggatgccttcctgaagaatgtcaccgcccagatctgcatagacaagaagtgtccagattacacctgccccatcacgttctcctccccggctgacatcaccatcctgctggacggctccgccagcgtgggcagccacaactttgacaccaccaagcgcttcgccaagcgcctggccgagcgcttcctcacagcgggcaggacggaccccgcccacgacgtgcgggtggcggtggtgcagtacagcggcacgggccagcagcgcccagagcgggcgtcgctgcagttcctgcagaactacacggccctggccagtgccgtcgatgccatggactttatcaacgacgccaccgacgtcaacgatgccctgggctatgtgacccgcttctaccgcgaggcctcgtccggcgctgccaagaagaggctgctgctcttctcagatggcaactcgcagggcgccacgcccgctgccatcgagaaggccgtgcaggaagcccagcgggcaggcatcgagatcttcgtggtggtcgtgggccgccaggtgaatgagccccacatccgcgtcctggtcaccggcaagacggccgagtacgacgtggcctacggcgagagccacctgttccgtgtccccagctaccaggccctgctccgcggtgtcttccaccagacagtctccaggaaggtggcgctgggctagcccaccctgcacgccggcaccaaaccctgtcctcccacccctccccactcatcactaaacagagtaaaatgtgatgcgaattttcccgaccaacctgattcgctagattttttttaaggaaaagcttggaaagccaggacacaacgctgctgcctgctttgtgcagggtcctccggggctcagccctgagttggcatcacctgcgcagggccctctgggggctcagccctgagctagtgtcacctgcacagggccctctggggctcagccctgagctggcgtcacctgtgcagggccctctggggctcagccctgagctggcctcacctgggttccccaccccgggctctcctgccctgccctcctgcccgccctccctcctgcctgcgcagctccttccctaggcacctctgtgctgcgtcccaccagcctgagcaagacgccctctcggggcctgtgccgcactagcctccctctcctctgtccccatagctggtttttcccaccaatcctcacctaacagttactttacaattaaactcaaagcaagctcttctcctcagcttggggcagccattggccctacagccctggaggccgctgctgaccagcactgaccccgacctcagagagtactcgcaggggcgctggctgcactcaagaccctcgagattaacggtgctaaccccgtctgctcctccctcccgcagagactggggcctggactggacatgagagccccttggtgccacagagggctgtgtcttactagaaacaacgcaaacctctccttcctcagaatagtgatgtgttcgacgttttatcaaaggccccctttctatgttcatgttagttttgctccttctgtgtttttttctgaaccatatccatgttgctgacttttccaaataaaggttttcactcctcaaaaaagaaaacaaacaaacacaaacaatacaaaaaaaaaaaaaaaaagaaaacaaacagaagggggggggcgagcgagcgcacacaagaaaaactcaccgcaggaggaggagggcccccaaaagcatgcaccaccgcacagacgcagcgcaattcgtgcgaggaccaaacaggcgcggagacgccaaactaagggagagacagccctacagcgctccaaacacgagccgcagcaaagcgcgctcgcacggcatccaaacaaaaacagcaggccggacgcacgccggcaacccacccgccgcgcaaacgcggcaggcgagacgacccgtggacgcagaggaacgaccccccacaacaacccgggccggggcgaagcaccacaaccgcggcgcgccaacagacccaacccaacgaaagttgacaagcgcccaccccacggggcaccacatcacaacacacccgctcgacggggaccaaccaggccgctcctcacaacagacgggcaaaaaacggcag

SEQ ID NO: 445319 - DNA, 1072 bp, Homo sapiens
accagctcggggttggagtgcagccagcgcccctgcgagtactctctgaggtcggggtcagtgctggtcagcagcggccttcagggctgtagggccaaggtccaggccggtcaccagcaggaccctcaggagacggggctagattttttttaaggaaaagcttggaaagccaggacacaacgctgctgcctgctttgtgcagggtcctccggggctcagccctgagttggcatcacctgcgcagggccctctgggggctcagccctgagctagtgtcacctgcacagggccctctggggctcagccctgagctggcgtcacctgtgcagggccctctggggctcagccctgagctggcctcacctgggttccccaccccgggctctcctgccctgccctcctgcccgccctccctcctgcctgcgcagctccttccctaggcacctctgtgctgcgtcccaccagcctgagcaagacgccctctcggggcctgtgccgcactagcctccctctcctctgtccccatagctggtttttcccaccaatcctcacctaacagttactttacaattaaactcaaagcaagctcttctcctcagcttggggcagccattggcctctgtctcgttttgggaaaccaaggtcaggaggccgttgcagacataaatctcggcgactcggccccgtctcctgagggtcctgctggtgaccggcctggaccttggccctacagccctggaggccgctgctgaccagcactgaccccgacctcagagagtactcgcaggggcgctggctgcactcaagaccctcgagattaacggtgctaaccccgtctgctcctccctcccgcagagactggggcctggactggacatgagagccccttggtgccacagagggctgtgtcttactagaaacaacgcaaacctctccttcctcagaatagtgatgtgttcgacgttttatcaaaggccccctttctatgttcatgttagttttgctccttctgtgtttttttctgaaccatatccatgttgctgacttttccaaataaaggttttcactcctc

SEQ ID NO: 445320 - DNA, 2146 bp, Homo sapiens
  misc_feature (110)..(110): n is a, c, g, or t
tccttgccctccgctctcactctggctgggagcagaaggcagcctcggtctctgggcggcggcggcggcccactctgccctggccgcgctgtgtggtgaccgcaggcccnagacatgagggcggcccgtgctctgctgcccctgctgctgcaggcctgctggacagccgcgcaggatgagccggagaccccgagggccgtggccttccaggactgccccgtggacctgttctttgtgctggacacctctgagagcgtggccctgaggctgaagccctacggggccctcgtggacaaagtcaagtccttcaccaagcgcttcatcgacaacctgagggacaggtactaccgctgtgaccgaaacctggtgtggaacgcaggcgcgctgcactacagtgacgaggtggagatcatccaaggcctcacgcgcatgcctggcggccgcgacgcactcaaaagcagcgtggacgcggtcaagtactttgggaagggcacctacaccgactgcgctatcaagaaggggctggagcagctcctcgtggggggctcccacctgaaggagaataagtacctgattgtggtgaccgacgggcaccccctggagggctacaaggaaccctgtggggggctggaggatgctgtgaacgaggccaagcacctgggcgtcaaagtcttctcggtggccatcacacccgaccacctggagccgcgtctgagcatcatcgccacggaccacacgtaccggcgcaacttcacggcggctgactggggccagagccgcgacgcagaggaggccatcagccagaccatcgacaccatcgtggacatgatcaaaaataacgtggagcaagtgtgctgctccttcgaatgccagcctgcaagaggacctccggggctccggggcgaccccggctttgagggagaacgaggcaagccggggctcccaggagagaagggagaagccggagatcctggaagacccggggacctcggacctgttgggtaccagggaatgaagggagaaaaagggagccgtggggagaagggctccaggggacccaagggctacaagggagagaagggcaagcgtggcatcgacggggtggacggcgtgaagggggagatggggtacccaggcctgccaggctgcaagggctcgcccgggtttgacggcattcaaggaccccctggccccaagggagaccccggtgcctttggactgaaaggagaaaagggcgagcctggagctgacggggaggcggggagaccagggagctcgggaccatctggagacgagggccagccgggagagcctgggccccccggagagaaaggagaggcgggcgacgaggggaacccaggacctgacggtgcccccggggagcggggtggccctggagagagaggaccacgggggaccccaggcacgcggggaccaagaggagaccctggtgaagctggcccgcagggtgatcagggaagagaaggccccgttggtgtccctggagacccgggcgaggctggccctatcggacctaaaggctaccgaggcgatgagggtcccccagggtccgagggtgccagaggagccccaggacctgccggaccccctggagacccggggctgatgggtgaaaggggagaagacggccccgctggaaatggcaccgagggcttccccggcttccccgggtatccgggcaacaggggcgctcccgggataaacggcacgaagggctaccccggcctcaagggggacgagggagaagccggggaccccggagacgataacaacgacattgcaccccgaggagtcaaaggagcaaaggggtaccggggtcccgagggcccccagggacccccaggacaccaaggaccgcctgggccggacgaatgcgagattttggacatcatcatgaaaatgtgctcttgctgtgaatgcaagtgcggccccatcgacctcctgttcgtgctggacagctcagagagcattggcctgcagaacttcgagattgccaaggacttcgtcgtcaaggtcatcgaccggctgagccgggacgagctggtcaagcctgggatgaagtcaaacacgtctttgatgcccacggagaccacctggatgccggggctgcagagcacgttgagcg

SEQ ID NO: 445321 - DNA, 1098 bp, Homo sapiens
  misc_feature (110)..(110): n is a, c, g, or t
  misc_feature (1057)..(1057): n is a, c, g, or t
tccttgccctccgctctcactctggctgggagcagaaggcagcctcggtctctgggcggcggcggcggcccactctgccctggccgcgctgtgtggtgaccgcaggcccnagacatgagggcggcccgtgctctgctgcccctgctgctgcaggcctgctggacagccgcgcaggatgagccggagaccccgagggccgtggccttccaggactgccccgtggacctgttctttgtgctggacacctctgagagcgtggccctgaggctgaagccctacggggccctcgtggacaaagtcaagtccttcaccaagcgcttcatcgacaacctgagggacaggtactaccgctgtgaccgaaacctggtgtggaacgcaggcgcgctgcactacagtgacgaggtggagatcatccaaggcctcacgcgcatgcctggcggccgcgacgcactcaaaagcagcgtggacgcggtcaagtactttgggaagggcacctacaccgactgcgctatcaagaaggggctggagcagctcctcgtggggggctcccacctgaaggagaataagtacctgattgtggtgaccgacgggcaccccctggagggctacaaggaaccctgtggggggctggaggatgctgtgaacgaggccaagcacctgggcgtcaaagtcttctcggtggccatcacacccgaccacctggagccgcgtctgagcatcatcgccacggaccacacgtaccggcgcaacttcacggcggctgactggggccagagccgcgacgcagaggaggccatcagccagaccatcgacaccatcgtggacatgatcaaaaataacgtggagcaagtgtgctgctccttcgaatgccagcctgcaagaggacctccggggctccggggcgaccccggctttgagggagaacgaggcaagccggggctcccaggagagaagggagaagccggagatcctggaagacccggggacctcggacctgttgggtaccagggaatgaagggagaaaaagggagccgtggggagaagggctccagggacncaagggctcccttttcccacttcagattgtcctgtgccgaa

SEQ ID NO: 445322 - DNA, 705 bp, Homo sapiens
tgcctggcacaggattggcacacagtagatattgtcagagatggatctgggttctgtggacaaggctgtgggggcaggtgaagagctccctcttccaggaggttgtttggggttcaaggccttgtttgggttgtaggcttctgtgctggtcagcgttgggccctacaagcgcatgccatgaggcctgcccaggatttccctcatggcctcacagaatacatcggccagagtcattaaagggcgcctgcatctgccttcagagagaggtttgaaggtagaactggggagggatgccaggtgggggttcaggtttcctgttgggtcctgatagaatcagggcaggagaggaagaagaagagggaagaggaggaacccaggcttggggaggggtggcagggcttcacaagcctggggaaggtgaactagggagcagttggggccaccatggcccagagtctatgcctcctcttccttcctgtgttcagagtgtgtgtgggaaccacaagggccttctcagtgttcatagggaagcccggttcacccatgggtgggccgcaatttgggtgccacagtgagcccctagagaccagctctcccagcttccaggacagggactaggggaggcaagagaggctcttccttaaattgtgcacccaaggtgcctcagctgccttactctagactggccccgttaactccccttaa

SEQ ID NO: 445323 - DNA, 541 bp, Homo sapiens
tgcctggcacaggattggcacacagtagatattgtcagagatggatctgggttctgtggacaaggctgtgggggcaggtgaagagctccctcttccaggaggttgtttggggttcaaggccttgtttgggttgtaggcttctgtgctggtcagcgttgggccctacaagcgcatgccatgaggcctgcccaggatttccctcatggcctcacagaatacatcggccagagtcattaaagggcgcctggggaaggtgaactagggagcagttggggccaccatggcccagagtctatgcctcctcttccttcctgtgttcagagtgtgtgtgggaaccacaagggccttctcagtgttcatagggaagcccggttcacccatgggtgggccgcaatttgggtgccacagtgagcccctagagaccagctctcccagcttccaggacagggactaggggaggcaagagaggctcttccttaaattgtgcacccaaggtgcctcagctgccttactctagactggccccgttaactccccttaa

SEQ ID NO: 445324 - DNA, 277 bp, Homo sapiens
ctcatctataatggccccagtgcctggcacaggattggcacacagtagatattgtcagagatggatctgggttctgtggacaaggctgtgggggcaggtgaagagctccctcttccaggaggttgtttggggttcaaggccttgtttgggttgtaggcttctgtgctggtcagcgttgggccctacaagcgcatgccatgaggcctgcccaggatttccctcatggcctcacagaatacatcggccagagtcattaaagggcgcctgcatctgcctt

SEQ ID NO: 445325 - DNA, 2440 bp, Homo sapiens
ggcgtggggcggggcctgggccggcgccgggtccggccgggcgctcagccagctgcgtaaactccgctggagcgcggcggcggagcaggcatttccagcagtgaggagacagccagaagcaagcttttggagctgaaggaacctgagacagaagctagtcccccctctgaattttactgatgaagaaactgaggccacagagctaaagtgacttttcccaaggtcgcccagcgaggacgtgggacttctcagacgtcaggagagtgatgtgagggagctgtgtgaccatagaaagtgacgtgttaaaaaccagcgctgccctctttgaaagccagggagcatcattcatttagcctgctgagaagaagaaaccaagtgtccgggattcagacctctctgcggccccaagtgttcgtggtgcttccagaggcagggctatgctcacattcatggcctctgacagcgaggaagaagtgtgtgatgagcggacgtccctaatgtcggccgagagccccacgccgcgctcctgccaggagggcaggcagggcccagaggatggagagaatactgcccagtggagaagccaggagaacgaggaggacggtgaggaggaccctgaccgctatgtctgtagtggggttcccgggcggccgccaggcctggaggaagagctgaccctcaaatacggagcgaagcacgtgatcatgctgtttgtgcctgtcactctgtgcatgatcgtggtggtagccaccatcaagtctgtgcgcttctacacagagaagaatggacagctcatctacacgccattcactgaggacacaccctcggtgggccagcgcctcctcaactccgtgctgaacaccctcatcatgatcagcgtcatcgtggttatgaccatcttcttggtggtgctctacaagtaccgctgctacaagttcatccatggctggttgatcatgtcttcactgatgctgctgttcctcttcacctatatctaccttggggaagtgctcaagacctacaatgtggccatggactaccccaccctcttgctgactgtctggaacttcggggcagtgggcatggtgtgcatccactggaagggccctctggtgctgcagcaggcctacctcatcatgatcagtgcgctcatggccctagtgttcatcaagtacctcccagagtggtccgcgtgggtcatcctgggcgccatctctgtgtatgatctcgtggctgtgctgtgtcccaaagggcctctgagaatgctggtagaaactgcccaggagagaaatgagcccatattccctgccctgatatactcatctgccatggtgtggacggttggcatggcgaagctggacccctcctctcagggtgccctccagctcccctacgacccggagatggaagaagactcctatgacagttttggggagccttcataccccgaagtctttgagcctcccttgactggctacccaggggaggagctggaggaagaggaggaaaggggcgtgaagcttggcctcggggacttcatcttctacagtgtgctggtgggcaaggcggctgccacgggcagcggggactggaataccacgctggcctgcttcgtggccatcctcattggcttgtgtctgaccctcctgctgcttgctgtgttcaagaaggcgctgcccgccctccccatctccatcacgttcgggctcatcttttacttctccacggacaacctggtgcggccgttcatggacaccctggcctcccatcagctctacatctgagggacatggtgtgccacaggctgcaagctgcagggaattttcattggatgcagttgtatagttttacactctagtgccatatatttttaagacttttctttccttaaaaaataaagtacgtgtttacttggtgaggaggaggcagaaccagctctttggtgccagctgtttcatcaccagactttggctcccgctttggggagcgcctcgcttcacggacaggaagcacagcaggtttatccagatgaactgagaaggtcagattagggcggggagaagagcatccggcatgagggctgagatgcgcaaagagtgtgctcgggagtggcccctggcacctgggtgctctggctggagaggaaaagccagttccctacgaggagtgttcccaatgctttgtccatgatgtccttgttattttattgcctttagaaactgagtcctgttcttgttacggcagtcacactgctgggaagtggcttaatagtaatatcaataaatagatgagtcctgttagaatcttggagtttggtccgttgtaaatgttgacccctctccctgcatcttgggcacccctgggataacttgtgctgtgagcccaggatggaggcagtttgccctgtttgaaggaacttttaatgatctcgcctctctgc

SEQ ID NO: 445326 - DNA, 573 bp, Homo sapiens
tgcccttaacacctcaagagctgttgcaggaccagggaagataatggggtgtctagcgccgttatccgactggtcctcgaacaagctcctgtgcccagggactagaccatgactcacagctcctgtccacaccagggatcaccacgctcaccctcccctccatgtcctgcagggggcttgtgtctgaccctcctgctgcttgctgtgttcaagaaggcgctgcccgccctccccatctccatcacgttcgggctcatcttttacttcttcacggacaggaagcacagcaggtttatccagatgaactgagaaggtcagattagggcggggagaagagcatccggcatgagggctgagatgcgcaaagagtgtgctcgggagtggcccctggcacctgggtgctctggctggagaggaaaagccagttccctacgaggagtgttcccaatgctttgtccatgatgtccttgttattttattgcctttagaaactgagtcctgttcttgttacggcagtcacactgctgggaagtggcttaatagtaatatcaataaatagatgagtcctgttag

SEQ ID NO: 445327 - DNA, 3052 bp, Homo sapiens
ggcgtggggcggggcctgggccggcgccgggtccggccgggcgctcagccagctgcgtaaactccgctggagcgcggcggcggagcaggtgagcgggcggtgccggggggtgcccaggccagggccctgtcgcctgcggcgctgagggcccggggtggggctgcgccctgagggccctgccctgccctccgcacgcctctggccacggtcccttccccggctgtgggtctgcggcccctgcgtgcgcagcgctcctggcctctgcggccagcgcgggggcggagagaggagagtgcccggcaggcggcggctgggccggcccggaactgggtcgtggaaggatcgcggggagcggccctcaggccttcggcctcactgcgtccccacttccctgcgcccgcctgccgccgagccccggctgggggtgggcgcggcgcgagcggttaaagggccggtgcatttaaaggagcggtgcacgtgggtctctgaggcgtgtagcaggcgggggcgttttgttcttcttctctctcgccggagacctccgttgcgccgagtccattcggcctctagcaccgggtcctgggcatgctttccccgggaaggaggcgcgcgggggctctgcccgcacgtgaggggcagggccgcaggctcaagcctagagccggtttctgttagcagcggtgtttggctgttttatcaggcatttccagcagtgaggagacagccagaagcaagcttttggagctgaaggaacctgagacagaagctagtcccccctctgaattttactgatgaagaaactgaggccacagagctaaagtgacttttcccaaggtcgcccagcgaggacgtgggacttctcagacgtcaggagagtgatgtgagggagctgtgtgaccatagaaagtgacgtgttaaaaaccagcgctgccctctttgaaagccagggagcatcattcatttagcctgctgagaagaagaaaccaagtgtccgggattcagacctctctgcggccccaagtgttcgtggtgcttccagaggcagggctatgctcacattcatggcctctgacagcgaggaagaagtgtgtgatgagcggacgtccctaatgtcggccgagagccccacgccgcgctcctgccaggagggcaggcagggcccagaggatggagagaatactgcccagtggagaagccaggagaacgaggaggacggtgaggaggaccctgaccgctatgtctgtagtggggttcccgggcggccgccaggcctggaggaagagctgaccctcaaatacggagcgaagcacgtgatcatgctgtttgtgcctgtcactctgtgcatgatcgtggtggtagccaccatcaagtctgtgcgcttctacacagagaagaatggacagctcatctacacgccattcactgaggacacaccctcggtgggccagcgcctcctcaactccgtgctgaacaccctcatcatgatcagcgtcatcgtggttatgaccatcttcttggtggtgctctacaagtaccgctgctacaagttcatccatggctggttgatcatgtcttcactgatgctgctgttcctcttcacctatatctaccttggggaagtgctcaagacctacaatgtggccatggactaccccaccctcttgctgactgtctggaacttcggggcagtgggcatggtgtgcatccactggaagggccctctggtgctgcagcaggcctacctcatcatgatcagtgcgctcatggccctagtgttcatcaagtacctcccagagtggtccgcgtgggtcatcctgggcgccatctctgtgtatgatctcgtggctgtgctgtgtcccaaagggcctctgagaatgctggtagaaactgcccaggagagaaatgagcccatattccctgccctgatatactcatctgccatggtgtggacggttggcatggcgaagctggacccctcctctcagggtgccctccagctcccctacgacccggagatggaagaagactcctatgacagttttggggagccttcataccccgaagtctttgagcctcccttgactggctacccaggggaggagctggaggaagaggaggaaaggggcgtgaagcttggcctcggggacttcatcttctacagtgtgctggtgggcaaggcggctgccacgggcagcggggactggaataccacgctggcctgcttcgtggccatcctcattggcttgtgtctgaccctcctgctgcttgctgtgttcaagaaggcgctgcccgccctccccatctccatcacgttcgggctcatcttttacttctccacggacaacctggtgcggccgttcatggacaccctggcctcccatcagctctacatctgagggacatggtgtgccacaggctgcaagctgcagggaattttcattggatgcagttgtatagttttacactctagtgccatatatttttaagacttttctttccttaaaaaataaagtacgtgtttacttggtgaggaggaggcagaaccagctctttggtgccagctgtttcatcaccagactttggctcccgctttggggagcgcctcgcttcacggacaggaagcacagcaggtttatccagatgaactgagaaggtcagattagggcggggagaagagcatccggcatgagggctgagatgcgcaaagagtgtgctcgggagtggcccctggcacctgggtgctctggctggagaggaaaagccagttccctacgaggagtgttcccaatgctttgtccatgatgtccttgttattttattgcctttagaaactgagtcctgttcttgttacggcagtcacactgctgggaagtggcttaatagtaatatcaataaatagatgagtcctgttagaatcttggagtttggtccgttgtaaatgttgacccctctccctgcatcttgggcacccctgggataacttgtgctgtgagcccaggatggaggcagtttgccctgtttgaaggaacttttaatgatctcgcctctctgc

SEQ ID NO: 445328 - DNA, 3190 bp, Homo sapiens
ggcgtggggcggggcctgggccggcgccgggtccggccgggcgctcagccagctgcgtaaactccgctggagcgcggcggcggagcaggtgagcgggcggtgccggggggtgcccaggccagggccctgtcgcctgcggcgctgagggcccggggtggggctgcgccctgagggccctgccctgccctccgcacgcctctggccacggtcccttccccggctgtgggtctgcggcccctgcgtgcgcagcgctcctggcctctgcggccagcgcgggggcggagagaggagagtgcccggcaggcggcggctgggccggcccggaactgggtcgtggaaggatcgcggggagcggccctcaggccttcggcctcactgcgtccccacttccctgcgcccgcctgccgccgagccccggctgggggtgggcgcggcgcgagcggttaaagggccggtgcatttaaaggagcggtgcacgtgggtctctgaggcgtgtagcaggcgggggcgttttgttcttcttctctctcgccggagacctccgttgcgccgagtccattcggcctctagcaccgggtcctgggcatgctttccccgggaaggaggcgcgcgggggctctgcccgcacgtgaggggcagggccgcaggctcaagcctagagccggtttctgttagcagcggtgtttggctgttttatcaggcatttccagcagtgaggagacagccagaagcaagcttttggagctgaaggaacctgagacagaagctagtcccccctctgaattttactgatgaagaaactgaggccacagagctaaagtgacttttcccaaggtcgcccagcgaggacgtgggacttctcagacgtcaggagagtgatgtgagggagctgtgtgaccatagaaagtgacgtgttaaaaaccagcgctgccctctttgaaagccagggagcatcattcatttagcctgctgagaagaagaaaccaagtgtccgggattcagacctctctgcggccccaagtgttcgtgggtgtgaagctcagccctgagggtctctggacagcgatcactcagcctctggacagcgatcactcagcctctggacagacagcgatcactcagcctctggacagcgatcactcagcctctggacagcgatcactcagcctctggacagcgatcactcagcctctggacagcgataactcagcctctgtccccgtctgagatgttggcagggactgtcagatttgccaggcattgtttgaagttcttcccagccagaaacctgcatgtgtagattttggtgcttccagaggcagggctatgctcacattcatggcctctgacagcgaggaagaagtgtgtgatgagcggacgtccctaatgtcggccgagagccccacgccgcgctcctgccaggagggcaggcagggcccagaggatggagagaatactgcccagtggagaagccaggagaacgaggaggacggtgaggaggaccctgaccgctatgtctgtagtggggttcccgggcggccgccaggcctggaggaagagctgaccctcaaatacggagcgaagcacgtgatcatgctgtttgtgcctgtcactctgtgcatgatcgtggtggtagccaccatcaagtctgtgcgcttctacacagagaagaatggacagctcatctacacgccattcactgaggacacaccctcggtgggccagcgcctcctcaactccgtgctgaacaccctcatcatgatcagcgtcatcgtggttatgaccatcttcttggtggtgctctacaagtaccgctgctacaagttcatccatggctggttgatcatgtcttcactgatgctgctgttcctcttcacctatatctaccttggggaagtgctcaagacctacaatgtggccatggactaccccaccctcttgctgactgtctggaacttcggggcagtgggcatggtgtgcatccactggaagggccctctggtgctgcagcaggcctacctcatcatgatcagtgcgctcatggccctagtgttcatcaagtacctcccagagtggtccgcgtgggtcatcctgggcgccatctctgtgtatgatctcgtggctgtgctgtgtcccaaagggcctctgagaatgctggtagaaactgcccaggagagaaatgagcccatattccctgccctgatatactcatctgccatggtgtggacggttggcatggcgaagctggacccctcctctcagggtgccctccagctcccctacgacccggagatggaagaagactcctatgacagttttggggagccttcataccccgaagtctttgagcctcccttgactggctacccaggggaggagctggaggaagaggaggaaaggggcgtgaagcttggcctcggggacttcatcttctacagtgtgctggtgggcaaggcggctgccacgggcagcggggactggaataccacgctggcctgcttcgtggccatcctcattggcttgtgtctgaccctcctgctgcttgctgtgttcaagaaggcgctgcccgccctccccatctccatcacgttcgggctcatcttttacttctccacggacaacctggtgcggccgttcatggacaccctggcctcccatcagctctacatctgagggacatggtgtgccacaggctgcaagctgcagggaattttcattggatgcagttgtatagttttacactctagtgccatatatttttaagacttttctttccttaaaaaataaagtacgtgtttacttggtgaggaggaggcagaaccagctctttggtgccagctgtttcatcaccagactttggctcccgctttggggagcgcctcgcttcacggacaggaagcacagcaggtttatccagatgaactgagaaggtcagattagggcggggagaagagcatccggcatgagggctgagatgcgcaaagagtgtgctcgggagtggcccctggcacctgggtgctctggctggagaggaaaagccagttccctacgaggagtgttcccaatgctttgtccatgatgtccttgttattttattgcctttagaaactgagtcctgttcttgttacggcagtcacactgctgggaagtggcttaatagtaatatcaataaatagatgagtcctgttag

SEQ ID NO: 445329 - DNA, 2534 bp, Homo sapiens
ggcgtggggcggggcctgggccggcgccgggtccggccgggcgctcagccagctgcgtaaactccgctggagcgcggcggcggagcaggtgagcgggcggtgccggggggtgcccaggccagggccctgtcgcctgcggcgctgagggcccggggtggggctgcgccctgagggccctgccctgccctccgcacgcctctggccacggtcccttccccggctgtgggtctgcggcccctgcgtgcgcagcgctcctggcctctgcggccagcgcgggggcggagagaggagagtgcccggcaggcggcggctgggccggcccggaactgggtcgtggaaggatcgcggggagcggccctcaggccttcggcctcactgcgtccccacttccctgcgcccgcctgccgccgagccccggctgggggtgggcgcggcgcgagcggttaaagggccggtgcatttaaaggagcggtgcacgtgggtctctgaggcgtgtagcaggcgggggcgttttgttcttcttctctctcgccggagacctccgttgcgccgagtccattcggcctctagcaccgggtcctgggcatgctttccccgggaaggaggcgcgcgggggctctgcccgcacgtgaggggcagggccgcaggctcaagcctagagccggtttctgttagcagcggtgtttggctgttttatcaggcatttccagcagtgaggagacagccagaagcaagcttttggagctgaaggaacctgagacagaagctagtcccccctctgaattttactgatgaagaaactgaggccacagagctaaagtgacttttcccaaggtcgcccagcgaggacgtgggacttctcagacgtcaggagagtgatgtgagggagctgtgtgaccatagaaagtgacgtgttaaaaaccagcgctgccctctttgaaagccagggagcatcattcatttagcctgctgagaagaagaaaccaagtgtccgggattcagacctctctgcggccccaagtgttcgtgttcatccatggctggttgatcatgtcttcactgatgctgctgttcctcttcacctatatctaccttggggaagtgctcaagacctacaatgtggccatggactaccccaccctcttgctgactgtctggaacttcggggcagtgggcatggtgtgcatccactggaagggccctctggtgctgcagcaggcctacctcatcatgatcagtgcgctcatggccctagtgttcatcaagtacctcccagagtggtccgcgtgggtcatcctgggcgccatctctgtgtatgatctcgtggctgtgctgtgtcccaaagggcctctgagaatgctggtagaaactgcccaggagagaaatgagcccatattccctgccctgatatactcatctgccatggtgtggacggttggcatggcgaagctggacccctcctctcagggtgccctccagctcccctacgacccggagatggaagaagactcctatgacagttttggggagccttcataccccgaagtctttgagcctcccttgactggctacccaggggaggagctggaggaagaggaggaaaggggcgtgaagcttggcctcggggacttcatcttctacagtgtgctggtgggcaaggcggctgccacgggcagcggggactggaataccacgctggcctgcttcgtggccatcctcattggcttgtgtctgaccctcctgctgcttgctgtgttcaagaaggcgctgcccgccctccccatctccatcacgttcgggctcatcttttacttctccacggacaacctggtgcggccgttcatggacaccctggcctcccatcagctctacatctgagggacatggtgtgccacaggctgcaagctgcagggaattttcattggatgcagttgtatagttttacactctagtgccatatatttttaagacttttctttccttaaaaaataaagtacgtgtttacttggtgaggaggaggcagaaccagctctttggtgccagctgtttcatcaccagactttggctcccgctttggggagcgcctcgcttcacggacaggaagcacagcaggtttatccagatgaactgagaaggtcagattagggcggggagaagagcatccggcatgagggctgagatgcgcaaagagtgtgctcgggagtggcccctggcacctgggtgctctggctggagaggaaaagccagttccctacgaggagtgttcccaatgctttgtccatgatgtccttgttattttattgcctttagaaactgagtcctgttcttgttacggcagtcacactgctgggaagtggcttaatagtaatatcaataaatagatgagtcctgttagaatcttggagtttggtccgttgtaaatgttgacccctctccctgcatcttgggcacccctgggataacttgtgctgtgagcccaggatggaggcagtttgccctgtttgaaggaacttttaatgatctcgcctctctgc

SEQ ID NO: 445330 - DNA, 1947 bp, Homo sapiens
ggcgtggggcggggcctgggccggcgccgggtccggccgggcgctcagccagctgcgtaaactccgctggagcgcggcggcggagcaggtgagcgggcggtgccggggggtgcccaggccagggccctgtcgcctgcggcgctgagggcccggggtggggctgcgccctgagggccctgccctgccctccgcacgcctctggccacggtcccttccccggctgtgggtctgcggcccctgcgtgcgcagcgctcctggcctctgcggccagcgcgggggcggagagaggagagtgcccggcaggcggcggctgggccggcccggaactgggtcgtggaaggatcgcggggagcggccctcaggccttcggcctcactgcgtccccacttccctgcgcccgcctgccgccgagccccggctgggggtgggcgcggcgcgagcggttaaagggccggtgcatttaaaggagcggtgcacgtgggtctctgaggcgtgtagcaggcgggggcgttttgttcttcttctctctcgccggagacctccgttgcgccgagtccattcggcctctagcaccgggtcctgggcatgctttccccgggaaggaggcgcgcgggggctctgcccgcacgtgaggggcagggccgcaggctcaagcctagagccggtttctgttagcagcggtgtttggctgttttatcaggcatttccagcagtgaggagacagccagaagcaagcttttggagctgaaggaacctgagacagaagctagtcccccctctgaattttactgatgaagaaactgaggccacagagctaaagtgacttttcccaaggtcgcccagcgaggacgtgggacttctcagacgtcaggagagtgatgtgagggagctgtgtgaccatagaaagtgacgtgttaaaaaccagcgctgccctctttgaaagccagggagcatcattcatttagcctgctgagaagaagaaaccaagtgtccgggattcagacctctctgcggccccaagtgttcgtggtgcttccagaggcagggctatgctcacattcatggcctctgacagcgaggaagaagtgtgtgatgagcggacgtccctaatgtcggccgagagccccacgccgcgggcttgtgtctgaccctcctgctgcttgctgtgttcaagaaggcgctgcccgccctccccatctccatcacgttcgggctcatcttttacttctccacggacaacctggtgcggccgttcatggacaccctggcctcccatcagctctacatctgagggacatggtgtgccacaggctgcaagctgcagggaattttcattggatgcagttgtatagttttacactctagtgccatatatttttaagacttttctttccttaaaaaataaagtacgtgtttacttggtgaggaggaggcagaaccagctctttggtgccagctgtttcatcaccagactttggctcccgctttggggagcgcctcgcttcacggacaggaagcacagcaggtttatccagatgaactgagaaggtcagattagggcggggagaagagcatccggcatgagggctgagatgcgcaaagagtgtgctcgggagtggcccctggcacctgggtgctctggctggagaggaaaagccagttccctacgaggagtgttcccaatgctttgtccatgatgtccttgttattttattgcctttagaaactgagtcctgttcttgttacggcagtcacactgctgggaagtggcttaatagtaatatcaataaatagatgagtcctgttagaatcttggagtttggtccgttgtaaatgttgacccctctccctgcatcttgggcacccctgggataacttgtgctgtgagcccaggatggaggcagtttgccctgtttgaaggaacttttaatgatctcgcctctctgc

SEQ ID NO: 445331 - DNA, 383 bp, Homo sapiens
tccctgtattaggaaggggaaagatcttttgattcattaaccattaagttgattcattaaccattaagtcttgggcctgcagaccatagcaaccttccttccttcatttatggtgcttcatccagctccaaatcttctctactttgtcctcacaaacttttcatatgccctagtagctcatagactgctccttatatctggaaagcaacattcaaacttctcatttctggttccaaaaatccgtgcattacatggataggctgccatgggggacattccgcggccctcacgatgtggtttcccacagagaagccaggagaacgaggaggacggtgaggaggaccctgaccgctatgtctgtagtggggttcccgggcggccgc

SEQ ID NO: 445332 - DNA, 2301 bp, Homo sapiens
ggcgtggggcggggcctgggccggcgccgggtccggccgggcgctcagccagctgcgtaaactccgctggagcgcggcggcggagcaggcatttccagcagtgaggagacagccagaagcaagcttttggagctgaaggaacctgagacagaagctagtcccccctctgaattttactgatgaagaaactgaggccacagagctaaagtgacttttcccaaggtcgcccagcgaggacgtgggacttctcagacgtcaggagagtgatgtgagggagctgtgtgaccatagaaagtgacgtgttaaaaaccagcgctgccctctttgaaagccagggagcatcattcatttagcctgctgagaagaagaaaccaagtgtccgggattcagacctctctgcggccccaagtgttcgtggtgcttccagaggcagggctatgctcacattcatggcctctgacagcgaggaagaagtgtgtgatgagcggacgtccctaatgtcggccgagagccccacgccgcgctcctgccaggagggcaggcagggcccagaggatggagagaatactgcccagtggagaagccaggagaacgaggaggacggtgaggaggaccctgaccgctatgtctgtagtggggttcccgggcggccgccaggcctggaggaagagctgaccctcaaatacggagcgaagcacgtgatcatgctgtttgtgcctgtcactctgtgcatgatcgtggtggtagccaccatcaagtctgtgcgcttctacacagagaagaatggacagctcatctacacgccattcactgaggacacaccctcggtgggccagcgcctcctcaactccgtgctgaacaccctcatcatgatcagcgtcatcgtggttatgaccatcttcttggtggtgctctacaagtaccgctgctacaagttcatccatggctggttgatcatgtcttcactgatgctgctgttcctcttcacctatatctaccttggggaagtgctcaagacctacaatgtggccatggactaccccaccctcttgctgactgtctggaacttcggggcagtgggcatggtgtgcatccactggaagggccctctggtgctgcagcaggcctacctcatcatgatcagtgcgctcatggccctagtgttcatcaagtacctcccagagtggtccgcgtgggtcatcctgggcgccatctctgtgtatgatctcgtggctgtgctgtgtcccaaagggcctctgagaatgctggtagaaactgcccaggagagaaatgagcccatattccctgccctgatatactcatctgccatggtgtggacggttggcatggcgaagctggacccctcctctcagggtgccctccagctcccctacgacccggagatggaagaagactcctatgacagttttggggagccttcataccccgaagtctttgagcctcccttgactggctacccaggggaggagctggaggaagaggaggaaaggggcgtgaagcttggcctcggggacttcatcttctacagtgtgctggtgggcaaggcggctgccacgggcagcggggactggaataccacgctggcctgcttcgtggccatcctcattggcttgtgtctgaccctcctgctgcttgctgtgttcaagaaggcgctgcccgccctccccatctccatcacgttcgggctcatcttttacttctccacggacaacctggtgcggccgttcatggacaccctggcctcccatcagctctacatctgagggacatggtgtgccacaggctgcaagctgcagggaattttcattggatgcagttgtatagttttacactctagtgccatatatttttaagacttttctttccttaaaaaataaagtacgtgtttacttggtgaggaggaggcagaaccagctctttggtgccagctgtttcatcaccagactttggctcccgctttggggagcgcctcgcttcacggacaggaagcacagcaggtttatccagatgaactgagaaggtcagattagggcggggagaagagcatccggcatgagggctgagatgcgcaaagagtgtgctcgggagtggcccctggcacctgggtgctctggctggagaggaaaagccagttccctacgaggagtgttcccaatgctttgtccatgatgtccttgttattttattgcctttagaaactgagtcctgttcttgttacggcagtcacactgctgggaagtggcttaatagtaatatcaataaatagatgagtcctgttag

SEQ ID NO: 445333 - DNA, 2027 bp, Homo sapiens
ggcgtggggcggggcctgggccggcgccgggtccggccgggcgctcagccagctgcgtaaactccgctggagcgcggcggcggagcaggcatttccagcagtgaggagacagccagaagcaagcttttggagctgaaggaacctgagacagaagctagtcccccctctgaattttactgatgaagaaactgaggccacagagctaaagtgacttttcccaaggtcgcccagcgaggacgtgggacttctcagacgtcaggagagtgatgtgagggagctgtgtgaccatagaaagtgacgtgttaaaaaccagcgctgccctctttgaaagccagggagcatcattcatttagcctgctgagaagaagaaaccaagtgtccgggattcagacctctctgcggccccaagtgttcgtggtgcttccagaggcagggctatgctcacattcatggcctctgacagcgaggaagaagtgtgtgatgagcggacgtccctaatgtcggccgagagccccacgccgcgctcctgccaggagggcaggcagggcccagaggatggagagaatactgcccagtggagaagccaggagaacgaggaggacggtgaggaggaccctgaccgctatgtctgtagtggggttcccgggcggccgccaggcctggaggaagagctgaccctcaaatacggagcgaagcacgtgatcatgctgtttgtgcctgtcactctgtgcatgatcgtggtggtagccaccatcaagtctgtgcgcttctacacagagaagaatggacagctcatctacacgccattcactgaggacacaccctcggtgggccagcgcctcctcaactccgtgctgaacaccctcatcatgatcagcgtcatcgtggttatgaccatcttcttggtggtgctctacaagtaccgctgctacaagttcatccatggctggttgatcatgtcttcactgatgctgctgttcctcttcacctatatctaccttggggaagtgctcaagacctacaatgtggccatggactaccccaccctcttgctgactgtctggaacttcggggcagtgggcatggtgtgcatccactggaagggccctctggtgctgcagcaggcctacctcatcatgatcagtgcgctcatggccctagtgttcatcaagtacctcccagagtggtccgcgtgggtcatcctgggcgccatctctgtgtatgatctcgtggctgtgctgtgtcccaaagggcctctgagaatgctggtagaaactgcccaggagagaaatgagcccatattccctgccctgatatactcatctgccatggtgtggacggttggcatggcgaagctggacccctcctctcagggtgccctccagctcccctacgacccggagatggaagaagactcctatgacagttttggggagccttcataccccgaagtctttgagcctcccttgactggctacccaggggaggagctggaggaagaggaggaaaggggcgtgaagcttggcctcggggacttcatcttctacagtgtgctggtgggcaaggcggctgccacgggcagcggggactggaataccacgctggcctgcttcgtggccatcctcattggcttgtgtctgaccctcctgctgcttgctgtgttcaagaaggcgctgcccgccctccccatctccatcacgttcgggctcatcttttacttcttcacggacaggaagcacagcaggtttatccagatgaactgagaaggtcagattagggcggggagaagagcatccggcatgagggctgagatgcgcaaagagtgtgctcgggagtggcccctggcacctgggtgctctggctggagaggaaaagccagttccctacgaggagtgttcccaatgctttgtccatgatgtccttgttattttattgcctttagaaactgagtcctgttcttgttacggcagtcacactgctgggaagtggcttaatagtaatatcaataaatagatgagtcctgttag

SEQ ID NO: 445334 - DNA, 986 bp, Homo sapiens
tgcccttaacacctcaagagctgttgcaggaccagggaagataatggggtgtctagcgccgttatccgactggtcctcgaacaagctcctgtgcccagggactagaccatgactcacagctcctgtccacaccagggatcaccacgctcaccctcccctccatgtcctgcagggggcttgtgtctgaccctcctgctgcttgctgtgttcaagaaggcgctgcccgccctccccatctccatcacgttcgggctcatcttttacttctccacggacaacctggtgcggccgttcatggacaccctggcctcccatcagctctacatctgagggacatggtgtgccacaggctgcaagctgcagggaattttcattggatgcagttgtatagttttacactctagtgccatatatttttaagacttttctttccttaaaaaataaagtacgtgtttacttggtgaggaggaggcagaaccagctctttggtgccagctgtttcatcaccagactttggctcccgctttggggagcgcctcgcttcacggacaggaagcacagcaggtttatccagatgaactgagaaggtcagattagggcggggagaagagcatccggcatgagggctgagatgcgcaaagagtgtgctcgggagtggcccctggcacctgggtgctctggctggagaggaaaagccagttccctacgaggagtgttcccaatgctttgtccatgatgtccttgttattttattgcctttagaaactgagtcctgttcttgttacggcagtcacactgctgggaagtggcttaatagtaatatcaataaatagatgagtcctgttagaatcttggagtttggtccgttgtaaatgttgacccctctccctgcatcttgggcacccctgggataacttgtgctgtgagcccaggatggaggcagtttgccctgtttgaaggaacttttaatgatctcgcctctctgc

SEQ ID NO: 445335 - DNA, 4830 bp, Homo sapiens
  misc_feature (38)..(39): n is a, c, g, or t
gcctggtcccctatcgcctccgcctagcagctgccatnngtgcgcccccacagctctaggaccaataggcaggccctagtgctgggactcgaacggctattggttggccgagccgtggtgagagatggtgcggtgcctgttcttggccctgcagagagctgtgggcggttgttaaggcgaccgttcgtgacgtagcgccgtcaggccgagcagcccccaggcgattggctagacaatcgaacgatcctctcttattggtcgaaggctcgtccagctccgagcgtgcgtaaggtgagggctccttccgctccgcgactgcgttaactggagccaggctgagcgtcggcgccggggttcggtggcctctagtgagatctggaggatccaaggattctgtagctacaatgttgtcaagactttttcgaatgcatggcctctttgtggcctcccatccctgggaagtcatagtggggacagtgacactgaccatctgcatgatgtccatgaacatgtttactggtaacaataagatctgtggttggaattatgaatgtccaaagtttgaagaggatgttttgagcagtgacattataattctgacaataacacgatgcatagccatcctgtatatttacttccagttccagaatttacgtcaacttggatcaaaatatattttgggtattgctggccttttcacaattttctcaagttttgtattcagtacagttgtcattcacttcttagacaaagaattgacaggcttgaatgaagctttgccctttttcctacttttgattgacctttccagagcaagcacattagcaaagtttgccctcagttccaactcacaggatgaagtaagggaaaatattgctcgtggaatggcaattttaggtcctacgtttaccctcgatgctcttgttgaatgtcttgtgattggagttggtaccatgtcaggggtacgtcagcttgaaattatgtgctgctttggctgcatgtcagttcttgccaactacttcgtgttcatgactttcttcccagcttgtgtgtccttggtattagagctttctcgggaaagccgcgagggtcgtccaatttggcagctcagccattttgcccgagttttagaagaagaagaaaataagccgaatcctgtaactcagagggtcaagatgattatgtctctaggcttggttcttgttcatgctcacagtcgctggatagctgatccttctcctcaaaacagtacagcagatacttctaaggtttcattaggactggatgaaaatgtgtccaagagaattgaaccaagtgtttccctctggcagttttatctctctaaaatgatcagcatggatattgaacaagttattaccctaagtttagctctccttctggctgtcaagtacatcttctttgaacaaacagagacagaatctacactctcattaaaaaaccctatcacatctcctgtagtgacacaaaagaaagtcccagacaattgttgtagacgtgaacctatgctggtcagaaataaccagaaatgtgattcagtagaggaagagacagggataaaccgagaaagaaaagttgaggttataaaacccttagtggctgaaacagataccccaaacagagctacatttgtggttggtaactcctccttactcgatacttcatcagtactggtgacacaggaacctgaaattgaacttcccagggaacctcggcctaatgaagaatgtctacagatacttgggaatgcagagaaaggtgcaaaattccttagtgatgctgagatcatccagttagtcaatgctaagcatatcccagcctacaagttggaaactctgatggaaactcatgagcgtggtgtatctattcgccgacagttactttccaagaagctttcagaaccttcttctctccagtacctaccttacagggattataattactccttggtgatgggagcttgttgtgagaatgttattggatatatgcccatccctgttggagtggcaggacccctttgcttagatgaaaaagaatttcaggttccaatggcaacaacagaaggttgtcttgtggccagcaccaatagaggctgcagagcaataggtcttggtggaggtgccagcagccgagtccttgcagatgggatgactcgtggcccagttgtgcgtcttccacgtgcttgtgactctgcagaagtgaaagcctggctcgaaacatctgaagggttcgcagtgataaaggaggcatttgacagcactagcagatttgcacgtctacagaaacttcatacaagtatagctggacgcaacctttatatccgtttccagtccaggtcaggggatgccatggggatgaacatgatttcaaagggtacagagaaagcactttcaaaacttcacgagtatttccctgaaatgcagattctagccgttagtggtaactattgtactgacaagaaacctgctgctataaattggatagagggaagaggaaaatctgttgtttgtgaagctgtcattccagccaaggttgtcagagaagtattaaagactaccacagaggctatgattgaggtcaacattaacaagaatttagtgggctctgccatggctgggagcataggaggctacaacgcccatgcagcaaacattgtcaccgccatctacattgcctgtggacaggatgcagcacagaatgttggtagttcaaactgtattactttaatggaagcaagtggtcccacaaatgaagatttatatatcagctgcaccatgccatctatagagataggaacggtgggtggtgggaccaacctactacctcagcaagcctgtttgcagatgctaggtgttcaaggagcatgcaaagataatcctggggaaaatgcccggcagcttgcccgaattgtgtgtgggaccgtaatggctggggaattgtcacttatggcagcattggcagcaggacatcttgtcaaaagtcacatgattcacaacaggtcgaagatcaatttacaagacctccaaggagcttgcaccaagaagacagcctgaatagcccgacagttctgaactggaacatgggcattgggttctaaaggactaacataaaatctgtgaattaaaaaagctcaatgcattgtcttgtggaggatgaatagatgtgatcactgagacagccacttggtttttggctctttcagagaggtctcaggttctttccatgcagactcctcagatctgaacacagtttagtgctttacatgctgtgctctttgaagagatttcaacaagaatattgtatgttaaagcatcagagatggtaatctacagctcacctctgaaggcaaatataagctgggaaaaaagttttgatgaaattcttgaagttcatggtgatcagtgcaattgaccttctccctcactcctgccagttgaaaatggatttttaaattatactgtagctgatgaaactcctgattttgtagttaatttattaagtctgggatgtagaacttcaagaagtaagagctaagttctaagttcatgtttgtaaattaatacttcatttggtgctggtctattttgattttggggggtaatcagcattattcttcagaaggggacctgttttcttcaagggaagaaacactcttattcccaaactacagaataatgtgttaaacatgctaaatagttctatcaggaaaacaaatcactgtatttatctccgcaggctatttgttcagagaggccttttgtttaaatataaatgtttaaatataaatgtttgtctggattggctataacatgtctttcagcattaggcttttaagaaacacagggttttgtattctttactaaagatatcagagctcttaatgttgcttagatgagggtgactgtcaagtacaagcaagactgggaccttagaaatcattgtagaaacacagttttgaaagaaaaataccatgtctctaagccaactttaattgcttaaaagacatttttatttagttgaaaaatctagttttttttgtaaactgtatcaaatctgtatatgttgtaataaaacttatgctagtttattggaagtgttcaagaaataaaaatcaacttgtgtactgataaaatactctagcctgggccagagaagataatgttctttaatgttgtccaggaaaccctggcttgcttgccgagcctaatgaaagggaaagtcagctttcagagccagtgaaggagccacgtgaatggccctagaactgtgcctagttcctgtggccaggaggttggtgactgaaacattcacacagggctctttgatggacccacgaacgctcttagctttctcagggggtcagcagagttattgaatcttaattttttttaatgtacaagttttgtataaataataaagaactccttattttgtattacatctaatgcttcaagtgttgctcttggaaagctgatgatgtctcttgtagaagatggactctgaaaaacattccaggaaaccatggcagcatggagagcctcttagtgattgtgtctgcattgttattgtggaagatttaccttttctgttgtacgtaaagcttaaattgcttttgttgtgactttttagccagtgactttttctgagcttttcatggaagtggcagtgaaaaatatgttgagtgttcattttagtgactgtaattaatatcttgctggattaatgttttgtacaattactaaattgtatacattttgttatagaatacttttttctagtttcagtaaataatgaaaaggaagttaataccaa

SEQ ID NO: 445336 - DNA, 4458 bp, Homo sapiens
  misc_feature (38)..(39): n is a, c, g, or t
gcctggtcccctatcgcctccgcctagcagctgccatnngtgcgcccccacagctctaggaccaataggcaggccctagtgctgggactcgaacggctattggttggccgagccgtggtgagagatggtgcggtgcctgttcttggccctgcagagagctgtgggcggttgttaaggcgaccgttcgtgacgtagcgccgtcaggccgagcagcccccaggcgattggctagacaatcgaacgatcctctcttattggtcgaaggctcgtccagctccgagcgtgcgtaaggtgagggctccttccgctccgcgactgcgttaactggagccaggctgagcgtcggcgccggggttcggtggcctctagtgagatctggaggatccaaggattctgtagctacaatgttgtcaagactttttcgaatgcatggcctctttgtggcctcccatccctgggaagtcatagtggggacagtgacactgaccatctgcatgatgtccatgaacatgtttactggtaacaataagatctgtggttggaattatgaatgtccaaagtttgaagaggatgttttgagcagtgacattataattctgacaataacacgatgcatagccatcctgtatatttacttccagttccagaatttacgtcaacttggatcaaaatatattttgggtattgctggccttttcacaattttctcaagttttgtattcagtacagttgtcattcacttcttagacaaagaattgacaggcttgaatgaagctttgccctttttcctacttttgattgacctttccagagcaagcacattagcaaagtttgccctcagttccaactcacaggatgaagtaagggaaaatattgctcgtggaatggcaattttaggtcctacgtttaccctcgatgctcttgttgaatgtcttgtgattggagttggtaccatgtcaggggtacgtcagcttgaaattatgtgctgctttggctgcatgtcagttcttgccaactacttcgtgttcatgactttcttcccagcttgtgtgtccttggtattagagctttctcgggaaagccgcgagggtcgtccaatttggcagctcagccattttgcccgagttttagaagaagaagaaaataagccgaatcctgtaactcagagggtcaagatgattatgtctctaggcttggttcttgttcatgctcacagtcgctggatagctgatccttctcctcaaaacagtacagcagatacttctaaggtttcattaggactggatgaaaatgtgtccaagagaattgaaccaagtgtttccctctggcagttttatctctctaaaatgatcagcatggatattgaacaagttattaccctaagtttagctctccttctggctgtcaagtacatcttctttgaacaaacagagacagaatctacactctcattaaaaaaccctatcacatctcctgtagtgacacaaaagaaagtcccagacaattgttgtagacgtgaacctatgctggtcagaaataaccagaaatgtgattcagtagaggaagagacagggataaaccgagaaagaaaagttgaggttataaaacccttagtggctgaaacagataccccaaacagagctacatttgtggttggtaactcctccttactcgatacttcatcagtactggtgacacaggaacctgaaattgaacttcccagggaacctcggcctaatgaagaatgtctacagatacttgggaatgcagagaaaggtgcaaaattccttagtgatgctgagatcatccagttagtcaatgctaagcatatcccagcctacaagttggaaactctgatggaaactcatgagcgtggtgtatctattcgccgacagttactttccaagaagctttcagaaccttcttctctccagtacctaccttacagggattataattactccttggtgatgggagcttgttgtgagaatgttattggatatatgcccatccctgttggagtggcaggacccctttgcttagatgaaaaagaatttcaggttccaatggcaacaacagaaggttgtcttgtggccagcaccaatagaggctgcagagcaataggtcttggtggaggtgccagcagccgagtccttgcagatgggatgactcgtggcccagttgtgcgtcttccacgtgcttgtgactctgcagaagtgaaagcctggctcgaaacatctgaagggttcgcagtgataaaggaggcatttgacagcactagcagatttgcacgtctacagaaacttcatacaagtatagctggacgcaacctttatatccgtttccagtccaggtcaggggatgccatggggatgaacatgatttcaaagggtacagagaaagcactttcaaaacttcacgagtatttccctgaaatgcagattctagccgttagtggtaactattgtactgacaagaaacctgctgctataaattggatagagggaagaggaaaatctgttgtttgtgaagctgtcattccagccaaggttgtcagagaagtattaaagactaccacagaggctatgattgaggtcaacattaacaagaatttagtgggctctgccatggctgggagcataggaggctacaacgcccatgcagcaaacattgtcaccgccatctacattgcctgtggacaggatgcagcacagaatgttggtagttcaaactgtattactttaatggaagcaagtggtcccacaaatgaagatttatatatcagctgcaccatgccatctatagagataggaacggtgggtggtgggaccaacctactacctcagcaagcctgtttgcagatgctaggtgttcaaggagcatgcaaagataatcctggggaaaatgcccggcagcttgcccgaattgtgtgtgggaccgtaatggctggggaattgtcacttatggcagcattggcagcaggacatcttgtcaaaagtcacatgattcacaacaggtcgaagatcaatttacaagacctccaaggagcttgcaccaagaagacagcctgaatagcccgacagttctgaactggaacatgggcattgggttctaaaggactaacataaaatctgtgaattaaaaaagctcaatgcattgtcttgtggaggatgaatagatgtgatcactgagacagccacttggtttttggctctttcagagaggtctcaggttctttccatgcagactcctcagatctgaacacagtttagtgctttacatgctgtgctctttgaagagatttcaacaagaatattgtatgttaaagcatcagagatggtaatctacagctcacctctgaaggcaaatataagctgggaaaaaagttttgatgaaattcttgaagttcatggtgatcagtgcaattgaccttctccctcactcctgccagttgaaaatggatttttaaattatactgtagctgatgaaactcctgattttgtagttaatttattaagtctgggatgtagaacttcaagaagtaagagctaagttctaagttcatgtttgtaaattaatacttcatttggtgctggtctattttgattttggggggtaatcagcattattcttcagaaggggacctgttttcttcaagggaagaaacactcttattcccaaactacagaataatgtgttaaacatgctaaatagttctatcaggaaaacaaatcactgtatttatctccgcaggctatttgttcagagaggccttttgtttaaatataaatgtttaaatataaatgtttgtctggattggctataacatgtctttcagcattaggcttttaagaaacacagggttttgtattctttactaaagatatcagagctcttaatgttgcttagatgagggtgactgtcaagtacaagcaagactgggaccttagaaatcattgtagaaacacagttttgaaagaaaaataccatgtctctaagccaactttaattgcttaaaagacatttttatttagttgaaaaatctagttttttttgtaaactgtatcaaatctgtatatgttgtaataaaacttatgctagtttattggaagtgttcaagaaataaaaatcaacttgtgtactgataaaatactctagcctgggccagagaagataatgttctttaatgttgtccaggaaaccctggcttgcttgccgagcctaatgaaagggaaagtcagctttcagagccagtgaaggagccacgtgaatggccctagaactgtgcctagttcctgtggccaggaggttggtgactgaaacattcacacagggctctttgatggacccacgaacgctcttagctttctcagggggtcagcagagttattgaatcttaattttttttaatgtacaagttttgtataaataataaagaactccttattttgtattaca

SEQ ID NO: 445337 - DNA, 5109 bp, Homo sapiens
  misc_feature (38)..(39): n is a, c, g, or t
gcctggtcccctatcgcctccgcctagcagctgccatnngtgcgcccccacagctctaggaccaataggcaggccctagtgctgggactcgaacggctattggttggccgagccgtggtgagagatggtgcggtgcctgttcttggccctgcagagagctgtgggcggttgttaaggcgaccgttcgtgacgtagcgccgtcaggccgagcagcccccaggcgattggctagacaatcgaacgatcctctcttattggtcgaaggctcgtccagctccgagcgtgcgtaaggtgagggctccttccgctccgcgactgcgttaactggagccaggctgagcgtcggcgccggggttcggtggcctctagtgagatctggaggatccaaggattctgtagctacaatgttgtcaagactttttcgaatgcatggcctctttgtggcctcccatccctgggaagtcatagtggggacagtgacactgaccatctgcatgatgtccatgaacatgtttactggtaacaataagatctgtggttggaattatgaatgtccaaagtttgaagaggatgttttgagcagtgacattataattctgacaataacacgatgcatagccatcctgtatatttacttccagttccagaatttacgtcaacttggatcaaaatatattttgggtattgctggccttttcacaattttctcaagttttgtattcagtacagttgtcattcacttcttagacaaagaattgacaggcttgaatgaagctttgccctttttcctacttttgattgacctttccagagcaagcacattagcaaagtttgccctcagttccaactcacaggatgaagtaagggaaaatattgctcgtggaatggcaattttaggtcctacgtttaccctcgatgctcttgttgaatgtcttgtgattggagttggtaccatgtcaggggtacgtcagcttgaaattatgtgctgctttggctgcatgtcagttcttgccaactacttcgtgttcatgactttcttcccagcttgtgtgtccttggtattagagctttctcgggaaagccgcgagggtcgtccaatttggcagctcagccattttgcccgagttttagaagaagaagaaaataagccgaatcctgtaactcagagggtcaagatgattatgtctctaggcttggttcttgttcatgctcacagtcgctggatagctgatccttctcctcaaaacagtacagcagatacttctaaggtttcattaggactggatgaaaatgtgtccaagagaattgaaccaagtgtttccctctggcagttttatctctctaaaatgatcagcatggatattgaacaagttattaccctaagtttagctctccttctggctgtcaagtacatcttctttgaacaaacagagacagaatctacactctcattaaaaaaccctatcacatctcctgtagtgacacaaaagaaagtcccagacaattgttgtagacgtgaacctatgctggtcagaaataaccagaaatgtgattcagtagaggaagagacagggataaaccgagaaagaaaagttgaggttataaaacccttagtggctgaaacagataccccaaacagagctacatttgtggttggtaactcctccttactcgatacttcatcagtactggtgacacaggaacctgaaattgaacttcccagggaacctcggcctaatgaagaatgtctacagatacttgggaatgcagagaaaggtgcaaaattccttagtgatgctgagatcatccagttagtcaatgctaagcatatcccagcctacaagttggaaactctgatggaaactcatgagcgtggtgtatctattcgccgacagttactttccaagaagctttcagaaccttcttctctccagtacctaccttacagggattataattactccttggtgatgggagcttgttgtgagaatgttattggatatatgcccatccctgttggagtggcaggacccctttgcttagatgaaaaagaatttcaggttccaatggcaacaacagaaggttgtcttgtggccagcaccaatagaggctgcagagcaataggtcttggtggaggtgccagcagccgagtccttgcagatgggatgactcgtggcccagttgtgcgtcttccacgtgcttgtgactctgcagaagtgaaagcctggctcgaaacatctgaagggttcgcagtgataaaggaggcatttgacagcactagcagatttgcacgtctacagaaacttcatacaagtatagctggacgcaacctttatatccgtttccagtccaggtcaggggatgccatggggatgaacatgatttcaaagggtacagagaaagcactttcaaaacttcacgagtatttccctgaaatgcagattctagccgttagtggtaactattgtactgacaagaaacctgctgctataaattggatagagggaagaggaaaatctgttgtttgtgaagctgtcattccagccaaggttgtcagagaagtattaaagactaccacagaggctatgattgaggtcaacattaacaagaatttagtgggctctgccatggctgggagcataggaggctacaacgcccatgcagcaaacattgtcaccgccatctacattgcctgtggacaggatgcagcacagaatgttggtagttcaaactgtattactttaatggaagcaagtggtcccacaaatgaagatttatatatcagctgcaccatgccatctatagagataggaacggtgggtggtgggaccaacctactacctcagcaagcctgtttgcagatgctaggtgttcaaggagcatgcaaagataatcctggggaaaatgcccggcagcttgcccgaattgtgtgtgggaccgtaatggctggggaattgtcacttatggcagcattggcagcaggacatcttgtcaaaagtcacatgattcacaacaggtcgaagatcaatttacaagacctccaaggagcttgcaccaagaagacagcctgaatagcccgacagttctgaactggaacatgggcattgggttctaaaggactaacataaaatctgtgaattaaaaaagctcaatgcattgtcttgtggaggatgaatagatgtgatcactgagacagccacttggtttttggctctttcagagaggtctcaggttctttccatgcagactcctcagatctgaacacagtttagtgctttacatgctgtgctctttgaagagatttcaacaagaatattgtatgttaaagcatcagagatggtaatctacagctcacctctgaaggcaaatataagctgggaaaaaagttttgatgaaattcttgaagttcatggtgatcagtgcaattgaccttctccctcactcctgccagttgaaaatggatttttaaattatactgtagctgatgaaactcctgattttgtagttaatttattaagtctgggatgtagaacttcaagaagtaagagctaagttctaagttcatgtttgtaaattaatacttcatttggtgctggtctattttgattttggggggtaatcagcattattcttcagaaggggacctgttttcttcaagggaagaaacactcttattcccaaactacagaataatgtgttaaacatgctaaatagttctatcaggaaaacaaatcactgtatttatctccgcaggctatttgttcagagaggccttttgtttaaatataaatgtttaaatataaatgtttgtctggattggctataacatgtctttcagcattaggcttttaagaaacacagggttttgtattctttactaaagatatcagagctcttaatgttgcttagatgagggtgactgtcaagtacaagcaagactgggaccttagaaatcattgtagaaacacagttttgaaagaaaaataccatgtctctaagccaactttaattgcttaaaagacatttttatttagttgaaaaatctagttttttttgtaaactgtatcaaatctgtatatgttgtaataaaacttatgctagtttattggaagtgttcaagaaataaaaatcaacttgtgtactgataaaatactctagcctgggccagagaagataatgttctttaatgttgtccaggaaaccctggcttgcttgccgagcctaatgaaagggaaagtcagctttcagagccagtgaaggagccacgtgaatggccctagaactgtgcctagttcctgtggccaggaggttggtgactgaaacattcacacagggctctttgatggacccacgaacgctcttagctttctcagggggtcagcagagttattgaatcttaattttttttaatgtacaagttttgtataaataataaagaactccttattttgtattacatctaatgcttcaagtgttgctcttggaaagctgatgatgtctcttgtagaagatggactctgaaaaacattccaggaaaccatggcagcatggagagcctcttagtgattgtgtctgcattgttattgtggaagatttaccttttctgttgtacgtaaagcttaaattgcttttgttgtgactttttagccagtgactttttctgagcttttcatggaagtggcagtgaaaaatatgttgagtgttcattttagtgactgtaattaatatcttgctggattaatgttttgtacaattactaaattgtatacattttgttatagaatacttttttctagtttcagtaaataatgaaaaggaagttaataccaaaaaaaaaaaaaaaaagaaaaaaaaacagttttgtagggggatgaggacacagaaagggtttacgagacacatgggtatgagcggaggggcaccggagagtaaggtagacagtggaaaaaggggaacacaaagaaaacccgggacaaaaaaagtggcgtgagatccgcagccaaaaaaagggccgggggaaccggaggatgtagacaaaccacaaggaacacgaggacaccaggggactaccaaagagaaccaagaactcagaataagaaccgcagcatg

SEQ ID NO: 445338 - DNA, 4776 bp, Homo sapiens
  misc_feature (38)..(39): n is a, c, g, or t
gcctggtcccctatcgcctccgcctagcagctgccatnngtgcgcccccacagctctaggaccaataggcaggccctagtgctgggactcgaacggctattggttggccgagccgtggtgagagatggtgcggtgcctgttcttggccctgcagagagctgtgggcggttgttaaggcgaccgttcgtgacgtagcgccgtcaggccgagcagcccccaggcgattggctagacaatcgaacgatcctctcttattggtcgaaggctcgtccagctccgagcgtgcgtaaggtgagggctccttccgctccgcgactgcgttaactggagccaggctgagcgtcggcgccggggttcggtggcctctagtgagatctggaggatccaaggattctgtagctacaatgttgtcaagactttttcgaatgcatggcctctttgtggcctcccatccctgggaagtcatagtggggacagtgacactgaccatctgcatgatgtccatgaacatgtttactggtaacaataagatctgtggttggaattatgaatgtccaaagtttgaagaggatgttttgagcagtgacattataattctgacaataacacgatgcatagccatcctgtatatttacttccagttccagaatttacgtcaacttggatcaaaatatattttgggtattgctggccttttcacaattttctcaagttttgtattcagtacagttgtcattcacttcttagacaaagaattgacaggcttgaatgaagctttgccctttttcctacttttgattgacctttccagagcaagcacattagcaaagtttgccctcagttccaactcacaggatgaagtaagggaaaatattgctcgtggaatggcaattttaggtcctacgtttaccctcgatgctcttgttgaatgtcttgtgattggagttggtaccatgtcaggggtacgtcagcttgaaattatgtgctgctttggctgcatgtcagttcttgccaactacttcgtgttcatgactttcttcccagcttgtgtgtccttggtattagagctttctcgggaaagccgcgagggtcgtccaatttggcagctcagccattttgcccgagttttagaagaagaagaaaataagccgaatcctgtaactcagagggtcaagatgattatgtctctaggcttggttcttgttcatgctcacagtcgctggatagctgatccttctcctcaaaacagtacagcagatacttctaaggtttcattaggactggatgaaaatgtgtccaagagaattgaaccaagtgtttccctctggcagttttatctctctaaaatgatcagcatggatattgaacaagttattaccctaagtttagctctccttctggctgtcaagtacatcttctttgaacaaacagagacagaatctacactctcattaaaaaaccctatcacatctcctgtagtgacacaaaagaaagtcccagacaattgttgtagacgtgaacctatgctggtcagaaataaccagaaatgtgattcagtagaggaagagacagggataaaccgagaaagaaaagttgaggttataaaacccttagtggctgaaacagataccccaaacagagctacatttgtggttggtaactcctccttactcgatacttcatcagtactggtgacacaggaacctgaaattgaacttcccagggaacctcggcctaatgaagaatgtctacagatacttgggaatgcagagaaaggtgcaaaattccttagtgatgctgagatcatccagttagtcaatgctaagcatatcccagcctacaagttggaaactctgatggaaactcatgagcgtggtgtatctattcgccgacagttactttccaagaagctttcagaaccttcttctctccagtacctaccttacagggattataattactccttggtgatgggagcttgttgtgagaatgttattggatatatgcccatccctgttggagtggcaggacccctttgcttagatgaaaaagaatttcaggttccaatggcaacaacagaaggttgtcttgtggccagcaccaatagaggctgcagagcaataggtcttggtggaggtgccagcagccgagtccttgcagatgggatgactcgtggcccagttgtgcgtcttccacgtgcttgtgactctgcagaagtgaaagcctggctcgaaacatctgaagggttcgcagtgataaaggaggcatttgacagcactagcagatttgcacgtctacagaaacttcatacaagtatagctggacgcaacctttatatccgtttccagtccaggtcaggggatgccatggggatgaacatgatttcaaagggtacagagaaagcactttcaaaacttcacgagtatttccctgaaatgcagattctagccgttagtggtaactattgtactgacaagaaacctgctgctataaattggatagagggaagaggaaaatctgttgtttgtgaagctgtcattccagccaaggttgtcagagaagtattaaagactaccacagaggctatgattgaggtcaacattaacaagaatttagtgggctctgccatggctgggagcataggaggctacaacgcccatgcagcaaacattgtcaccgccatctacattgcctgtggacaggatgcagcacagaatgttggtagttcaaactgtattactttaatggaagcaagtggtcccacaaatgaagatttatatatcagctgcaccatgccatctatagagataggaacggtgggtggtgggaccaacctactacctcagcaagcctgtttgcagatgctaggtgttcaaggagcatgcaaagataatcctggggaaaatgcccggcagcttgcccgaattgtgtgtgggaccgtaatggctggggaattgtcacttatggcagcattggcagcaggacatcttgtcaaaagtcacatgattcacaacaggtcgaagatcaatttacaagacctccaaggagcttgcaccaagaagacagcctgaatagcccgacagttctgaactggaacatgggcattgggttctaaaggactaacataaaatctgtgaattaaaaaagctcaatgcattgtcttgtggaggatgaatagatgtgatcactgagacagccacttggtttttggctctttcagagaggtctcaggttctttccatgcagactcctcagatctgaacacagtttagtgctttacatgctgtgctctttgaagagatttcaacaagaatattgtatgttaaagcatcagagatggtaatctacagctcacctctgaaggcaaatataagctgggaaaaaagttttgatgaaattcttgaagttcatggtgatcagtgcaattgaccttctccctcactcctgccagttgaaaatggatttttaaattatactgtagctgatgaaactcctgattttgtagttaatttattaagtctgggatgtagaacttcaagaagtaagagctaagttctaagttcatgtttgtaaattaatacttcatttggtgctggtctattttgattttggggggtaatcagcattattcttcagaaggggacctgttttcttcaagggaagaaacactcttattcccaaactacagaataatgtgttaaacatgctaaatagttctatcaggaaaacaaatcactgtatttatctccgcaggctatttgttcagagaggccttttgtttaaatataaatgtttaaatataaatgtttgtctggattggctataacatgtctttcagcattaggcttttaagaaacacagggttttgtattctttactaaagatatcagagctcttaatgttgcttagatgagggtgactgtcaagtacaagcaagactgggaccttagaaatcattgtagaaacacagttttgaaagaaaaataccatgtctctaagccaactttaattgcttaaaagacatttttatttagttgaaaaatctagttttttttgtaaactgtatcaaatctgtatatgttgtaataaaacttatgctagtttattggaagtgttcaagaaataaaaatcaacttgtgtactgaaaccctggcttgcttgccgagcctaatgaaagggaaagtcagctttcagagccagtgaaggagccacgtgaatggccctagaactgtgcctagttcctgtggccaggaggttggtgactgaaacattcacacagggctctttgatggacccacgaacgctcttagctttctcagggggtcagcagagttattgaatcttaattttttttaatgtacaagttttgtataaataataaagaactccttattttgtattacatctaatgcttcaagtgttgctcttggaaagctgatgatgtctcttgtagaagatggactctgaaaaacattccaggaaaccatggcagcatggagagcctcttagtgattgtgtctgcattgttattgtggaagatttaccttttctgttgtacgtaaagcttaaattgcttttgttgtgactttttagccagtgactttttctgagcttttcatggaagtggcagtgaaaaatatgttgagtgttcattttagtgactgtaattaatatcttgctggattaatgttttgtacaattactaaattgtatacattttgttatagaatacttttttctagtttcagtaaataatgaaaaggaagttaataccaa

SEQ ID NO: 445339 - DNA, 4640 bp, Homo sapiens
  misc_feature (38)..(39): n is a, c, g, or t
  misc_feature (4599)..(4599): n is a, c, g, or t
gcctggtcccctatcgcctccgcctagcagctgccatnngtgcgcccccacagctctaggaccaataggcaggccctagtgctgggactcgaacggctattggttggccgagccgtggtgagagatggtgcggtgcctgttcttggccctgcagagagctgtgggcggttgttaaggcgaccgttcgtgacgtagcgccgtcaggccgagcagcccccaggcgattggctagacaatcgaacgatcctctcttattggtcgaaggctcgtccagctccgagcgtgcgtaaggtgagggctccttccgctccgcgactgcgttaactggagccaggctgagcgtcggcgccggggttcggtggcctctagtgagatctggaggatccaaggattctgtagctacaatgttgtcaagactttttcgaatgcatggcctctttgtggcctcccatccctgggaagtcatagtggggacagtgacactgaccatctgcatgatgtccatgaacatgtttactggtaacaataagatctgtggttggaattatgaatgtccaaagtttgaagaggatgttttgagcagtgacattataattctgacaataacacgatgcatagccatcctgtatatttacttccagttccagaatttacgtcaacttggatcaaaatatattttgggtattgctggccttttcacaattttctcaagttttgtattcagtacagttgtcattcacttcttagacaaagaattgacaggcttgaatgaagctttgccctttttcctacttttgattgacctttccagagcaagcacattagcaaagtttgccctcagttccaactcacaggatgaagtaagggaaaatattgctcgtggaatggcaattttaggtcctacgtttaccctcgatgctcttgttgaatgtcttgtgattggagttggtaccatgtcaggggtacgtcagcttgaaattatgtgctgctttggctgcatgtcagttcttgccaactacttcgtgttcatgactttcttcccagcttgtgtgtccttggtattagagctttctcgggaaagccgcgagggtcgtccaatttggcagctcagccattttgcccgagttttagaagaagaagaaaataagccgaatcctgtaactcagagggtcaagatgattatgtctctaggcttggttcttgttcatgctcacagtcgctggatagctgatccttctcctcaaaacagtacagcagatacttctaaggtttcattaggactggatgaaaatgtgtccaagagaattgaaccaagtgtttccctctggcagttttatctctctaaaatgatcagcatggatattgaacaagttattaccctaagtttagctctccttctggctgtcaagtacatcttctttgaacaaacagagacagaatctacactctcattaaaaaaccctatcacatctcctgtagtgacacaaaagaaagtcccagacaattgttgtagacgtgaacctatgctggtcagaaataaccagaaatgtgattcagtagaggaagagacagggataaaccgagaaagaaaagttgaggttataaaacccttagtggctgaaacagataccccaaacagagctacatttgtggttggtaactcctccttactcgatacttcatcagtactggtgacacaggaacctgaaattgaacttcccagggaacctcggcctaatgaagaatgtctacagatacttgggaatgcagagaaaggtgcaaaattccttagtgatgctgagatcatccagttagtcaatgctaagcatatcccagcctacaagttggaaactctgatggaaactcatgagcgtggtgtatctattcgccgacagttactttccaagaagctttcagaaccttcttctctccagtacctaccttacagggattataattactccttggtgatgggagcttgttgtgagaatgttattggatatatgcccatccctgttggagtggcaggacccctttgcttagatgaaaaagaatttcaggttccaatggcaacaacagaaggttgtcttgtggccagcaccaatagaggctgcagagcaataggtcttggtggaggtgccagcagccgagtccttgcagatgggatgactcgtggcccagttgtgcgtcttccacgtgcttgtgactctgcagaagtgaaagcctggctcgaaacatctgaagggttcgcagtgataaaggaggcatttgacagcactagcagatttgcacgtctacagaaacttcatacaagtatagctggacgcaacctttatatccgtttccagtccaggtcaggggatgccatggggatgaacatgatttcaaagggtacagagaaagcactttcaaaacttcacgagtatttccctgaaatgcagattctagccgttagtggtaactattgtactgacaagaaacctgctgctataaattggatagagggaagaggaaaatctgttgtttgtgaagctgtcattccagccaaggttgtcagagaagtattaaagactaccacagaggctatgattgaggtcaacattaacaagaatttagtgggctctgccatggctgggagcataggaggctacaacgcccatgcagcaaacattgtcaccgccatctacattgcctgtggacaggatgcagcacagaatgttggtagttcaaactgtattactttaatggaagcaagtggtcccacaaatgaagatttatatatcagctgcaccatgccatctatagagataggaacggtgggtggtgggaccaacctactacctcagcaagcctgtttgcagatgctaggtgttcaaggagcatgcaaagataatcctggggaaaatgcccggcagcttgcccgaattgtgtgtgggaccgtaatggctggggaattgtcacttatggcagcattggcagcaggacatcttgtcaaaagtcacatgattcacaacaggtcgaagatcaatttacaagacctccaaggagcttgcaccaagaagacagcctgaatagcccgacagttctgaactggaacatgggcattgggttctaaaggactaacataaaatctgtgaattaaaaaagctcaatgcattgtcttgtggaggatgaatagatgtgatcactgagacagccacttggtttttggctctttcagagaggtctcaggttctttccatgcagactcctcagatctgaacacagtttagtgctttacatgctgtgctctttgaagagatttcaacaagaatattgtatgttaaagcatcagagatggtaatctacagctcacctctgaaggcaaatataagctgggaaaaaagttttgatgaaattcttgaagttcatggtgatcagtgcaattgaccttctccctcactcctgccagttgaaaatggatttttaaattatactgtagctgatgaaactcctgattttgtagttaatttattaagtctgggatgtagaacttcaagaagtaagagctaagttctaagttcatgtttgtaaattaatacttcatttggtgctggtctattttgattttggggggtaatcagcattattcttcagaaggggacctgttttcttcaagggaagaaacactcttattcccaaactacagaataatgtgttaaacatgctaaatagttctatcaggaaaacaaatcactgtatttatctccgcaggctatttgttcagagaggccttttgtttaaatataaatgtttaaatataaatgtttgtctggattggctataacatgtctttcagcattaggcttttaagaaacacagggttttgtattctttactaaagatatcagagctcttaatgttgcttagatgagggtgactgtcaagtacaagcaagactgggaccttagaaatcattgtagaaacacagttttgaaagaaaaataccatgtctctaagccaactttaattgcttaaaagacatttttatttagttgaaaaatctagttttttttgtaaactgtatcaaatctgtatatgttgtaataaaacttatgctagtttattggaagtgttcaagaaataaaaatcaacttgtgtactgataaaatactctagcctgggccagagaagataatgttctttaatgttgtccaggaaaccctggcttgcttgccgagcctaatgaaagggaaagtcagctttcagagccagtgaaggagccacgtgaatggccctagaactgtgcctagttcctgtggccaggaggttggtgactgaaacattcacacagggctctttgatggacccacgaacgctcttagctttctcagggggtcagcagagttattgaatcttaattttttttaatgtacaagttttgtataaataataaagaactccttattttgtattacatctaatgcttcaagtgttgctcttggaaagctgatgatgtctcttgtagaagatggactctgaaaaacattccaggaaaccatggcagcatggagagcctcttagtgattgtgtctgcattgttattgtggaagatttacntacaacagaaaaggtaaatcttcgtcgacgcggccgcgaat

SEQ ID NO: 445340 - DNA, 2037 bp, Homo sapiens
agttgatttagtaagaaattggtcatgattttaagggtgaatcttgttgtgtctctccctggctacagatgctaggtgttcaaggagcatgcaaagataatcctggggaaaatgcccggcagcttgcccgaattgtgtgtgggaccgtaatggctggggaattgtcacttatggcagcattggcagcaggacatcttgtcaaaagtcacatgattcacaacaggtcgaagatcaatttacaagacctccaaggagcttgcaccaagaagacagcctgaatagcccgacagttctgaactggaacatgggcattgggttctaaaggactaacataaaatctgtgaattaaaaaagctcaatgcattgtcttgtggaggatgaatagatgtgatcactgagacagccacttggtttttggctctttcagagaggtctcaggttctttccatgcagactcctcagatctgaacacagtttagtgctttacatgctgtgctctttgaagagatttcaacaagaatattgtatgttaaagcatcagagatggtaatctacagctcacctctgaaggcaaatataagctgggaaaaaagttttgatgaaattcttgaagttcatggtgatcagtgcaattgaccttctccctcactcctgccagttgaaaatggatttttaaattatactgtagctgatgaaactcctgattttgtagttaatttattaagtctgggatgtagaacttcaagaagtaagagctaagttctaagttcatgtttgtaaattaatacttcatttggtgctggtctattttgattttggggggtaatcagcattattcttcagaaggggacctgttttcttcaagggaagaaacactcttattcccaaactacagaataatgtgttaaacatgctaaatagttctatcaggaaaacaaatcactgtatttatctccgcaggctatttgttcagagaggccttttgtttaaatataaatgtttaaatataaatgtttgtctggattggctataacatgtctttcagcattaggcttttaagaaacacagggttttgtattctttactaaagatatcagagctcttaatgttgcttagatgagggtgactgtcaagtacaagcaagactgggaccttagaaatcattgtagaaacacagttttgaaagaaaaataccatgtctctaagccaactttaattgcttaaaagacatttttatttagttgaaaaatctagttttttttgtaaactgtatcaaatctgtatatgttgtaataaaacttatgctagtttattggaagtgttcaagaaataaaaatcaacttgtgtactgataaaatactctagcctgggccagagaagataatgttctttaatgttgtccaggaaaccctggcttgcttgccgagcctaatgaaagggaaagtcagctttcagagccagtgaaggagccacgtgaatggccctagaactgtgcctagttcctgtggccaggaggttggtgactgaaacattcacacagggctctttgatggacccacgaacgctcttagctttctcagggggtcagcagagttattgaatcttaattttttttaatgtacaagttttgtataaataataaagaactccttattttgtattacatctaatgcttcaagtgttgctcttggaaagctgatgatgtctcttgtagaagatggactctgaaaaacattccaggaaaccatggcagcatggagagcctcttagtgattgtgtctgcattgttattgtggaagatttaccttttctgttgtacgtaaagcttaaattgcttttgttgtgactttttagccagtgactttttctgagcttttcatggaagtggcagtgaaaaatatgttgagtgttcattttagtgactgtaattaatatcttgctggattaatgttttgtacaattactaaattgtatacattttgttatagaatacttttttctagtttcagtaaataatgaaaaggaagttaataccaa

SEQ ID NO: 445341 - DNA, 3002 bp, Homo sapiens
  misc_feature (38)..(39): n is a, c, g, or t
gcctggtcccctatcgcctccgcctagcagctgccatnngtgcgcccccacagctctaggaccaataggcaggccctagtgctgggactcgaacggctattggttggccgagccgtggtgagagatggtgcggtgcctgttcttggccctgcagagagctgtgggcggttgttaaggcgaccgttcgtgacgtagcgccgtcaggccgagcagcccccaggcgattggctagacaatcgaacgatcctctcttattggtcgaaggctcgtccagctccgagcgtgcgtaaggtgagggctccttccgctccgcgactgcgttaactggagccaggctgagcgtcggcgccggggttcggtggcctctagtgagatctggaggatccaaggattctgtagctacaatgttgtcaagactttttcgaatgcatggcctctttgtggcctcccatccctgggaagtcatagtggggacagtgacactgaccatctgcatgatgtccatgaacatgtttactggtaacaataagatctgtggttggaattatgaatgtccaaagtttgaagaggatgttttgagcagtgacattataattctgacaataacacgatgcatagccatcctgtatatttacttccagttccagaatttacgtcaacttggatcaaaatatattttgggtattgctggccttttcacaattttctcaagttttgtattcagtacagttgtcattcacttcttagacaaagaattgacaggcttgaatgaagctttgccctttttcctacttttgattgacctttccagagcaagcacattagcaaagtttgccctcagttccaactcacaggatgaagtaagggaaaatattgctcgtggaatggcaattttaggtcctacgtttaccctcgatgctcttgttgaatgtcttgtgattggagttggtaccatgtcaggggtacgtcagcttgaaattatgtgctgctttggctgcatgtcagttcttgccaactacttcgtgttcatgactttcttcccagcttgtgtgtccttggtattagagctttctcgggaaagccgcgagggtcgtccaatttggcagctcagccattttgcccgagttttagaagaagaagaaaataagccgaatcctgtaactcagagggtcaagatgattatgtctctaggcttggttcttgttcatgctcacagtcgctggatagctgatccttctcctcaaaacagtacagcagatacttctaaggtttcattaggactggatgaaaatgtgtccaagagaattgaaccaagtgtttccctctggcagttttatctctctaaaatgatcagcatggatattgaacaagttattaccctaagtttagctctccttctggctgtcaagtacatcttctttgaacaaacagagacagaatctacactctcattaaaaaaccctatcacatctcctgtagtgacacaaaagaaagtcccagacaattgttgtagacgtgaacctatgctggtcagaaataaccagaaatgtgattcagtagaggaagagacagggataaaccgagaaagaaaagttgaggttataaaacccttagtggctgaaacagataccccaaacagagctacatttgtggttggtaactcctccttactcgatacttcatcagtactggtgacacaggaacctgaaattgaacttcccagggaacctcggcctaatgaagaatgtctacagatacttgggaatgcagagaaaggtgcaaaattccttagtgatgctgagatcatccagttagtcaatgctaagcatatcccagcctacaagttggaaactctgatggaaactcatgagcgtggtgtatctattcgccgacagttactttccaagaagctttcagaaccttcttctctccagtacctaccttacagggattataattactccttggtgatgggagcttgttgtgagaatgttattggatatatgcccatccctgttggagtggcaggacccctttgcttagatgaaaaagaatttcaggttccaatggcaacaacagaaggttgtcttgtggccagcaccaatagaggctgcagagcaataggtcttggtggaggtgccagcagccgagtccttgcagatgggatgactcgtggcccagttgtgcgtcttccacgtgcttgtgactctgcagaagtgaaagcctggctcgaaacatctgaagggttcgcagtgataaaggaggcatttgacagcactagcagatttgcacgtctacagaaacttcatacaagtatagctggacgcaacctttatatccgtttccagtccaggtcaggggatgccatggggatgaacatgatttcaaagggtacagagaaagcactttcaaaacttcacgagtatttccctgaaatgcagattctagccgttagtggtaactattgtactgacaagaaacctgctgctataaattggatagagggaagaggaaaatgtattaaagactaccacagaggctatgattgaggtcaacattaacaagaatttagtgggctctgccatggctgggagcataggaggctacaacgcccatgcagcaaacattgtcaccgccatctacattgcctgtggacaggatgcagcacagaatgttggtagttcaaactgtattactttaatggaagcaagtggtcccacaaatgaagatttatatatcagctgcaccatgccatctatagagataggaacggtgggtggtgggaccaacctactacctcagcaagcctgtttgcaggtatgatgtatcaggcatagagtccacaagcctagttctgactctctgggtttctctttctatctgagactatgtatcactcacctctattttaattggtcttttccaaactcttttgtcatatcagcctaatccattgtgtccaaataagcatgtttaagcttatgcttagataagaaagtaga

SEQ ID NO: 445342 - DNA, 2731 bp, Homo sapiens
  misc_feature (38)..(39): n is a, c, g, or t
gcctggtcccctatcgcctccgcctagcagctgccatnngtgcgcccccacagctctaggaccaataggcaggccctagtgctgggactcgaacggctattggttggccgagccgtggtgagagatggtgcggtgcctgttcttggccctgcagagagctgtgggcggttgttaaggcgaccgttcgtgacgtagcgccgtcaggccgagcagcccccaggcgattggctagacaatcgaacgatcctctcttattggtcgaaggctcgtccagctccgagcgtgcgtaaggtgagggctccttccgctccgcgactgcgttaactggagccaggctgagcgtcggcgccggggttcggtggcctctagtgagatctggaggatccaaggattctgtagctacaatgttgtcaagactttttcgaatgcatggcctctttgtggcctcccatccctgggaagtcatagtggggacagtgacactgaccatctgcatgatgtccatgaacatgtttactggtaacaataagatctgtggttggaattatgaatgtccaaagtttgaagaggatgttttgagcagtgacattataattctgacaataacacgatgcatagccatcctgtatatttacttccagttccagaatttacgtcaacttggatcaaaatatattttgggtattgctggccttttcacaattttctcaagttttgtattcagtacagttgtcattcacttcttagacaaagaattgacaggcttgaatgaagctttgccctttttcctacttttgattgacctttccagagcaagcacattagcaaagtttgccctcagttccaactcacaggatgaagtaagggaaaatattgctcgtggaatggcaattttaggtcctacgtttaccctcgatgctcttgttgaatgtcttgtgattggagttggtaccatgtcaggggtacgtcagcttgaaattatgtgctgctttggctgcatgtcagttcttgccaactacttcgtgttcatgactttcttcccagcttgtgtgtccttggtattagagctttctcgggaaagccgcgagggtcgtccaatttggcagctcagccattttgcccgagttttagaagaagaagaaaataagccgaatcctgtaactcagagggtcaagatgattatgtctctaggcttggttcttgttcatgctcacagtcgctggatagctgatccttctcctcaaaacagtacagcagatacttctaaggtttcattaggactggatgaaaatgtgtccaagagaattgaaccaagtgtttccctctggcagttttatctctctaaaatgatcagcatggatattgaacaagttattaccctaagtttagctctccttctggctgtcaagtacatcttctttgaacaaacagagacagaatctacactctcattaaaaaaccctatcacatctcctgtagtgacacaaaagaaagtcccagacaattgttgtagacgtgaacctatgctggtcagaaataaccagaaatgtgattcagtagaggaagagacagggataaaccgagaaagaaaagttgaggttataaaacccttagtggctgaaacagataccccaaacagagctacatttgtggttggtaactcctccttactcgatacttcatcagtactggtgacacaggaacctgaaattgaacttcccagggaacctcggcctaatgaagaatgtctacagatacttgggaatgcagagaaaggtgcaaaattccttagtgatgctgagatcatccagttagtcaatgctaagcatatcccagcctacaagttggaaactctgatggaaactcatgagcgtggtgtatctattcgccgacagttactttccaagaagctttcagaaccttcttctctccagtacctaccttacagggattataattactccttggtgatgggagcttgttgtgagaatgttattggatatatgcccatccctgttggagtggcaggacccctttgcttagatgaaaaagaatttcaggttccaatggcaacaacagaaggttgtcttgtggccagcaccaatagaggctgcagagcaataggtcttggtggaggtgccagcagccgagtccttgcagatgggatgactcgtggcccagttgtgcgtcttccacgtgcttgtgactctgcagaagtgaaagcctggctcgaaacatctgaagggttcgcagtgataaaggaggcatttgacagcactagcagatttgcacgtctacagaaacttcatacaagtatagctggacgcaacctttatatccgtttccagtccaggtcaggggatgccatggggatgaacatgatttcaaaggtaagtgtaggcagagtatctgaaagtacttttattaaaatgaaagtacttttataaaaaacaaatcaggcatttgttgattggtattccttacatttgatagatttaatttagacttggcattacacatatcctgagtttacttaggactgggaacaatcttagtattgacatttcaaaactttatccagtcaagagaccacctttgaagctgacctcttcaagatttgtctttaagaacaccaatataatttcagtactttgggaggccaaggcaagaagattgcttggggtctggagtttaagaccagcctgggcaacacagtgagatgctatctcta

SEQ ID NO: 445343 - DNA, 254 bp, Homo sapiens
cacaattttctcaagttttgtattcagtacagttgtcattcacttcttagacaaagaattgacaggcttgaagtaagtatttaaaacctaaatatactttctgtcaaaatacattttaaaaaacttttcttccccatgctgtaaaggtacattttcaaaagttaagaaaataaggggaaatttttttgtataattttactattagctaattttaataactattaacattttggcatatatccttttctactgtt

SEQ ID NO: 445344 - DNA, 747 bp, Homo sapiens
  misc_feature (38)..(39): n is a, c, g, or t
gcctggtcccctatcgcctccgcctagcagctgccatnngtgcgcccccacagctctaggaccaataggcaggccctagtgctgggactcgaacggctattggttggccgagccgtggtgagagatggtgcggtgcctgttcttggccctgcagagagctgtgggcggttgttaaggcgaccgttcgtgacgtagcgccgtcaggccgagcagcccccaggcgattggctagacaatcgaacgatcctctcttattggtcgaaggctcgtccagctccgagcgtgcgtaaggtgagggctccttccgctccgcgactgcgttaactggagccaggctgagcgtcggcgccggggttcggtggcctctagtgagatctggaggatccaaggattctgtagctacaatgttgtcaagactttttcgaatgcatggcctctttgtggcctcccatccctgggaagtcatagtggggacagtgacactgaccatctgcatgatgtccatgaacatgtttactggtaacaataagatctgtggttggaattatgaatgtccaaagtttgaagaggatgttttgagcagtgacattataattctgacaataacacgatgcatagccatcctgtatatttacttccagttccagaatttacgtcaacttggatcaaaatatattttgggtaatagttttacatatttaacttctggtgtcatcagatttttgatttgctgtggaaataaacctg

SEQ ID NO: 445345 - DNA, 4441 bp, Homo sapiens
  misc_feature (38)..(39): n is a, c, g, or t
gcctggtcccctatcgcctccgcctagcagctgccatnngtgcgcccccacagctctaggaccaataggcaggccctagtgctgggactcgaacggctattggttggccgagccgtggtgagagatggtgcggtgcctgttcttggccctgcagagagctgtgggcggttgttaaggcgaccgttcgtgacgtagcgccgtcaggccgagcagcccccaggcgattggctagacaatcgaacgatcctctcttattggtcgaaggctcgtccagctccgagcgtgcgtaaggtgagggctccttccgctccgcgactgcgttaactggagccaggctgagcgtcggcgccggggttcggtggcctctagtgagatctggaggatccaaggattctgtagctacaatgttgtcaagactttttcgaatgcatggcctctttgtggcctcccatccctgggaagtcatagtggggacagtgacactgaccatctgcatgatgtccatgaacatgtttactggtaacaataagatctgtggttggaattatgaatgtccaaagtttgaagaggatgttttgagcagtgacattataattctgacaataacacgatgcatagccatcctgtatatttacttccagttccagaatttacgtcaacttggatcaaaatatattttgggtattgctggccttttcacaattttctcaagttttgtattcagtacagttgtcattcacttcttagacaaagaattgacaggcttgaatgaagctttgccctttttcctacttttgattgacctttccagagcaagcacattagcaaagtttgccctcagttccaactcacaggatgaagtaagggaaaatattgctcgtggaatggcaattttaggtcctacgtttaccctcgatgctcttgttgaatgtcttgtgattggagttggtaccatgtcaggggtacgtcagcttgaaattatgtgctgctttggctgcatgtcagttcttgccaactacttcgtgttcatgactttcttcccagcttgtgtgtccttggtattagagctttctcgggaaagccgcgagggtcgtccaatttggcagctcagccattttgcccgagttttagaagaagaagaaaataagccgaatcctgtaactcagagggtcaagatgattatgtctctaggcttggttcttgttcatgctcacagtcgctggatagctgatccttctcctcaaaacagtacagcagatacttctaaggtttcattaggactggatgaaaatgtgtccaagagaattgaaccaagtgtttccctctggcagttttatctctctaaaatgatcagcatggatattgaacaagttattaccctaagtttagctctccttctggctgtcaagtacatcttctttgaacaaacagagacagaatctacactctcattaaaaaaccctatcacatctcctgtagtgacacaaaagaaagtcccagacaattgttgtagacgtgaacctatgctggtcagaaataaccagaaatgtgattcagtagaggaagagacagggataaaccgagaaagaaaagttgaggttataaaacccttagtggctgaaacagataccccaaacagagctacatttgtggttggtaactcctccttactcgatacttcatcagtactggtgacacaggaacctgaaattgaacttcccagggaacctcggcctaatgaagaatgtctacagatacttgggaatgcagagaaaggtgcaaaattccttagtgatgctgagatcatccagttagtcaatgctaagcatatcccagcctacaagttggaaactctgatggaaactcatgagcgtggtgtatctattcgccgacagttactttccaagaagctttcagaaccttcttctctccagtacctaccttacagggattataattactccttggtgatgggagcttgttgtgagaatgttattggatatatgcccatccctgttggagtggcaggacccctttgcttagatgaaaaagaatttcaggttccaatggcaacaacagaaggttgtcttgtggccagcaccaatagaggctgcagagcaataggtcttggtggaggtgccagcagccgagtccttgcagatgggatgactcgtggcccagttgtgcgtcttccacgtgcttgtgactctgcagaagtgaaagcctggctcgaaacatctgaagggttcgcagtgataaaggaggcatttgacagcactagcagatttgcacgtctacagaaacttcatacaagtatagctggacgcaacctttatatccgtttccagtccaggtcaggggatgccatggggatgaacatgatttcaaagggtacagagaaagcactttcaaaacttcacgagtatttccctgaaatgcagattctagccgttagtggtaactattgtactgacaagaaacctgctgctataaattggatagagggaagaggaaaatctgttgtttgtgaagctgtcattccagccaaggttgtcagagaagtattaaagactaccacagaggctatgattgaggtcaacattaacaagaatttagtgggctctgccatggctgggagcataggaggctacaacgcccatgcagcaaacattgtcaccgccatctacattgcctgtggacaggatgcagcacagaatgttggtagttcaaactgtattactttaatggaagcaagtggtcccacaaatgaagatttatatatcagctgcaccatgccatctatagagataggaacggtgggtggtgggaccaacctactacctcagcaagcctgtttgcagatgctaggtgttcaaggagcatgcaaagataatcctggggaaaatgcccggcagcttgcccgaattgtgtgtgggaccgtaatggctggggaattgtcacttatggcagcattggcagcaggacatcttgtcaaaagtcacatgattcacaacaggtcgaagatcaatttacaagacctccaaggagcttgcaccaagaagacagcctgaatagcccgacagttctgaactggaacatgggcattgggttctaaaggactaacataaaatctgtgaattaaaaaagctcaatgcattgtcttgtggaggatgaatagatgtgatcactgagacagccacttggtttttggctctttcagagaggtctcaggttctttccatgcagactcctcagatctgaacacagtttagtgctttacatgctgtgctctttgaagagatttcaacaagaatattgtatgttaaagcatcagagatggtaatctacagctcacctctgaaggcaaatataagctgggaaaaaagttttgatgaaattcttgaagttcatggtgatcagtgcaattgaccttctccctcactcctgccagttgaatactgtagctgatgaaactcctgattttgtagttaatttattaagtctgggatgtagaacttcaagaagtaagagctaagttctaagttcatgtttgtaaattaatacttcatttggtgctggtctattttgattttggggggtaatcagcattattcttcagaaggggacctgttttcttcaagggaagaaacactcttattcccaaactacagaataatgtgttaaacatgctaaatagttctatcaggaaaacaaatcactgtatttatctccgcaggctatttgttcagagaggccttttgtttaaatataaatgtttaaatataaatgtttgtctggattggctataacatgtctttcagcattaggcttttaagaaacacagggttttgtattctttactaaagatatcagagctcttaatgttgcttagatgagggtgactgtcaagtacaagcaagactgggaccttagaaatcattgtagaaacacagttttgaaagaaaaataccatgtctctaagccaactttaattgcttaaaagacatttttatttagttgaaaaatctagttttttttgtaaactgtatcaaatctgtatatgttgtaataaaacttatgctagtttattggaagtgttcaagaaataaaaatcaacttgtgtactgataaaatactctagcctgggccagagaagataatgttctttaatgttgtccaggaaaccctggcttgcttgccgagcctaatgaaagggaaagtcagctttcagagccagtgaaggagccacgtgaatggccctagaactgtgcctagttcctgtggccaggaggttggtgactgaaacattcacacagggctctttgatggacccacgaacgctcttagctttctcagggggtcagcagagttattgaatcttaattttttttaatgtacaagttttgtataaataataaagaactccttattttgtattaca

SEQ ID NO: 445346 - DNA, 4980 bp, Homo sapiens
  misc_feature (38)..(39): n is a, c, g, or t
gcctggtcccctatcgcctccgcctagcagctgccatnngtgcgcccccacagctctaggaccaataggcaggccctagtgctgggactcgaacggctattggttggccgagccgtggtgagagatggtgcggtgcctgttcttggccctgcagagagctgtgggcggttgttaaggcgaccgttcgtgacgtagcgccgtcaggccgagcagcccccaggcgattggctagacaatcgaacgatcctctcttattggtcgaaggctcgtccagctccgagcgtgcgtaaggtgagggctccttccgctccgcgactgcgttaactggagccaggctgagcgtcggcgccggggttcggtggcctctagtgagatctggaggatccaaggattctgtagctacaatgttgtcaagactttttcgaatgcatggcctctttgtggcctcccatccctgggaagtcatagtggggacagtgacactgaccatctgcatgatgtccatgaacatgtttactggtaacaataagatctgtggttggaattatgaatgtccaaagtttgaagaggatgttttgagcagtgacattataattctgacaataacacgatgcatagccatcctgtatatttacttccagttccagaatttacgtcaacttggatcaaaatatattttgggtattgctggccttttcacaattttctcaagttttgtattcagtacagttgtcattcacttcttagacaaagaattgacaggcttgaatgaagctttgccctttttcctacttttgattgacctttccagagcaagcacattagcaaagtttgccctcagttccaactcacaggatgaagtaagggaaaatattgctcgtggaatggcaattttaggtcctacgtttaccctcgatgctcttgttgaatgtcttgtgattggagttggtaccatgtcaggggtacgtcagcttgaaattatgtgctgctttggctgcatgtcagttcttgccaactacttcgtgttcatgactttcttcccagcttgtgtgtccttggtattagagctttctcgggaaagccgcgagggtcgtccaatttggcagctcagccattttgcccgagttttagaagaagaagaaaataagccgaatcctgtaactcagagggtcaagatgattatgtctctaggcttggttcttgttcatgctcacagtcgctggatagctgatccttctcctcaaaacagtacagcagatacttctaaggtttcattaggactggatgaaaatgtgtccaagagaattgaaccaagtgtttccctctggcagttttatctctctaaaatgatcagcatggatattgaacaagttattaccctaagtttagctctccttctggctgtcaagtacatcttctttgaacaaacagagacagaatctacactctcattaaaaaaccctatcacatctcctgtagtgacacaaaagaaagtcccagacaattgttgtagacgtgaacctatgctggtcagaaataaccagaaatgtgattcagtagaggaagagacagggataaaccgagaaagaaaagttgaggttataaaacccttagtggctgaaacagataccccaaacagagctacatttgtggttggtaactcctccttactcgatacttcatcagtactggtgacacaggaacctgaaattgaacttcccagggaacctcggcctaatgaagaatgtctacagatacttgggaatgcagagaaaggtgcaaaattccttagtgatgctgagatcatccagttagtcaatgctaagcatatcccagcctacaagttggaaactctgatggaaactcatgagcgtggtgtatctattcgccgacagttactttccaagaagctttcagaaccttcttctctccagtacctaccttacagggattataattactccttggtgatgggagcttgttgtgagaatgttattggatatatgcccatccctgttggagtggcaggacccctttgcttagatgaaaaagaatttcaggttccaatggcaacaacagaaggttgtcttgtggccagcaccaatagaggctgcagagcaataggtgtaagttggcatttatatatttgccagtttaaaaatacatcataagtaaggcaatgagaagagttttaaggacaattagtgataccttttgggtcaagcatgagcatttttgggtaacatgtgcttgcttctctaacatatactgtgtagcttggtggaggtgccagcagccgagtccttgcagatgggatgactcgtggcccagttgtgcgtcttccacgtgcttgtgactctgcagaagtgaaagcctggctcgaaacatctgaagggttcgcagtgataaaggaggcatttgacagcactagcagatttgcacgtctacagaaacttcatacaagtatagctggacgcaacctttatatccgtttccagtccaggtcaggggatgccatggggatgaacatgatttcaaagggtacagagaaagcactttcaaaacttcacgagtatttccctgaaatgcagattctagccgttagtggtaactattgtactgacaagaaacctgctgctataaattggatagagggaagaggaaaatctgttgtttgtgaagctgtcattccagccaaggttgtcagagaagtattaaagactaccacagaggctatgattgaggtcaacattaacaagaatttagtgggctctgccatggctgggagcataggaggctacaacgcccatgcagcaaacattgtcaccgccatctacattgcctgtggacaggatgcagcacagaatgttggtagttcaaactgtattactttaatggaagcaagtggtcccacaaatgaagatttatatatcagctgcaccatgccatctatagagataggaacggtgggtggtgggaccaacctactacctcagcaagcctgtttgcagatgctaggtgttcaaggagcatgcaaagataatcctggggaaaatgcccggcagcttgcccgaattgtgtgtgggaccgtaatggctggggaattgtcacttatggcagcattggcagcaggacatcttgtcaaaagtcacatgattcacaacaggtcgaagatcaatttacaagacctccaaggagcttgcaccaagaagacagcctgaatagcccgacagttctgaactggaacatgggcattgggttctaaaggactaacataaaatctgtgaattaaaaaagctcaatgcattgtcttgtggaggatgaatagatgtgatcactgagacagccacttggtttttggctctttcagagaggtctcaggttctttccatgcagactcctcagatctgaacacagtttagtgctttacatgctgtgctctttgaagagatttcaacaagaatattgtatgttaaagcatcagagatggtaatctacagctcacctctgaaggcaaatataagctgggaaaaaagttttgatgaaattcttgaagttcatggtgatcagtgcaattgaccttctccctcactcctgccagttgaaaatggatttttaaattatactgtagctgatgaaactcctgattttgtagttaatttattaagtctgggatgtagaacttcaagaagtaagagctaagttctaagttcatgtttgtaaattaatacttcatttggtgctggtctattttgattttggggggtaatcagcattattcttcagaaggggacctgttttcttcaagggaagaaacactcttattcccaaactacagaataatgtgttaaacatgctaaatagttctatcaggaaaacaaatcactgtatttatctccgcaggctatttgttcagagaggccttttgtttaaatataaatgtttaaatataaatgtttgtctggattggctataacatgtctttcagcattaggcttttaagaaacacagggttttgtattctttactaaagatatcagagctcttaatgttgcttagatgagggtgactgtcaagtacaagcaagactgggaccttagaaatcattgtagaaacacagttttgaaagaaaaataccatgtctctaagccaactttaattgcttaaaagacatttttatttagttgaaaaatctagttttttttgtaaactgtatcaaatctgtatatgttgtaataaaacttatgctagtttattggaagtgttcaagaaataaaaatcaacttgtgtactgataaaatactctagcctgggccagagaagataatgttctttaatgttgtccaggaaaccctggcttgcttgccgagcctaatgaaagggaaagtcagctttcagagccagtgaaggagccacgtgaatggccctagaactgtgcctagttcctgtggccaggaggttggtgactgaaacattcacacagggctctttgatggacccacgaacgctcttagctttctcagggggtcagcagagttattgaatcttaattttttttaatgtacaagttttgtataaataataaagaactccttattttgtattacatctaatgcttcaagtgttgctcttggaaagctgatgatgtctcttgtagaagatggactctgaaaaacattccaggaaaccatggcagcatggagagcctcttagtgattgtgtctgcattgttattgtggaagatttaccttttctgttgtacgtaaagcttaaattgcttttgttgtgactttttagccagtgactttttctgagcttttcatggaagtggcagtgaaaaatatgttgagtgttcattttagtgactgtaattaatatcttgctggattaatgttttgtacaattactaaattgtatacattttgttatagaatacttttttctagtttcagtaaataatgaaaaggaagttaataccaa

SEQ ID NO: 445347 - DNA, 3889 bp, Homo sapiens
  misc_feature (38)..(39): n is a, c, g, or t
gcctggtcccctatcgcctccgcctagcagctgccatnngtgcgcccccacagctctaggaccaataggcaggccctagtgctgggactcgaacggctattggttggccgagccgtggtgagagatggtgcggtgcctgttcttggccctgcagagagctgtgggcggttgttaaggcgaccgttcgtgacgtagcgccgtcaggccgagcagcccccaggcgattggctagacaatcgaacgatcctctcttattggtcgaaggctcgtccagctccgagcgtgcgtaaggtgagggctccttccgctccgcgactgcgttaactggagccaggctgagcgtcggcgccggggttcggtggcctctagtgagatctggaggatccaaggattctgtagctacaatgttgtcaagactttttcgaatgcatggcctctttgtggcctcccatccctgggaagtcatagtggggacagtgacactgaccatctgcatgatgtccatgaacatgtttactggtaacaataagatctgtggttggaattatgaatgtccaaagtttgaagaggatgttttgagcagtgacattataattctgacaataacacgatgcatagccatcctgtatatttacttccagttccagaatttacgtcaacttggatcaaaatatattttgggtattgctggccttttcacaattttctcaagttttgtattcagtacagttgtcattcacttcttagacaaagaattgacaggcttgaatgaagctttgccctttttcctacttttgattgacctttccagagcaagcacattagcaaagtttgccctcagttccaactcacaggatgaagtaagggaaaatattgctcgtggaatggcaattttaggtcctacgtttaccctcgatgctcttgttgaatgtcttgtgattggagttggtaccatgtcaggggtacgtcagcttgaaattatgtgctgctttggctgcatgtcagttcttgccaactacttcgtgttcatgactttcttcccagcttgtgtgtccttggtattagagctttctcgggaaagccgcgagggtcgtccaatttggcagctcagccattttgcccgagttttagaagaagaagaaaataagccgaatcctgtaactcagagggtcaagatgattatgtctctaggcttggttcttgttcatgctcacagtcgctggatagctgatccttctcctcaaaacagtacagcagatacttctaaggtttcattaggactggatgaaaatgtgtccaagagaattgaaccaagtgtttccctctggcagttttatctctctaaaatgatcagcatggatattgaacaagttattaccctaagtttagctctccttctggctgtcaagtacatcttctttgaacaaacagagacagaatctacactctcattaaaaaaccctatcacatctcctgtagtgacacaaaagaaagtcccagacaattgttgtagacgtgaacctatgctggtcagaaataaccagaaatgtgattcagtagaggaagagacagggataaaccgagaaagaaaagttgaggttataaaacccttagtggctgaaacagataccccaaacagagctacatttgtggttggtaactcctccttactcgatacttcatcagtactggtgacacaggaacctgaaattgaacttcccagggaacctcggcctaatgaagaatgtctacagatacttgggaatgcagagaaaggtgcaaaattccttagtgatgctgagatcatccagttagtcaatgctaagcatatcccagcctacaagttggaaactctgatggaaactcatgagcgtggtgtatctattcgccgacagttactttccaagaagctttcagaaccttcttctctccagtacctaccttacagggattataattactccttggtgatgggagcttgttgtgagaatgttattggatatatgcccatccctgttggagtggcaggacccctttgcttagatgaaaaagaatttcaggttccaatggcaacaacagaaggttgtcttgtggccagcaccaatagaggctgcagagcaataggtcttggtggaggtgccagcagccgagtccttgcagatgggatgactcgtggcccagttgtgcgtcttccacgtgcttgtgactctgcagaagtgaaagcctggctcgaaacatctgaagggttcgcagtgataaaggaggcatttgacagcactagcagatttgcacgtctacagaaacttcatacaagtatagctggacgcaacctttatatccgtttccagtccaggtcaggggatgccatggggatgaacatgatttcaaagggtacagagaaagcactttcaaaacttcacgagtatttccctgaaatgcagattctagccgttagtggtaactattgtactgacaagaaacctgctgctataaattggatagagggaagaggaaaatctgttgtttgtgaagctgtcattccagccaaggttgtcagagaagtattaaagactaccacagaggctatgattgaggtcaacattaacaagaatttagtgggctctgccatggctgggagcataggaggctacaacgcccatgcagcaaacattgtcaccgccatctacattgcctgtggacaggatgcagcacagaatgttggtagttcaaactgtattactttaatggaagcaagtggtcccacaaatgaagatttatatatcagctgcaccatgccatctatagagataggaacggtgggtggtgggaccaacctactacctcagcaagcctgtttgcagatgctaggtgttcaaggagcatgcaaagataatcctggggaaaatgcccggcagcttgcccgaattgtgtgtgggaccgtaatggctggggaattgtcacttatggcagcattggcagcaggacatcttgtcaaaagtcacatgattcacaacaggtcgaagatcaatttacaagacctccaaggagcttgcaccaagaagacagcctgaatagcccgacagttctgaactggaacatgggcattgggttctaaaggactaacataaaatctgtgaattaaaaaagctcaatgcattgtcttgtggaggatgaatagatgtgatcactgagacagccacttggtttttggctctttcagagaggtctcaggttctttccatgcagactcctcagatctgaacacagtttagtgctttacatgctgtgctctttgaagagatttcaacaagaatattgtatgttaaagcatcagagatggtaatctacagctcacctctgaaggcaaatataagctgggaaaaaagttttgatgaaattcttgaagttcatggtgatcagtgcaattgaccttctccctcactcctgccagttgaatactgtagctgatgaaactcctgattttgtagttaatttattaagtctgggatgtagaacttcaagaagtaagagctaagttctaagttcatgtttgtaaattaatacttcatttggtgctggtctattttgattttggggggtaatcagcattattcttcagaaggggacctgttttcttcaagggaagaaacactcttattcccaaactacagaataatgtgttaaacatgctaaatagttctatcaggaaaacaaatcactgtatttatctccgcaggctatttgttcagagaggccttttgtttaaatataaatgttaattttaaaaagtcgacgcggccgcaatttattagtaatgtcgacccggaattcggaccgtacctgccggcgtccagctttcctatgtgagtcttttaaagctggcgtaatc

SEQ ID NO: 445348 - DNA, 2666 bp, Homo sapiens
  misc_feature (38)..(39): n is a, c, g, or t
gcctggtcccctatcgcctccgcctagcagctgccatnngtgcgcccccacagctctaggaccaataggcaggccctagtgctgggactcgaacggctattggttggccgagccgtggtgagagatggtgcggtgcctgttcttggccctgcagagagctgtgggcggttgttaaggcgaccgttcgtgacgtagcgccgtcaggccgagcagcccccaggcgattggctagacaatcgaacgatcctctcttattggtcgaaggctcgtccagctccgagcgtgcgtaaggtgagggctccttccgctccgcgactgcgttaactggagccaggctgagcgtcggcgccggggttcggtggcctctagtgagatctggaggatccaaggattctgtagctacaatgttgtcaagactttttcgaatgcatggcctctttgtggcctcccatccctgggaagtcatagtggggacagtgacactgaccatctgcatgatgtccatgaacatgtttactggtaacaataagatctgtggttggaattatgaatgtccaaagtttgaagaggatgttttgagcagtgacattataattctgacaataacacgatgcatagccatcctgtatatttacttccagttccagaatttacgtcaacttggatcaaaatatattttgggtattgctggccttttcacaattttctcaagttttgtattcagtacagttgtcattcacttcttagacaaagaattgacaggcttgaatgaagctttgccctttttcctacttttgattgacctttccagagcaagcacattagcaaagtttgccctcagttccaactcacaggatgaagtaagggaaaatattgctcgtggaatggcaattttaggtcctacgtttaccctcgatgctcttgttgaatgtcttgtgattggagttggtaccatgtcaggggtacgtcagcttgaaattatgtgctgctttggctgcatgtcagttcttgccaactacttcgtgttcatgactttcttcccagcttgtgtgtccttggtattagagctttctcgggaaagccgcgagggtcgtccaatttggcagctcagccattttgcccgagttttagaagaagaagaaaataagccgaatcctgtaactcagagggtcaagatgattatgtctctaggcttggttcttgttcatgctcacagtcgctggatagctgatccttctcctcaaaacagtacagcagatacttctaaggtttcattaggactggatgaaaatgtgtccaagagaattgaaccaagtgtttccctctggcagttttatctctctaaaatgatcagcatggatattgaacaagttattaccctaagtttagctctccttctggctgtcaagtacatcttctttgaacaaacagagacagaatctacactctcattaaaaaaccctatcacatctcctgtagtgacacaaaagaaagtcccagacaattgttgtagacgtgaacctatgctggtcagaaataaccagaaatgtgattcagtagaggaagagacagggataaaccgagaaagaaaagttgaggttataaaacccttagtggctgaaacagataccccaaacagagctacatttgtggttggtaactcctccttactcgatacttcatcagtactggtgacacaggaacctgaaattgaacttcccagggaacctcggcctaatgaagaatgtctacagatacttgggaatgcagagaaaggtgcaaaattccttagtgatgctgagatcatccagttagtcaatgctaagcatatcccagcctacaagttggaaactctgatggaaactcatgagcgtggtgtatctattcgccgacagttactttccaagaagctttcagaaccttcttctctccagtacctaccttacagggattataattactccttggtgatgggagcttgttgtgagaatgttattggatatatgcccatccctgttggagtggcaggacccctttgcttagatgaaaaagaatttcaggttccaatggcaacaacagaaggttgtcttgtggccagcaccaatagaggctgcagagcaataggtgtaagttggcatttatatatttgccagtttaaaaatacatcataagtaaggcaatgagaagagttttaaggacaattagtgataccttttgggtcaagcatgagcatttttgggtaacatgtgcttgcttctctaacatatactgtgtagcttggtggaggtgccagcagccgagtccttgcagatgggatgactcgtggcccagttgtgcgtcttccacgtgcttgtgactctgcagaagtgaaagcctggctcgaaacatctgaagggttcgcagtgataaaggaggcatttgacagcactagcaggtgtgtgagtggatttgtatgtacagttatatctatttgtttattttagaaccagtgtcattttctgtgattaccaaacataattgttaacatattacctgctaaagagcacataacagaatatcaactttaaagccattcatttaaaatgagtaatatttatgcttggttggggggaaaaaaagaatgttgattcaaatgaatagctccacagaggtaaattagtaagaaa

SEQ ID NO: 445349 - DNA, 1287 bp, Homo sapiens
cgctccagtgacgtcacggcgccactttccggccggtgacagagtccagcggagttgtgggggccggaggcgccatgggagccactggcgacgccgagcagccgcggggacccagcggggccgagaggggcggcttggagctgggggatgcgggcgcagcggggcagctggttcttacgaacccttggaacataatgataaagcaccggcaggtgcagcggaggggccgccgctcacagatgacaacaagtttcacagatcctgccatctccatggatctcctccgagctgtcctgcagcccagcatcaacgaggagatccagactgtcttcaacaagtacatgaagttcttccagaaggcagcactgaacgtgcgagacaatgttggggaggaggtggacgcagagcagctgatccaggaagcctgtcggagctgcctggagcaggctaaactgctcttttcagatggagaaaaagtaatacccagattgacccatgagcttccaggaataaagcgtggccgtcaggcagaagaagaatgtgcccatcgaggaagcccccttcctaaaaagaggaaaggacggcctcctggacacatcctgtcaagcgaccgggcagccgccggcatggtatggaaaccaaaatcctgtgaaccaattcgccgggaaggccccaagtgggacccagctcgcctgaatgaatctaccacctttgtgttgggatctcgagccaacaaagccctggggatggggggcaccagaggaagaatctacatcaagcacccacacctctttaagtatgcagctgacccccaggataagcactggctggctgagcagcatcacatgcgggcaacagggggcaagatggcctacctcctcatcgaggaggacatccgggaccttgcggccagtgatgattacagaggatgcctggatctgaagctagaggaattgaaatcctttgtcctaccctcctggatggtggagaagatgagaaagtatatggagacactacggacagagaatgagcatcgtgctgttgaagcacctccacagacctgaggccgggtcccctggccacacttggcagccctcctccaaagccctcttcctcacgtggctgaggccaccgctgggactgctcctagatggatctcagcggcattaagctgtgcctgagcgagtttgtagtgactcactgcacagcacccccagactagcatgtggttctatatttgtaaagttattgggataagaaacaattaaacagtttgtagtaaacaca

SEQ ID NO: 445350 - DNA, 1355 bp, Homo sapiens
cgctccagtgacgtcacggcgccactttccggccggtgacagagtccagcggagttgtgggggccggaggcgccatgggagccactggcgacgccgagcagccgcggggacccagcggggccgagaggggcggcttggagctgggggatgcgggcgcagcggggcagctggttcttacgaacccttggaacataatgataaagcaccggcaggtgcagcggaggggccgccgctcacagatgacaacaagtttcacagatcctgccatctccatggatctcctccgagctgtcctgcagcccagcatcaacgaggagatccagactgtcttcaacaagtacatgaagttcttccagaaggcagcactgaacgtgcgagacaatgttggggaggaggtggacgcagagcagctgatccaggaagcctgtcggagctgcctggagcaggctaaactgctcttttcagatggagaaaaagtaatacccagattgacccatgagcttccaggaataaagcgtggccgtcaggcagaagaagaatgtgcccatcgaggaagcccccttcctaaaaagaggaaaggacggcctcctggacacatcctgtcaagcgaccgggcagccgccggcatggtatggaaaccaaaatcctgtgaaccaattcgccgggaaggccccaagtgggacccagctcgcctgaatgaatctaccacctttgtgttgggatctcgagccaacaaagccctggggatggggggcaccagaggaagaatctacatcaagcacccacacctctttaagtatgcagctgacccccaggataagcactggctggctgagcagcatcacatgcgggcaacagggggcaagatggcctacctcctcatcgaggaggacatccgggaccttgcggccagtgatgattacagaggatgcctggatctgaagctagaggaattgaaatcctttgtcctaccctcctggatggtggagaagatgagaaagtatatggagacactacggacagagaatgagcatcgtgctgttgaagcacctccacagacctgaggccgggtcccctggccacacttggcagccctcctccaaagccctcttcctcacgtggctgaggccaccgctgggactgctcctagatggatctcagcggcattaagctgtgcctgagcgagtttgtagtgactcactgcacagcacccccagactagcatgtggttctatatttgtaaagttattgggataagaaacaattaaacagtttgtagtaaacacaaaaaaaactttagagcacaatggatctcgagcaaggagaggacagcgattctcgtacgaacggttacc

SEQ ID NO: 445351 - DNA, 1456 bp, Homo sapiens
gaaggtacagacatatcccgtatactccctgaccctacacatgcacagcctcccccattatcgacatcaggcaccagagtggtacatttgttacatttgatgagcctactttgactcgtcttgatcctcagagtgcatagtttccatgagggttcactcttggtattgtacatgaacttagacaaatgcatagtgacaggcatccaccattctagtatcacactgagtgctttcagtgccctaaaaatcctctgtgttctgcctgttcatccttccttccccctcaaccaacccccaaccccactttttaaaaaaaattctgaagcagcagaatctttttcaaacaaaactttacatgggagcccagtatttaaatcaaataaagccacactggtctggttcaggggcgtggggttagtttggaacagctggcttagtagatgggctagtattaactgtcataccttagatgtgtctcctacacgaagcagttttattcctcacaaacacaagataggtagggcagttgctgtttttgtctcttttgacagatgagaaaactgccactcagaggttcttggagttgctcatgccactatgtaagagcagagctagtgctagaatggcttctagtccagtgctttttttccctttgttcctcctcttatgtgtcaccacgaaggaggatgtccagggctaaagtgagagtgtgtgaggaactcctaccaccaccagcaagctggcatttagtcctaggtctcaccttggagaattcacctttattctttccttccaagcagatggaaaccaaaatcctgtgaaccaattcgccgggaaggccccaagtgggacccagctcgcctgaatgaatctaccacctttgtgttgggatctcgagccaacaaagccctggggatggggggcaccagaggaagaatctacatcaagcacccacacctctttaagtatgcagctgacccccaggataagcactggctggctgagcagcatcacatgcgggcaacagggggcaagatggcctacctcctcatcgaggaggacatccgggaccttgcggccagtgatgattacagaggatgcctggatctgaagctagaggaattgaaatcctttgtcctaccctcctggatggtggagaagatgagaaagtatatggagacactacggacagagaatgagcatcgtgctgttgaagcacctccacagacctgaggccgggtcccctggccacacttggcagccctcctccaaagccctcttcctcacgtggctgaggccaccgctgggactgctcctagatggatctcagcggcattaagctgtgcctgagcgagtttgtagtgactcactgcacagcacccccagactagcatgtggttctatatttgtaaagttattgggataagaaacaattaaacagtttgtagtaaacaca

SEQ ID NO: 445352 - DNA, 819 bp, Homo sapiens
cgctccagtgacgtcacggcgccactttccggccggtgacagagtccagcggagttgtgggggccggaggcgccatgggagccactggcgacgccgagcagccgcggggacccagcggggccgagaggggcggcttggagctgggggatgcgggcgcagcggggcagctggttcttacgaacccttggaacataatgataaagcaccggcaggtgcagcggaggggccgccgctcacagatgacaacaagtttcacagatcctgccatctccatggatctcctccgagctgtcctgcagcccagcatcaacgaggagatccagactgtcttcaacaagtacatgaagttcttccagaaggcagcactgaacgtgcgagacaatgttggggaggaggtggacgcagagcagctgatccaggaagcctgtcggagctgcctggagcaggctaaactgctcttttcagatggagaaaaagtaatacccagattgacccatgagcttccaggaataaagcgtggccgtcaggcagaagaagaatgtgcccatcgaggaagcccccttcctaaaaagaggaaaggacggcctcctggacacatcctgtcaagcgaccgggcagccgccggcatggtatggaaaccaaaatcctgtgaaccaattcgccgggaaggccccaagtgggacccagctcgcctgaatgaatctaccacctttgtgttgggatctcgagccaacaaagccctggggatggggggcaccagaggaagaatctacatcaagcacccacacctctttaaggtaggtgactgctgggaggaaa

SEQ ID NO: 445353 - DNA, 361 bp, Homo sapiens
ggaggaggtggacgcagagcagctgatccaggaagcctgtcggagctgcctggagcaggtgagaccaaaggggacaagagatgcaggcacaaggtttagctctcgagcctctgataagaaatgcgatcttaagccggacgtggtggctcacacatgtaatcccagcactgtgggaggccaaggtgggcagatcactcaaggccaggagtttgagaccagcttgggcaacgtggctaaaccccatctctacaaacaatacgaaaattagctgggcatggtggtgcacgcctataatcctagctgcttgggagccataggcacgagaatcgcttgaacctgggagacagaggttgcggtgagc

SEQ ID NO: 445354 - DNA, 960 bp, Homo sapiens
cgctccagtgacgtcacggcgccactttccggccggtgacagagtccagcggagttgtgggggccggaggcgccatgggagccactggcgacgccgagcagccgcggggacccagcggggccgagaggggcggcttggagctgggggatgcgggcgcagcggggcagctggttcttacgaacccttggaacataatgataaagcaccggcaggtgcagcggaggggccgccgctcacagatgacaacaagtttcacagatcctgccatctccatggatctcctccgagctgtcctgcagcccagcatcaacgaggagatccagactgtcttcaacaagtacatgaagttcttccagaaggcagcactgaacgtgcgagacaatgttggggaggaggtggacgcagagcagctgatccaggaagcctgtcggagctgcctggagcaggtgcgtggtggatcaagttatcatggccccatttggtatcatggggatgagcaccctgctgcctccctgcctctctggtgtggtcaggaagcatgacatcaggtctataaatgactgttcccaagatagtagagaacctgtttacatgtgtcagctgctgttattaggaggaattgttgccatcaccattttatagggagacatcaggaaaggtcgccaatagtcgctggctcactttctcacctcctattcattctcttcactttgttttcgcttcagtccccactacttcactggaacccctcttgtcggggtcgctagtaacttccgtgttgtcaaaccctctggtccctaactgtcctcaacttactcagcttctcagtgacatctgtcacaatggatcatttcgcgtttcttggaatgctcctctgttggctagagtgccttgactttgctccaacctcattgcctactcttctctctcaccccccgcctctaactgttggtgccttcc

SEQ ID NO: 445355 - DNA, 1303 bp, Homo sapiens
cgctccagtgacgtcacggcgccactttccggccggtgacagagtccagcggagttgtgggggccggaggcgccatgggagccactggcgacgccgagcagccgcggggacccagcggggccgagaggggcggcttggagctgggggatgcgggcgcagcggggcagctggttcttacgaacccttggaacataatgataaagcaccggcaggtgcagcggaggggccgccgctcacagatgacaacaagtttcacagatcctgccatctccatggatctcctccgagctgtcctgcagcccagcatcaacgaggagatccagactgtcttcaacaagtacatgaagttcttccagaaggcagcactgaacgtgcgagacaatgttggggaggaggtggacgcagagcagctgatccaggaagcctgtcggagctgcctggagcaggctaaactgctcttttcagatggagaaaaagtaatacccagattgacccatgagcttccaggaataaagcgtggccgtcaggcagaagaagaatgtgcccatcgaggaagcccccttcctaaaaagaggaaaggacggcctcctggacacatcctgtcaagcgaccgggcagccgccggcatggtatggaaaccaaaatcctgtgaaccaattcgccgggaaggccccaagtgggacccagctcgcctgaatgaatctaccacctttgtgttgggatctcgagccaacaaagccctggggatggggggcaccagaggaagaatctacatcaagcacccacacctctttaagtatgcagctgacccccaggataagcactggctggctgagcagcatcacatgcgggcaacagggggcaagatggcctacctcctcatcgaggaggacatccgggaccttgcggccagtgatgattacaggtaaaaccagtgggtctcctgccccttctcctctccctgcctccaaatagcccctagaatgaggcagggcctacatcctcacttcccccaacttctctcttcaatgtctgttccagaggatgcctggatctgaagctagaggaattgaaatcctttgtcctaccctcctggatggtggagaagatgagaaagtatatggagacactacggacagagaatgagcatcgtgctgttgaagcacctccacagacctgagcaagccaggcctggcttgctcaggcctcccctggtcggggtgctccacagaagctgtgcctgggcttgggagccaaggacatgtccctctcccggccaggggagacggagcccatccacagt

SEQ ID NO: 445356 - DNA, 599 bp, Homo sapiens
cgctccagtgacgtcacggcgccactttccggccggtgacagagtccagcggagttgtgggggccggaggcgccatgggagccactggcgacgccgagcagccgcggggacccagcggggccgagaggggcggcttggagctgggggatgcgggcgcagcggggcagctggttcttacgaacccttggaacataatgataaagcaccggcaggtgcagcggaggggccgccgctcacagatgacaacaagtttcacagatcctgccatctccatggatctcctccgagctgtcctgcagcccagcatcaacgaggagatccagactgtcttcaacaagtacatgaaggtgagagggacacaggataaaaaataacaggagaaagactcatgaggagcccagtccttgcctgcatcaccagtctgtctctttcctacatacagatatctaaagttttcctttcttgttgtttttgttttgttttgttttgtgtttttgagacagattctgtctcaaaaacaaacaaaaaaagaaatgtgatcttgtcatcagtggtattttggggaatgcccagcaagccacatattgagataggcttga

SEQ ID NO: 445357 - DNA, 3114 bp, Homo sapiens
gtttgcatagctccctggacttctgctttgcactgccctgcaggagtgggtggggaaaggaagtggctttgaggcacacagaggggcttgttgaggccaccggaggaagcttctgccaccaatatgggacctgtgcccagcctaccagaagagagcatctgaaaacatgtatcgacatggtaacccctctgcttgaagcctcacatggctccctattgccttggtgctgaacaccctatggctgaccgtggcccagcctctgcaacagctctgcctcctctccagtggtgaagacccagcctgctgagactcctcctgcagttcctcaacatgcctgcatttctgctgccgtcagggcctttgcgaaggttgttccttgtaactggaatgcccttccatccctttttttattcaaaaggctgcaattttaattgaagaaagttcccttccaaggttcatgagttgcctgacttgcccaccggtttcctgcaagatcccttggcctggcacttagtgctcaggaaatatttggtgatgggccaactgagtgagaaggtgggatctggtgggaaggaaaggcggaaaggtagaaattctgctcacttcctcattcccacctcccaaggaacccctggtgtccctgtggaacccgctttgggaaccggtggttcaggtcagccttttcactttgtactcaaagccacatcgcattgaagccacaggtggggcaaggtcatgcatgactgagtctccaaatcccttcaccctgtttggttctgcaacggggattaggggagccccacgatttgttttcaaaggatgtccgggctccaggacaggatgccctgggtcacctgatgacaggtgtggtggttggaaagggccgggtttcagctccgggtacacttcctccttccttctgctgcgtggtgtggcctcttccacgtcctcagaatccagctgttactcgtccgcggcctctcagctctagggccctctgcacactggcccccccagtgtcacgggcatccagacgggatccagtgcatcctcttttagaagaaaggcctgtctccaggtccccgagtccctctagcatctcccagaaggtgtcaagacgcagcagtgtccagggagcggcagcagatactctgacccatggatcccctgggcccggccaagccacagtggtcgtggcgctgctgtctgaccacgctgctgtttcagctgctgatggctgtgtgtttcttctcctatctgcgtgtgtctcaagacgatcccactgtgtaccctaatgggtcccgcttcccagacagcacagggacccccgcccactccatccccctgatcctgctgtggacgtggccttttaacaaacccatagctctgccccgctgctcagagatggtgcctggcacggctgactgcaacatcactgccgaccgcaaggtgtatccacaggcagacgcggtcatcgtgcaccaccgagaggtcatgtacaaccccagtgcccagctcccacgctccccgaggcggcaggggcagcgatggatctggttcagcatggagtccccaagccactgctggcagctgaaagccatggacggatacttcaatctcaccatgtcctaccgcagcgactccgacatcttcacgccctacggctggctggagccgtggtccggccagcctgcccacccaccgctcaacctctcggccaagaccgagctggtggcctgggcagtgtccaactgggggccaaactccgccagggtgcgctactaccagagcctgcaggcccatctcaaggtggacgtgtacggacgctcccacaagcccctgccccagggaaccatgatggagacgctgtcccggtacaagttctatctggccttcgagaactccttgcaccccgactacatcaccgagaagctgtggaggaacgccctggaggcctgggccgtgcccgtggtgctgggccccagcagaagcaactacgagaggttcctgccacccgacgccttcatccacgtggacgacttccagagccccaaggacctggcccggtacctgcaggagctggacaaggaccacgcccgctacctgagctactttcgctggcgggagacgctgcggcctcgctccttcagctgggcactcgctttctgcaaggcctgctggaaactgcaggaggaatccaggtaccagacacgcggcatagcggcttggttcacctgagaggctggtgtggggcctgggctgccaggaacctcattttcctggggcctcacctgagtgggggcctcatctacctaaggactcgtttgcctgaagcttcacctgcctgaggactcacctgcctgggacggtcacctgttgcagcttcacctgcctggggattcacctacctgggtcctcactttcctggggcctcacctgctggagtcttcggtggccaggtatgtcccttacctgggatttcacatgctggcttccaggagcgtcccctgcggaagcctggcctgctggggatgtctcctggggactttgcctactggggacctcggctgttggggactttacctgctgggacctgctcccagagaccttccacactgaatctcacctgctaggagcctcacctgctggggacctcaccctggaggcactgggccctgggaactggcacccatgggcccacccatgagtgatggttctggctgatttgtttgtgatgttgttagccgcctgtgaggggtgcagagagataatcaccgcaccgtttccagatgtaatactgcaaagaaaaccaatgatgaggccgggtgcggtggctcacacctgtaatcccagcactttgggaggccgaggcaggcggatcacaaggtcaggagatcgagaccatcctggccaatatggtgaaacccgtctctattaaaaatacaaaaattagtggggcgtggtctcaggctcctgcagtcccagctacttgggaggctgaggcaggagaatggtgtgaaccagagagtcggaggttgcagtaagccaagatcgcgccattgcactccaacctggacgacagagcaagactccatctcaaaaaaataaaataaa

SEQ ID NO: 445358 - DNA, 2985 bp, Homo sapiens
gtttgcatagctccctggacttctgctttgcactgccctgcaggagtgggtggggaaaggaagtggctttgaggcacacagaggggcttgttgaggccaccggaggaagcttctgccaccaatatgggacctgtgcccagcctaccagaagagagcatctgaaaacatgtatcgacatggtaacccctctgcttgaagcctcacatggctccctattgccttggtgctgaacaccctatggctgaccgtggcccagcctctgcaacagctctgcctcctctccagtggtgaagacccagcctgctgagactcctcctgcagttcctcaacatgcctgcatttctgctgccgtcagggcctttgcgaaggttgttccttgtaactggaatgcccttccatccctttttttattcaaaaggctgcaattttaattgaagaaagttcccttccaaggttcatgagttgcctgacttgcccaccggtttcctgcaagatcccttggcctggcacttagtgctcaggaaatatttggtgatgggccaactgagtgagaaggtgggatctggtgggaaggaaaggcggaaaggtagaaattctgctcacttcctcattcccacctcccaaggaacccctggtgtccctgtggaacccgctttgggaaccggtggttcaggtcagccttttcactttgtactcaaagccacatcgcattgaagccacaggtggggcaaggtcatgcatgactgagtctccaaatcccttcaccctgtttggttctgcaacggggattaggggagccccacgatttgttttcaaaggatgtccgggctccaggacaggatgccctgggtcacctgatgacaggtgtggtggttggaaagggccgggtttcagctccgggtacacttcctccttccttctgctgcgtggtgtggcctcttccacgtcctcagaatccagctgttactcgtccgcggcctctcagctctagggccctctgcacactggcccccccagatactctgacccatggatcccctgggcccggccaagccacagtggtcgtggcgctgctgtctgaccacgctgctgtttcagctgctgatggctgtgtgtttcttctcctatctgcgtgtgtctcaagacgatcccactgtgtaccctaatgggtcccgcttcccagacagcacagggacccccgcccactccatccccctgatcctgctgtggacgtggccttttaacaaacccatagctctgccccgctgctcagagatggtgcctggcacggctgactgcaacatcactgccgaccgcaaggtgtatccacaggcagacgcggtcatcgtgcaccaccgagaggtcatgtacaaccccagtgcccagctcccacgctccccgaggcggcaggggcagcgatggatctggttcagcatggagtccccaagccactgctggcagctgaaagccatggacggatacttcaatctcaccatgtcctaccgcagcgactccgacatcttcacgccctacggctggctggagccgtggtccggccagcctgcccacccaccgctcaacctctcggccaagaccgagctggtggcctgggcagtgtccaactgggggccaaactccgccagggtgcgctactaccagagcctgcaggcccatctcaaggtggacgtgtacggacgctcccacaagcccctgccccagggaaccatgatggagacgctgtcccggtacaagttctatctggccttcgagaactccttgcaccccgactacatcaccgagaagctgtggaggaacgccctggaggcctgggccgtgcccgtggtgctgggccccagcagaagcaactacgagaggttcctgccacccgacgccttcatccacgtggacgacttccagagccccaaggacctggcccggtacctgcaggagctggacaaggaccacgcccgctacctgagctactttcgctggcgggagacgctgcggcctcgctccttcagctgggcactcgctttctgcaaggcctgctggaaactgcaggaggaatccaggtaccagacacgcggcatagcggcttggttcacctgagaggctggtgtggggcctgggctgccaggaacctcattttcctggggcctcacctgagtgggggcctcatctacctaaggactcgtttgcctgaagcttcacctgcctgaggactcacctgcctgggacggtcacctgttgcagcttcacctgcctggggattcacctacctgggtcctcactttcctggggcctcacctgctggagtcttcggtggccaggtatgtcccttacctgggatttcacatgctggcttccaggagcgtcccctgcggaagcctggcctgctggggatgtctcctggggactttgcctactggggacctcggctgttggggactttacctgctgggacctgctcccagagaccttccacactgaatctcacctgctaggagcctcacctgctggggacctcaccctggaggcactgggccctgggaactggcacccatgggcccacccatgagtgatggttctggctgatttgtttgtgatgttgttagccgcctgtgaggggtgcagagagataatcaccgcaccgtttccagatgtaatactgcaaagaaaaccaatgatgaggccgggtgcggtggctcacacctgtaatcccagcactttgggaggccgaggcaggcggatcacaaggtcaggagatcgagaccatcctggccaatatggtgaaacccgtctctattaaaaatacaaaaattagtggggcgtggtctcaggctcctgcagtcccagctacttgggaggctgaggcaggagaatggtgtgaaccagagagtcggaggttgcagtaagccaagatcgcgccattgcactccaacctggacgacagagcaagactccatctcaaaaaaataaaataaa

SEQ ID NO: 445359 - DNA, 3159 bp, Homo sapiens
gtttgcatagctccctggacttctgctttgcactgccctgcaggagtgggtggggaaaggaagtggctttgaggcacacagaggggcttgttgaggccaccggaggaagcttctgccaccaatatgggacctgtgcccagcctaccagaagagagcatctgaaaacatgtatcgacatggtaacccctctgcttgaagcctcacatggctccctattgccttggtgctgaacaccctatggctgaccgtggcccagcctctgcaacagctctgcctcctctccagtggtgaagacccagcctgctgagactcctcctgcagttcctcaacatgcctgcatttctgctgccgtcagggcctttgcgaaggttgttccttgtaactggaatgcccttccatccctttttttattcaaaaggctgcaattttaattgaagaaagttcccttccaaggttcatgagttgcctgacttgcccaccggtttcctgcaagatcccttggcctggcacttagtgctcaggaaatatttggtgatgggccaactgagtgagaaggtgggatctggtgggaaggaaaggcggaaaggtagaaattctgctcacttcctcattcccacctcccaaggaacccctggtgtccctgtggaacccgctttgggaaccggtggttcaggtcagccttttcactttgtactcaaagccacatcgcattgaagccacaggtggggcaaggtcatgcatgactgagtctccaaatcccttcaccctgtttggttctgcaacggggattaggggagccccacgatttgttttcaaaggatgtccgggctccaggacaggatgccctgggtcacctgatgacaggtgtggtggttggaaagggccgggtttcagctccgggtacacttcctccttccttctgctgcgtggtgtggcctcttccacgtcctcagaatccagctgttactcgtccgcggcctctcagctctagggccctctgcacactggcccccccagtgtcacgggcatccagacgggatccagtgcatcctcttttagaagaaaggcctgtctccaggtccccgagtccctctagcatctcccagaaggtgtcaagacgcagcagtgtccagggagcggcagcagattgaggaagagtctggggacacaccagaaaaggacaggatcaagatactctgacccatggatcccctgggcccggccaagccacagtggtcgtggcgctgctgtctgaccacgctgctgtttcagctgctgatggctgtgtgtttcttctcctatctgcgtgtgtctcaagacgatcccactgtgtaccctaatgggtcccgcttcccagacagcacagggacccccgcccactccatccccctgatcctgctgtggacgtggccttttaacaaacccatagctctgccccgctgctcagagatggtgcctggcacggctgactgcaacatcactgccgaccgcaaggtgtatccacaggcagacgcggtcatcgtgcaccaccgagaggtcatgtacaaccccagtgcccagctcccacgctccccgaggcggcaggggcagcgatggatctggttcagcatggagtccccaagccactgctggcagctgaaagccatggacggatacttcaatctcaccatgtcctaccgcagcgactccgacatcttcacgccctacggctggctggagccgtggtccggccagcctgcccacccaccgctcaacctctcggccaagaccgagctggtggcctgggcagtgtccaactgggggccaaactccgccagggtgcgctactaccagagcctgcaggcccatctcaaggtggacgtgtacggacgctcccacaagcccctgccccagggaaccatgatggagacgctgtcccggtacaagttctatctggccttcgagaactccttgcaccccgactacatcaccgagaagctgtggaggaacgccctggaggcctgggccgtgcccgtggtgctgggccccagcagaagcaactacgagaggttcctgccacccgacgccttcatccacgtggacgacttccagagccccaaggacctggcccggtacctgcaggagctggacaaggaccacgcccgctacctgagctactttcgctggcgggagacgctgcggcctcgctccttcagctgggcactcgctttctgcaaggcctgctggaaactgcaggaggaatccaggtaccagacacgcggcatagcggcttggttcacctgagaggctggtgtggggcctgggctgccaggaacctcattttcctggggcctcacctgagtgggggcctcatctacctaaggactcgtttgcctgaagcttcacctgcctgaggactcacctgcctgggacggtcacctgttgcagcttcacctgcctggggattcacctacctgggtcctcactttcctggggcctcacctgctggagtcttcggtggccaggtatgtcccttacctgggatttcacatgctggcttccaggagcgtcccctgcggaagcctggcctgctggggatgtctcctggggactttgcctactggggacctcggctgttggggactttacctgctgggacctgctcccagagaccttccacactgaatctcacctgctaggagcctcacctgctggggacctcaccctggaggcactgggccctgggaactggcacccatgggcccacccatgagtgatggttctggctgatttgtttgtgatgttgttagccgcctgtgaggggtgcagagagataatcaccgcaccgtttccagatgtaatactgcaaagaaaaccaatgatgaggccgggtgcggtggctcacacctgtaatcccagcactttgggaggccgaggcaggcggatcacaaggtcaggagatcgagaccatcctggccaatatggtgaaacccgtctctattaaaaatacaaaaattagtggggcgtggtctcaggctcctgcagtcccagctacttgggaggctgaggcaggagaatggtgtgaaccagagagtcggaggttgcagtaagccaagatcgcgccattgcactccaacctggacgacagagcaagactccatctcaaaaaaataaaataaa

SEQ ID NO: 445360 - DNA, 2709 bp, Homo sapiens
gtttgcatagctccctggacttctgctttgcactgccctgcaggagtgggtggggaaaggaagtggctttgaggcacacagaggggcttgttgaggccaccggaggaagcttctgccaccaatatgggacctgtgcccagcctaccagaagagagcatctgaaaacatgtatcgacatggtaacccctctgcttgaagcctcacatggctccctattgccttggtgctgaacaccctatggctgaccgtggcccagcctctgcaacagctctgcctcctctccagtggtgaagacccagcctgctgagactcctcctgcagttcctcaacatgcctgcatttctgctgccgtcagggcctttgcgaaggttgttccttgtaactggaatgcccttccatccctttttttattcaaaaggctgcaattttaattgaagaaagttcccttccaaggttcatgagttgcctgacttgcccaccggtttcctgcaagatcccttggcctggcacttagtgctcaggaaatatttggtgatgggccaactgagtgagaaggtgggatctggtgggaaggaaaggcggaaaggtagaaattctgctcacttcctcattcccacctcccaaggaacccctggtgtccctgtggaacccgctttgggaaccggtggttcaggtcagccttttcactttgtactcaaagccacatcgcattgaagccacaggtggggcaaggtcatgcatgactgagtctccaaatcccttcaccctgtttggttctgcaacggggattaggggagccccacgatttgttttcaaaggatgtccgggctccaggacaggatgccctgggtcacctgatgacaggtgtggtggttggaaagggccgggtttcagctccgggtacacttcctccttccttctgctgcgtggtgtggcctcttccacgtcctcagaatccagctgttactcgtccgcggcctctcagctctagggccctctgcacactggcccccccagatactctgacccatggatcccctgggcccggccaagccacagtggtcgtggcgctgctgtctgaccacgctgctgtttcagctgctgatggctgtgtgtttcttctcctatctgcgtgtgtctcaagacgatcccactgtgtaccctaatgggtcccgcttcccagacagcacagggacccccgcccactccatccccctgatcctgctgtggacgtggccttttaacaaacccatagctctgccccgctgctcagagatggtgcctggcacggctgactgcaacatcactgccgaccgcaaggtgtatccacaggcagacgcggtcatcgtgcaccaccgagaggtcatgtacaaccccagtgcccagctcccacgctccccgaggcggcaggggcagcgatggatctggttcagcatggagtccccaagccactgctggcagctgaaagccatggacggatacttcaatctcaccatgtcctaccgcagcgactccgacatcttcacgccctacggctggctggagccgtggtccggccagcctgcccacccaccgctcaacctctcggccaagaccgagctggtggcctgggcagtgtccaactgggggccaaactccgccagggtgcgctactaccagagcctgcaggcccatctcaaggtggacgtgtacggacgctcccacaagcccctgccccagggaaccatgatggagacgctgtcccggtacaagttctatctggccttcgagaactccttgcaccccgactacatcaccgagaagctgtggaggaacgccctggaggcctgggccgtgcccgtggtgctgggccccagcagaagaacctcattttcctggggcctcacctgagtgggggcctcatctacctaaggactcgtttgcctgaagcttcacctgcctgaggactcacctgcctgggacggtcacctgttgcagcttcacctgcctggggattcacctacctgggtcctcactttcctggggcctcacctgctggagtcttcggtggccaggtatgtcccttacctgggatttcacatgctggcttccaggagcgtcccctgcggaagcctggcctgctggggatgtctcctggggactttgcctactggggacctcggctgttggggactttacctgctgggacctgctcccagagaccttccacactgaatctcacctgctaggagcctcacctgctggggacctcaccctggaggcactgggccctgggaactggcacccatgggcccacccatgagtgatggttctggctgatttgtttgtgatgttgttagccgcctgtgaggggtgcagagagataatcaccgcaccgtttccagatgtaatactgcaaagaaaaccaatgatgaggccgggtgcggtggctcacacctgtaatcccagcactttgggaggccgaggcaggcggatcacaaggtcaggagatcgagaccatcctggccaatatggtgaaacccgtctctattaaaaatacaaaaattagtggggcgtggtctcaggctcctgcagtcccagctacttgggaggctgaggcaggagaatggtgtgaaccagagagtcggaggttgcagtaagccaagatcgcgccattgcactccaacctggacgacagagcaagactccatctcaaaaaaataaaataaa

SEQ ID NO: 445361 - DNA, 1186 bp, Homo sapiens
gtttgcatagctccctggacttctgctttgcactgccctgcaggagtgggtggggaaaggaagtggctttgaggcacacagaggggcttgttgaggccaccggaggaagcttctgccaccaatatgggacctgtgcccagcctaccagaagagagcatctgaaaacatgtatcgacatggtaacccctctgcttgaagcctcacatggctccctattgccttggtgctgaacaccctatggctgaccgtggcccagcctctgcaacagctctgcctcctctccagtggtgaagacccagcctgctgagactcctcctgcagttcctcaacatgcctgcatttctgctgccgtcagggcctttgcgaaggttgttccttgtaactggaatgcccttccatccctttttttattcaaaaggctgcaattttaattgaagaaagttcccttccaaggttcatgagttgcctgacttgcccaccggtttcctgcaagatcccttggcctggcacttagtgctcaggaaatatttggtgatgggccaactgagtgagaaggtgggatctggtgggaaggaaaggcggaaaggtagaaattctgctcacttcctcattcccacctcccaaggaacccctggtgtccctgtggaacccgctttgggaaccggtggttcaggtcagccttttcactttgtactcaaagccacatcgcattgaagccacaggtggggcaaggtcatgcatgactgagtctccaaatcccttcaccctgtttggttctgcaacggggattaggggagccccacgatttgttttcaaaggatgtccgggctccaggacaggatgccctgggtcacctgatgacaggtgtggtggttggaaagggccgggtttcagctccgggtacacttcctccttccttctgctgcgtggtgtggcctcttccacgtcctcagaatccagctgttactcgtccgcggcctctcagctctagggccctctgcacactggcccccccagtgtcacgggcatccagacgggatccagtgcatcctcttttagaagaaaggcctgtctccaggtccccgagtccctctagcatctcccagaaggtgtcaagacgcagcagtgtccagggagcggcagcagtgcactccaacctgggcgacacagtgagactgtctcaaga

SEQ ID NO: 445362 - DNA, 2594 bp, Homo sapiens
gtttgcatagctccctggacttctgctttgcactgccctgcaggagtgggtggggaaaggaagtggctttgaggcacacagaggggcttgttgaggccaccggaggaagcttctgccaccaatatgggacctgtgcccagcctaccagaagagagcatctgaaaacatgtatcgacatggtaacccctctgcttgaagcctcacatggctccctattgccttggtgctgaacaccctatggctgaccgtggcccagcctctgcaacagctctgcctcctctccagtgccttttcactttgtactcaaagccacatcgcattgaagccacaggtggggcaaggtcatgcatgactgagtctccaaatcccttcaccctgtttggttctgcaacggggattaggggagccccacgatttgttttcaaaggatgtccgggctccaggacaggatgccctgggtcacctgatgacaggtgtggtggttggaaagggccgggtttcagctccgggtacacttcctccttccttctgctgcgtggtgtggcctcttccacgtcctcagaatccagctgttactcgtccgcggcctctcagctctagggccctctgcacactggcccccccagatactctgacccatggatcccctgggcccggccaagccacagtggtcgtggcgctgctgtctgaccacgctgctgtttcagctgctgatggctgtgtgtttcttctcctatctgcgtgtgtctcaagacgatcccactgtgtaccctaatgggtcccgcttcccagacagcacagggacccccgcccactccatccccctgatcctgctgtggacgtggccttttaacaaacccatagctctgccccgctgctcagagatggtgcctggcacggctgactgcaacatcactgccgaccgcaaggtgtatccacaggcagacgcggtcatcgtgcaccaccgagaggtcatgtacaaccccagtgcccagctcccacgctccccgaggcggcaggggcagcgatggatctggttcagcatggagtccccaagccactgctggcagctgaaagccatggacggatacttcaatctcaccatgtcctaccgcagcgactccgacatcttcacgccctacggctggctggagccgtggtccggccagcctgcccacccaccgctcaacctctcggccaagaccgagctggtggcctgggcagtgtccaactgggggccaaactccgccagggtgcgctactaccagagcctgcaggcccatctcaaggtggacgtgtacggacgctcccacaagcccctgccccagggaaccatgatggagacgctgtcccggtacaagttctatctggccttcgagaactccttgcaccccgactacatcaccgagaagctgtggaggaacgccctggaggcctgggccgtgcccgtggtgctgggccccagcagaagcaactacgagaggttcctgccacccgacgccttcatccacgtggacgacttccagagccccaaggacctggcccggtacctgcaggagctggacaaggaccacgcccgctacctgagctactttcgctggcgggagacgctgcggcctcgctccttcagctgggcactcgctttctgcaaggcctgctggaaactgcaggaggaatccaggtaccagacacgcggcatagcggcttggttcacctgagaggctggtgtggggcctgggctgccaggaacctcattttcctggggcctcacctgagtgggggcctcatctacctaaggactcgtttgcctgaagcttcacctgcctgaggactcacctgcctgggacggtcacctgttgcagcttcacctgcctggggattcacctacctgggtcctcactttcctggggcctcacctgctggagtcttcggtggccaggtatgtcccttacctgggatttcacatgctggcttccaggagcgtcccctgcggaagcctggcctgctggggatgtctcctggggactttgcctactggggacctcggctgttggggactttacctgctgggacctgctcccagagaccttccacactgaatctcacctgctaggagcctcacctgctggggacctcaccctggaggcactgggccctgggaactggcacccatgggcccacccatgagtgatggttctggctgatttgtttgtgatgttgttagccgcctgtgaggggtgcagagagataatcaccgcaccgtttccagatgtaatactgcaaagaaaaccaatgatgaggccgggtgcggtggctcacacctgtaatcccagcactttgggaggccgaggcaggcggatcacaaggtcaggagatcgagaccatcctggccaatatggtgaaacccgtctctattaaaaatacaaaaattagtggggcgtggtctcaggctcctgcagtcccagctacttgggaggctgaggcaggagaatggtgtgaaccagagagtcggaggttgcagtaagccaagatcgcgccattgcactccaacctggacgacagagcaagactccatctcaaaaaaataaaataaa

SEQ ID NO: 445363 - DNA, 2890 bp, Homo sapiens
gtttgcatagctccctggacttctgctttgcactgccctgcaggagtgggtggggaaaggaagtggctttgaggcacacagaggggcttgttgaggccaccggaggaagcttctgccaccaatatgggacctgtgcccagcctaccagaagagagcatctgaaaacatgtatcgacatggtaacccctctgcttgaagcctcacatggctccctattgccttggtgctgaacaccctatggctgaccgtggcccagcctctgcaacagctctgcctcctctccagtggtgaagacccagcctgctgagactcctcctgcagttcctcaacatgcctgcatttctgctgccgtcagggcctttgcgaaggttgttccttgtaactggaatgcccttccatccctttttttattcaaaaggctgcaattttaattgaagaaagttcccttccaaggttcatgagttgcctgacttgcccaccggtttcctgcaagatcccttggcctggcacttagtgctcaggaaatatttggtgatgggccaactgagtgagaaggtgggatctggtgggaaggaaaggcggaaaggtagaaattctgctcacttcctcattcccacctcccaaggaacccctggtgtccctgtggaacccgctttgggaaccggtggttcaggtcagccttttcactttgtactcaaagccacatcgcattgaagccacaggtggggcaaggtcatgcatgactgagtctccaaatcccttcaccctgtttggttctgcaacggggattaggggagccccacgatttgttttcaaaggatgtccgggctccaggacaggatgccctgggtcacctgatgacaggtgtggtggttggaaagggccgggtttcagctccgggtacacttcctccttccttctgctgcgtggtgtggcctcttccacgtcctcagaatccagctgttactcgtccgcggcctctcagctctagggccctctgcacactggcccccccagatactctgacccatggatcccctgggcccggccaagccacagtggtcgtggcgctgctgtctgaccacgctgctgtttcagctgctgatggctgtgtgtttcttctcctatctgcgtgtgtctcaagacgatcccactgtgtaccctaatgggtcccgcttcccagacagcacagggacccccgcccactccatccccctgatcctgctgtggacgtggccttttaacaaacccatagctctgccccgctgctcagagatggtgcctggcacggctgactgcaacatcactgccgaccgcaaggtgtatccacaggcagacgcggtcatcgtgcaccaccgagaggtcatgtacaaccccagtgcccagctcccacgctccccgaggcggcaggggcagcgatggatctggttcagcatggagtccccaagccactgctggcagctgaaagccatggacggatacttcaatctcaccatgtcctaccgcagcgactccgacatcttcacgccctacggctggctggagccgtggtccggccagcctgcccacccaccgctcaacctctcggccaagaccgagctggtggcctgggcagtgtccaactgggggccaaactccgccagggtgcgctactaccagagcctgcaggcccatctcaaggtggacgtgtacggacgctcccacaagcccctgccccagggaaccatgatggagacgctgtcccggtacaagttctatctggccttcgagaactccttgcaccccgactacatcaccgagaagctgtggaggaacgccctggaggcctgggccgtgcccgtggtgctgggccccagcagaagcaactacgagaggttcctgccacccgacgccttcatccacgtggacgacttccagagccccaaggacctggcccggtacctgcaggagctggacaaggaccacgcccgctacctgagctactttcgctggcgggagacgctgcggcctcgctccttcagctgggcactcgctttctgcaaggcctgctggaaactgcaggaggaatccagtgggggcctcatctacctaaggactcgtttgcctgaagcttcacctgcctgaggactcacctgcctgggacggtcacctgttgcagcttcacctgcctggggattcacctacctgggtcctcactttcctggggcctcacctgctggagtcttcggtggccaggtatgtcccttacctgggatttcacatgctggcttccaggagcgtcccctgcggaagcctggcctgctggggatgtctcctggggactttgcctactggggacctcggctgttggggactttacctgctgggacctgctcccagagaccttccacactgaatctcacctgctaggagcctcacctgctggggacctcaccctggaggcactgggccctgggaactggcacccatgggcccacccatgagtgatggttctggctgatttgtttgtgatgttgttagccgcctgtgaggggtgcagagagataatcaccgcaccgtttccagatgtaatactgcaaagaaaaccaatgatgaggccgggtgcggtggctcacacctgtaatcccagcactttgggaggccgaggcaggcggatcacaaggtcaggagatcgagaccatcctggccaatatggtgaaacccgtctctattaaaaatacaaaaattagtggggcgtggtctcaggctcctgcagtcccagctacttgggaggctgaggcaggagaatggtgtgaaccagagagtcggaggttgcagtaagccaagatcgcgccattgcactccaacctggacgacagagcaagactccatctcaaaaaaataaaataaa

SEQ ID NO: 445364 - DNA, 2519 bp, Homo sapiens
agcgggcgctttacggccgcggggacggagcgagccggcgccaggcccctcgggccgggaagaggggaaggggagcgaggttgatgcccggcggaggggcgagcgcggcgtctggccggcttctcaccgccgcggagcaaagagggtcccgggaagcggcagggtcggcgtccaggagcggcttcgggggctccggcggcggcagaggcggagcaagcggccccgggtccgggagcggaggccctgggggccccgcgggcaggatgagcttgaccccgaaggagctctcgagcctgctgagcatcatatcggaggaggcgggcggcggcagcaccttcgagggcctgtccaccgccttccaccactacttcagcaaggccgaccacttccgcctgggctcggtgctcgtcatgctgctccagcagcccgacctgctgcctagcgcggcgcagcgcctcacggcgctctacctgctctgggagatgtaccgcaccgagccgctggccgccaaccccttcgccgccagcttcgcgcacctgctcaaccccgcgccgcccgcccgcggcggccaggaacccgaccgccctccgctctcaggatttttacctcctataactccaccagaaaagttttttctttcccagctgatgctggcacccccacgggaactcttcaaaaagacgcctcgccagattgcactgatggacgttggaaacatgggccagtctgtggacattagtgggcttcagttagccttggccgaacgccaatctgaattgccaacgcaaagcaaagcgagcttccccagtattctcagtgacccagacccggattcttctaattctggatttgacagctcagttgcctctcagatcacagaagctttagtcagcggaccaaagccacctattgaaagccattttcgaccagagtttattcgtccaccgcctccactccacatttgtgaggatgaacttgcttggctaaaccccacggagcctgaccacgcgatccagtgggataaatcgatgtgtgttaagaatagcactggtgtggagatcaaacgaataatggccaaagccttcaaaagccccttatcctctccccaacaaacacagctacttggtgagttggaaaaagaccccaaacttgtctaccatattggcctcaccccagccaaacttcctgaccttgtggaaaacaaccctttagtcgctatagaaatgttgctgaaattaatgcagtcaagccagatcactgagtatttctctgtcctggtcaatatggacatgtctttacattcaatggaagttgtaaatcgactaactacagctgttgatctacctcctgaatttattcacctttatatatcaaattgcatctctacttgtgaacagattaaggataaatatatgcagaatcggttggtgcgtcttgtgtgtgtgtttctccaatccttgatccgtaacaaaattattaatgtacaggatttgtttatagaagtgcaggcattctgtattgaattcagtaggatacgagaagctgctggtcttttccggttgttgaagacattggatactggggaaacaccttctgagaccaaaatgtcaaaataatacctcatcagaaccatcccatccattcactgttcagctgtactgtgatttagtttttacaccgttaaaaccctgagtggattgcttggtttaatgcatataaacagtactttatctacttaaagcaaagttttgctttcttgaatgactttttctgtgagatgaatttttgataagaactagggaaaacatgtcttttaggtgtcttgctgatgactatccataggaggaatggctatcccaaaaaaagttccgcaaaaaagtagatgagtttcttttttttttaagcactaaagaacaaaatgcatttttcattaatacaggcttctgatgaaccaggaatcctgttttcgtaaagttccaatgttgatgagagtaaattcttaagcatttgtcctagaggtgaaagcagctgaatgtttctgaaccatcaagaggcaaacaaacaggagtttgtttcttgaacctgcttatgcacacagctcttaactcctcatgaggcacacagctcttaactcctgatgaaccaaggatttactcataactttctccttgtcatggaggcttaatagacaacagaataaatgcatttcttgggcctcttataaacttgggaattcttagaaagctgcttctattaccaggctgtaatagctggtatagttttttttttttctcttaagatgttctgttattagtctgagacagccatttttttgttttaaggaaaaatatcagtcagtgctccgggaggtaatttcctgtggggtctgcaccctcctgtctgggtggtggatgtgggtttgagaagtaggagagcagggtggtaccgtgtgggctcttaccctttatgtgattttggacaacagtgccttccattaaagttctttttatcaactgtta

SEQ ID NO: 445365 - DNA, 1893 bp, Homo sapiens
gcagattccaagaacctttcaacaacgctaagtgaggacctgctatacgtacagacatacacacattttctctctctctctgaatctggccctttgtttttctctgttacagatagcttgcctcagttggtagcttgtcttttctctctcctcatgatgtccataattttgagcttccccagtattctcagtgacccagacccggattcttctaattctggatttgacagctcagttgcctctcagatcacagaagctttagtcagcggaccaaagccacctattgaaagccattttcgaccagagtttattcgtccaccgcctccactccacatttgtgaggatgaacttgcttggctaaaccccacggagcctgaccacgcgatccagtgggataaatcgatgtgtgttaagaatagcactggtgtggagatcaaacgaataatggccaaagccttcaaaagccccttatcctctccccaacaaacacagctacttggtgagttggaaaaagaccccaaacttgtctaccatattggcctcaccccagccaaacttcctgaccttgtggaaaacaaccctttagtcgctatagaaatgttgctgaaattaatgcagtcaagccagatcactgagtatttctctgtcctggtcaatatggacatgtctttacattcaatggaagttgtaaatcgactaactacagctgttgatctacctcctgaatttattcacctttatatatcaaattgcatctctacttgtgaacagattaaggataaatatatgcagaatcggttggtgcgtcttgtgtgtgtgtttctccaatccttgatccgtaacaaaattattaatgtacaggatttgtttatagaagtgcaggcattctgtattgaattcagtaggatacgagaagctgctggtcttttccggttgttgaagacattggatactggggaaacaccttctgagaccaaaatgtcaaaataatacctcatcagaaccatcccatccattcactgttcagctgtactgtgatttagtttttacaccgttaaaaccctgagtggattgcttggtttaatgcatataaacagtactttatctacttaaagcaaagttttgctttcttgaatgactttttctgtgagatgaatttttgataagaactagggaaaacatgtcttttaggtgtcttgctgatgactatccataggaggaatggctatcccaaaaaaagttccgcaaaaaagtagatgagtttcttttttttttaagcactaaagaacaaaatgcatttttcattaatacaggcttctgatgaaccaggaatcctgttttcgtaaagttccaatgttgatgagagtaaattcttaagcatttgtcctagaggtgaaagcagctgaatgtttctgaaccatcaagaggcaaacaaacaggagtttgtttcttgaacctgcttatgcacacagctcttaactcctcatgaggcacacagctcttaactcctgatgaaccaaggatttactcataactttctccttgtcatggaggcttaatagacaacagaataaatgcatttcttgggcctcttataaacttgggaattcttagaaagctgcttctattaccaggctgtaatagctggtatagttttttttttttctcttaagatgttctgttattagtctgagacagccatttttttgttttaaggaaaaatatcagtcagtgctccgggaggtaatttcctgtggggtctgcaccctcctgtctgggtggtggatgtgggtttgagaagtaggagagcagggtggtaccgtgtgggctcttaccctttatgtgattttggacaacagtgccttccattaaagttctttttatcaactgtta

SEQ ID NO: 445366 - DNA, 3022 bp, Homo sapiens
agcgggcgctttacggccgcggggacggagcgagccggcgccaggcccctcgggccgggaagaggggaaggggagcgaggttgatgcccggcggaggggcgagcgcggcgtctggccggcttctcaccgccgcggagcaaagagggtcccgggaagcggcagggtcggcgtccaggagcggcttcgggggctccggcggcggcagaggcggagcaagcggccccgggtccgggagcggaggccctgggggccccgcgggcaggatgagcttgaccccgaaggagctctcgagcctgctgagcatcatatcggaggaggcgggcggcggcagcaccttcgagggcctgtccaccgccttccaccactacttcagcaaggccgaccacttccgcctgggctcggtgctcgtcatgctgctccagcagcccgacctgctgcctagcgcggcgcagcgcctcacggcgctctacctgctctgggagatgtaccgcaccgagccgctggccgccaaccccttcgccgccagcttcgcgcacctgctcaaccccgcgccgcccgcccgcggcggccaggaacccgaccgccctccgctctcaggatttttacctcctataactccaccagaaaagttttttctttcccagctgatgctggcacccccacgggaactcttcaaaaagacgcctcgccagattgcactgatggacgttggaaacatgggccagtctgtggacattagtgggcttcagttagccttggccgaacgccaatctgaattgccaacgcaaagcaaagcgagcttccccagtattctcagtgacccagacccggattcttctaattctggatttgacagctcagttgcctctcagatcacagaagctttagtcagcggaccaaagccacctattgaaagccattttcgaccagagtttattcgtccaccgcctccactccacatttgtgaggatgaacttgcttggctaaaccccacggagcctgaccacgcgatccagtgggataaatcgatgtgtgttaagaatagcactggtgtggagatcaaacgaataatggccaaagccttcaaaagccccttatcctctccccaacaaacacagctacttggtgagttggaaaaagaccccaaacttgtctaccatattggcctcaccccagccaaacttcctgaccttgtggaaaacaaccctttagtcgctatagaaatgttgctgaaattaatgcagtcaagccagatcactgagtatttctctgtcctggtcaatatggacatgtctttacattcaatggaagttgtaaatcgactaactacagctgttgatctacctcctgaatttattcacctttatatatcaaattgcatctctacttgtgaacagattaaggataaatatatgcagaatcggttggtgcgtcttgtgtgtgtgtttctccaatccttgatccgtaacaaaattattaatgtacaggatttgtttatagaagtgcaggcattctgtattgaattcagtaggatacgagaagctgctggtcttttccggttgttgaagacattggatactggggaaacaccttctgagaccaaaatgtcaaaataatacctcatcagaaccatcccatccattcactgttcagctgtactgtgatttagtttttacaccgttaaaaccctgagtggattgcttggtttaatgcatataaacagtactttatctacttaaagcaaagttttgctttcttgaatgactttttctgtgagatgaatttttgataagaactagggaaaacatgtcttttaggtgtcttgctgatgactatccataggaggaatggctatcccaaaaaaagttccgcaaaaaagtagatgagtttcttttttttttaagcactaaagaacaaaatgcatttttcattaatacaggcttctgatgaaccaggaatcctgttttcgtaaagttccaatgttgatgagagtaaattcttaagcatttgtcctagaggtgaaagcagctgaatgtttctgaaccatcaagaggcaaacaaacaggagtttgtttcttgaacctgcttatgcacacagctcttaactcctcatgaggcacacagctcttaactcctgatgaaccaaggatttactcataactttctccttgtcatggaggcttaatagacaacagaataaatgcatttcttgggcctcttataaacttgggaattcttagaaagctgcttctattaccaggctgtaatagctggtatagttttttttttttctcttaagatgttctgttattagtctgagacagccatttttttgttttaaggaaaaatatcagtcagtgctccgggaggtaatttcctgtggggtctgcaccctcctgtctgggtggtggatgtgggtttgagaagtaggagagcagggtggtaccgtgtgggctcttaccctttatgtgattttggacaacagtgccttccattaaagttctttttatcaactgttatctgatgtattttttactttaagaaatcatgagaaattccttttactgaggtattttcaaagcatatttacagggagataatctgttcaacaggaattactctctaacaccttgaaaaagttaaaggaaaccaagcctgtgatttttaagataagtacaagttccagtcttaaagctggagaaagagcagtactaaagatttataataaattgtctataataaattgtttttcttacaaaagaaatgtttaagaatgtttgcttagaggaaataatgaactaagcccatctatcagaggaatgccttcagacaattaaaatgatggcaacagagatttctttttacacctaaaagcgagcatccccgttttgcacgttagcattgggaaaaggacagcttattactgaagtactttaggagtggcagtttcaacaacccagctttaggttctaggacctacaggacctactgattctctggcataataaaacactgaactcag

SEQ ID NO: 445367 - DNA, 2598 bp, Homo sapiens
agcgggcgctttacggccgcggggacggagcgagccggcgccaggcccctcgggccgggaagaggggaaggggagcgaggttgatgcccggcggaggggcgagcgcggcgtctggccggcttctcaccgccgcggagcaaagagggtcccgggaagcggcagggtcggcgtccaggagcggcttcgggggctccggcggcggcagaggcggagcaagcggccccgggtccgggagcggaggccctgggggccccgcgggcaggatgagcttgaccccgaaggagctctcgagcctgctgagcatcatatcggaggaggcgggcggcggcagcaccttcgagggcctgtccaccgccttccaccactacttcagcaaggccgaccacttccgcctgggctcggtgctcgtcatgctgctccagcagcccgacctgctgcctagcgcggcgcagcgcctcacggcgctctacctgctctgggagatgtaccgcaccgagccgctggccgccaaccccttcgccgccagcttcgcgcacctgctcaaccccgcgccgcccgcccgcggcggccaggaacccgaccgccctccgctctcaggatttttacctcctataactccaccagaaaagttttttctttcccagctgatgctggcacccccacgggaactcttcaaaaagacgcctcgccagattgcactgatggacgttggaaacatgggccagtctgtggacattagtgggcttcagttagccttggccgaacgccaatctgaattgccaacgcaaagcaaagcgagcttccccagtattctcagtgacccagacccggattcttctaattctggatttgacagctcagttgcctctcagatcacagaagctttagtcagcggaccaaagccacctattgaaagccattttcgaccagagtttattcgtccaccgcctccactccacatttgtgaggatgaacttgcttggctaaaccccacggagcctgaccacgcgatccagtgggataaatcgatgtgtgttaagaatagcactggtgtggagatcaaacgaataatggccaaagccttcaaaagccccttatcctctccccaacaaacacagctacttggtgagttggaaaaagaccccaaacttgtctaccatattggcctcaccccagccaaacttcctgaccttgtggaaaacaaccctttagtcgctatagaaatgttgctgaaattaatgcagtcaagccagatcactgagtatttctctgtcctggtcaatatggacatgtctttacattcaatggaagttgtaaatcgactaactacagctgttgatctacctcctgaatttattcacctttatatatcaaattgcatctctacttgtgaacagattaaggataaatatatgcaggtaatataaatttttgtaaattttataaatggctgccaggaaaatgagcagactaacatttttttttttcctttttcagaatcggttggtgcgtcttgtgtgtgtgtttctccaatccttgatccgtaacaaaattattaatgtacaggatttgtttatagaagtgcaggcattctgtattgaattcagtaggatacgagaagctgctggtcttttccggttgttgaagacattggatactggggaaacaccttctgagaccaaaatgtcaaaataatacctcatcagaaccatcccatccattcactgttcagctgtactgtgatttagtttttacaccgttaaaaccctgagtggattgcttggtttaatgcatataaacagtactttatctacttaaagcaaagttttgctttcttgaatgactttttctgtgagatgaatttttgataagaactagggaaaacatgtcttttaggtgtcttgctgatgactatccataggaggaatggctatcccaaaaaaagttccgcaaaaaagtagatgagtttcttttttttttaagcactaaagaacaaaatgcatttttcattaatacaggcttctgatgaaccaggaatcctgttttcgtaaagttccaatgttgatgagagtaaattcttaagcatttgtcctagaggtgaaagcagctgaatgtttctgaaccatcaagaggcaaacaaacaggagtttgtttcttgaacctgcttatgcacacagctcttaactcctcatgaggcacacagctcttaactcctgatgaaccaaggatttactcataactttctccttgtcatggaggcttaatagacaacagaataaatgcatttcttgggcctcttataaacttgggaattcttagaaagctgcttctattaccaggctgtaatagctggtatagttttttttttttctcttaagatgttctgttattagtctgagacagccatttttttgttttaaggaaaaatatcagtcagtgctccgggaggtaatttcctgtggggtctgcaccctcctgtctgggtggtggatgtgggtttgagaagtaggagagcagggtggtaccgtgtgggctcttaccctttatgtgattttggacaacagtgccttccattaaagttctttttatcaactgtta

SEQ ID NO: 445368 - DNA, 665 bp, Homo sapiens
tttttcattaatacaggcttctgatgaaaaatgcaatttgttctttagtgcttaaaaaaacaaaatgcatttttcattaatacaggcttctgatgaaccaggaatcctgttttcgtaaagttccaatgttgatgagagtaaattcttaagcatttgtcctagaggtgaaagcagctgaatgtttctgaaccatcaagaggcaaacaaacaggagtttgtttcttgaacctgcttatgcacacagctcttaactcctcatgaggcacacagctcttaactcctgatgaaccaaggatttactcataactttctccttgtcatggaggcttaatagacaacagaataaatgcatttcttgggcctcttataaacttgggaattcttagaaagctgcttctattaccaggctgtaatagctggtatagttttttttttttctcttaagatgttctgttattagtctgagacagccatttttttgttttaaggaaaaatatcagtcagtgctccgggaggtaatttcctgtggggtctgcaccctcctgtctgggtggtggatgtgggtttgagaagtaggagagcagggtggtaccgtgtgggctcttaccctttatgtgattttggacaacagtgccttccattaaagttctttttatcaactgtta

SEQ ID NO: 445369 - DNA, 1462 bp, Homo sapiens
agcgggcgctttacggccgcggggacggagcgagccggcgccaggcccctcgggccgggaagaggggaaggggagcgaggttgatgcccggcggaggggcgagcgcggcgtctggccggcttctcaccgccgcggagcaaagagggtcccgggaagcggcagggtcggcgtccaggagcggcttcgggggctccggcggcggcagaggcggagcaagcggccccgggtccgggagcggaggccctgggggccccgcgggcaggatgagcttgaccccgaaggagctctcgagcctgctgagcatcatatcggaggaggcgggcggcggcagcaccttcgagggcctgtccaccgccttccaccactacttcagcaaggccgaccacttccgcctgggctcggtgctcgtcatgctgctccagcagcccgacctgctgcctagcgcggcgcagcgcctcacggcgctctacctgctctgggagatgtaccgcaccgagccgctggccgccaaccccttcgccgccagcttcgcgcacctgctcaaccccgcgccgcccgcccgcggcggccaggaacccgaccgccctccgctctcaggatttttacctcctataactccaccagaaaagttttttctttcccagctgatgctggcacccccacgggaactcttcaaaaagacgcctcgccagattgcactgatggacgttggaaacatgggccagtctgtggacattagtgggcttcagttagccttggccgaacgccaatctgaattgccaacgcaaagcaaagcgagcttccccagtattctcagtgacccagacccggattcttctaattctggatttgacagctcagttgcctctcagatcacagaagctttagtcagcggaccaaagccacctattgaaagccattttcgaccagagtttattcgtccaccgcctccactccacatttgtgaggatgaacttgcttggctaaaccccacggagcctgaccacgcgatccagtgggataaatcgatgtgtgttaagaatagcactggtgtggagatcaaacgaataatggccaaagccttcaaaagccccttatcctctccccaacaaacacagctacttggtgagttggaaaaagaccccaaacttgtctaccatattgaccaggacagagaaatactcagtgatctggcttgactgcattaatttcagcaacatttctatagcgactaaagggttgttttccacaaggtcaggaagtttggctggggtgaggccaatatggtagacaagtttggggcctcggcggtttggacgttcggcgtgtgcaggtccatacacaagacgcaccaaccgattctgcatatatttatcctgaatttattcacctttattatcaaattgctctctactgtgaacagattaggataatattgcagaatcgtcgggtctcggggtgc

SEQ ID NO: 445370 - DNA, 1312 bp, Homo sapiens
agcgggcgctttacggccgcggggacggagcgagccggcgccaggcccctcgggccgggaagaggggaaggggagcgaggttgatgcccggcggaggggcgagcgcggcgtctggccggcttctcaccgccgcggagcaaagagggtcccgggaagcggcagggtcggcgtccaggagcggcttcgggggctccggcggcggcagaggcggagcaagcggccccgggtccgggagcggaggccctgggggccccgcgggcaggatgagcttgaccccgaaggagctctcgagcctgctgagcatcatatcggaggaggcgggcggcggcagcaccttcgagggcctgtccaccgccttccaccactacttcagcaaggccgaccacttccgcctgggctcggtgctcgtcatgctgctccagcagcccgacctgctgcctagcgcggcgcagcgcctcacggcgctctacctgctctgggagatgtaccgcaccgagccgctggccgccaaccccttcgccgccagcttcgcgcacctgctcaaccccgcgccgcccgcccgcggcggccaggaacccgaccgccctccgctctcaggatttttacctcctataactccaccagaaaagttttttctttcccagctgatgctggcacccccacgggaactcttcaaaaagacgcctcgccagattgcactgatggacgttggaaacatgggccagtctgtggacattagtgggcttcagttagccttggccgactggtaaatgtttgttaatgagtcgctagtacatatatctgagcaaaaccagaaattcgcatttctggaaaaaaattccattccaatactgctaactcaacccagaaggttatcaaatctctttttcattcctttctcttcaaccagaaagaaaatactatctggacactttcagacatttcttccccagcaaaccaaagcaagcaaatcaaggcttaaactttgtcgtctacattacttccttaacttgttcaaactgaaattgctgtcttttcacgctgtgcaacttcagaaaaggtaaaaaataaagaacagaagaatgcaataagatatgtactgacagcactacgtaatacctgctccaaagagggtttttacaccagtcaaaaattctaacagtttaaacaactgctcaacttggcacagcacagccctagatgatgccttcgcttcttccctaaatcctcagtctcaagccattcatacgtgtaaaaccatgtacaagagacaaaaacgtgtagcggatgaccatgttactctagatacagc

SEQ ID NO: 445371 - DNA, 1742 bp, Homo sapiens
agcgggcgctttacggccgcggggacggagcgagccggcgccaggcccctcgggccgggaagaggggaaggggagcgaggttgatgcccggcggaggggcgagcgcggcgtctggccggcttctcaccgccgcggagcaaagagggtcccgggaagcggcagggtcggcgtccaggagcggcttcgggggctccggcggcggcagaggcggagcaagcggccccgggtccgggagcggaggccctgggggccccgcgggcaggatgagcttgaccccgaaggagctctcgagcctgctgagcatcatatcggaggaggcgggcggcggcagcaccttcgagggcctgtccaccgccttccaccactacttcagcaaggccgaccacttccgcctgggctcggtgctcgtcatgctgctccagcagcccgacctgctgcctagcgcggcgcagcgcctcacggcgctctacctgctctgggagatgtaccgcaccgagccgctggccgccaaccccttcgccgccagcttcgcgcacctgctcaaccccgcgccgcccgcccgcggcggccaggaacccgaccgccctccgctctcaggatttttacctcctataactccaccagaaaagttttttctttcccagctgatgctggcacccccacgggaactcttcaaaaagacgcctcgccagattgcactgatggacgttggaaacatgggccagtctgtggacattagtgggcttcagttagccttggccgaacgccaatctgaattgccaacgcaaagcaaagcgagcttccccagtattctcagtgacccagacccggattcttctaattctggatttgacagctcagttgcctctcagatcacagaagctttagtcagcggaccaaagccacctattgaaagccattttcgaccagagtttattcgtccaccgcctccactccacatttgtgaggatgaacttgcttggctaaaccccacggagcctgaccacgcgatccagtgggataaatcgatgtgtgttaagaatagcactggtgtggagatcaaacgaataatggccaaagccttcaaaagccccttatcctctccccaacaaacacagctacttggtgagttggaaaaagaccccaaacttgtctaccatattggcctcaccccagccaaacttcctgaccttgtggaaaacaaccctttagtcgctatagaaatgttgctgaaattaatgcagtcaagccagatcactgagtatttctctgtcctggtcaatatggacatgtctttacattcaatggaagttgtaaatcgactaactacagctgttgatctacctcctgaatttattcacctttatatatcaaattgcatctctacttgtgaacagattaaggataaatatatgcagaatcggttggtgcgtcttgtgtgtgtgtttctccaatccttgatccgtaacaaaattattaatgtacaggatttgtttatagaagtgcaggcattctgtattgaattcagtaggatacgagaagctgctggtcttttccggttgttgaagacattggatactggggaaacaccttctgagaccaaaatgtcaaaataatacctcatcagaaccatcccatccattcactgttcagctgtactgtgatttagtttttacaccgttaaaaccctgagtggattgcttggtttaatgcatataaacagtactttatctacttaaagc

SEQ ID NO: 445372 - DNA, 3083 bp, Homo sapiens
agcgggcgctttacggccgcggggacggagcgagccggcgccaggcccctcgggccgggaagaggggaaggggagcgaggttgatgcccggcggaggggcgagcgcggcgtctggccggcttctcaccgccgcggagcaaagagggtcccgggaagcggcagggtcggcgtccaggagcggcttcgggggctccggcggcggcagaggcggagcaagcggccccgggtccgggagcggaggccctgggggccccgcgggcaggatgagcttgaccccgaaggagctctcgagcctgctgagcatcatatcggaggaggcgggcggcggcagcaccttcgagggcctgtccaccgccttccaccactacttcagcaaggccgaccacttccgcctgggctcggtgctcgtcatgctgctccagcagcccgacctgctgcctagcgcggcgcagcgcctcacggcgctctacctgctctgggagatgtaccgcaccgagccgctggccgccaaccccttcgccgccagcttcgcgcacctgctcaaccccgcgccgcccgcccgcggcggccaggaacccgaccgccctccgctctcaggatttttacctcctataactccaccagaaaagttttttctttcccagctgatgctggcacccccacgggaactcttcaaaaagacgcctcgccagattgcactgatggacgttggaaacatgggccagtctgtggacattagtgggcttcagttagccttggccgaacgccaatctgaattgccaacgcaaagcaaagcgagcttccccagtattctcagtgacccagacccggattcttctaattctggatttgacagctcagttgcctctcagatcacagaagctttagtcagcggaccaaagccacctattgaaagccattttcgaccagagtttattcgtccaccgcctccactccacatttgtgaggatgaacttgcttggctaaaccccacggagcctgaccacgcgatccagtgggataaatcgatgtgtgttaagaatagcactggtgtggagatcaaacgaataatggccaaagccttcaaaagccccttatcctctccccaacaaacacagctacttggtgagttggaaaaagaccccaaacttgtctaccatattggcctcaccccagccaaacttcctgaccttgtggaaaacaaccctttagtcgctatagaaatgttgctgaaattaatgcagtcaagccagatcactgagtatttctctgtcctggtcaatatggacatgtctttacattcaatggaagttgtaaatcgactaactacagctgttgatctacctcctgaatttattcacctttatatatcaaattgcatctctacttgtgaacagattaaggataaatatatgcagaatcggttggtgcgtcttgtgtgtgtgtttctccaatccttgatccgtaacaaaattattaatgtacaggatttgtttatagaagtgcaggcattctgtattgaattcagtaggatacgagaagctgctggtcttttccggttgttgaagacattggatactggggaaacaccttctgagaccaaaatgtcaaaataatacctcatcagaaccatcccatccattcactgttcagctgtactgtgatttagtttttacaccgttaaaaccctgagtggattgcttggtttaatgcatataaacagtactttatctacttaaagcaaagttttgctttcttgaatgactttttctgtgagatgaatttttgataagaactagggaaaacatgtcttttaggtgtcttgctgatgactatccataggaggaatggctatcccaaaaaaagttccgcaaaaaagtagatgagtttcttttttttttaagcactaaagaacaaaatgcatttttcattaatacaggcttctgatgaaccaggaatcctgttttcgtaaagttccaatgttgatgagagtaaattcttaagcatttgtcctagaggtgaaagcagctgaatgtttctgaaccatcaagaggcaaacaaacaggagtttgtttcttgaacctgcttatgcacacagctcttaactcctcatgaggcacacagctcttaactcctgatgaaccaaggatttactcataactttctccttgtcatggaggcttaatagacaacagaataaatgcatttcttgggcctcttataaacttgggaattcttagaaagctgcttctattaccaggctgtaatagctggtatagttttttttttttctcttaagatgttctgttattagtctgagacagccatttttttgttttaaggaaaaatatcagtcagtgctccgggaggtaatttcctgtggggtctgcaccctcctgtctgggtggtggatgtgggtttgagaagtaggagagcagggtggtaccgtgtgggctcttaccctttatgtgattttggacaacagtgccttccattaaagttctttttatcaactgttaaaaaaaaaaaaaaaaaaaaaaaaaaaacacaaaaaacaaaaaaaaaaaaccaaaaaaaaaaaaaaacacaaaaaaaaaacgcaaaaaaaaacaagaaaacaaccacaccacaaagaaaaataaaaaaaacatcacacacaaccacaacgaggggggcggcgcggcccgccacctacgccagaccgcgacgagcgacacggcggcgccaacgcgcgatacgcaaccaccaaaggcagcgatcccgaccacagtaggagccgaagcaagaacacgcagaacacgggacagcacgtcgcccccacgacacaactgacggcggtcgggcgagcgagccaagccgagacgaccgtggatgcgaactagccggccaccatgcgccattccccctcggccgtgcccggacggccggtcccggcggccgggcagaaaagcagcgagtcatgggagcaggtcgtccgtgcttcgccacgctcccccatcaccggtgcggaaggcgtctgacacacatggtcgtcgacgaccccccgcctgcgccctctcgcctcgtcgcggcccgtccgcgcg

SEQ ID NO: 445373 - DNA, 2465 bp, Homo sapiens
agcgggcgctttacggccgcggggacggagcgagccggcgccaggcccctcgggccgggaagaggggaaggggagcgaggttgatgcccggcggaggggcgagcgcggcgtctggccggcttctcaccgccgcggagcaaagagggtcccgggaagcggcagggtcggcgtccaggagcggcttcgggggctccggcggcggcagaggcggagcaagcggccccgggtccgggagcggaggccctgggggccccgcgggcaggatgagcttgaccccgaaggagctctcgagcctgctgagcatcatatcggaggaggcgggcggcggcagcaccttcgagggcctgtccaccgccttccaccactacttcagcaaggccgaccacttccgcctgggctcggtgctcgtcatgctgctccagcagcccgacctgctgcctagcgcggcgcagcgcctcacggcgctctacctgctctgggagatgtaccgcaccgagccgctggccgccaaccccttcgccgccagcttcgcgcacctgctcaaccccgcgccgcccgcccgcggcggccaggaacccgaccgccctccgctctcaggatttttacctcctataactccaccagaaaagttttttctttcccagctgatgctggcacccccacgggaactcttcaaaaagacgcctcgccagattgcactgatggacgttggaaacatgggccagtctgtggacattagtgggcttcagttagccttggccgaacgccaatctgaattgccaacgcaaagcaaagcgagcttccccagtattctcagtgacccagacccggattcttctaattctggatttgacagctcagttgcctctcagatcacagaagctttagtcagcggaccaaagccacctattgaaagccattttcgaccagagtttattcgtccaccgcctccactccacatttgtgaggatgaacttgcttggctaaaccccacggagcctgaccacgcgatccagtgggataaatcgatgtgtgttaagaatagcactggtgtggagatcaaacgaataatggccaaagccttcaaaagccccttatcctctccccaacaaacacagctacttggtgagttggaaaaagaccccaaacttgtctaccatattggcctcaccccagccaaacttcctgaccttgtggaaatcactgagtatttctctgtcctggtcaatatggacatgtctttacattcaatggaagttgtaaatcgactaactacagctgttgatctacctcctgaatttattcacctttatatatcaaattgcatctctacttgtgaacagattaaggataaatatatgcagaatcggttggtgcgtcttgtgtgtgtgtttctccaatccttgatccgtaacaaaattattaatgtacaggatttgtttatagaagtgcaggcattctgtattgaattcagtaggatacgagaagctgctggtcttttccggttgttgaagacattggatactggggaaacaccttctgagaccaaaatgtcaaaataatacctcatcagaaccatcccatccattcactgttcagctgtactgtgatttagtttttacaccgttaaaaccctgagtggattgcttggtttaatgcatataaacagtactttatctacttaaagcaaagttttgctttcttgaatgactttttctgtgagatgaatttttgataagaactagggaaaacatgtcttttaggtgtcttgctgatgactatccataggaggaatggctatcccaaaaaaagttccgcaaaaaagtagatgagtttcttttttttttaagcactaaagaacaaaatgcatttttcattaatacaggcttctgatgaaccaggaatcctgttttcgtaaagttccaatgttgatgagagtaaattcttaagcatttgtcctagaggtgaaagcagctgaatgtttctgaaccatcaagaggcaaacaaacaggagtttgtttcttgaacctgcttatgcacacagctcttaactcctcatgaggcacacagctcttaactcctgatgaaccaaggatttactcataactttctccttgtcatggaggcttaatagacaacagaataaatgcatttcttgggcctcttataaacttgggaattcttagaaagctgcttctattaccaggctgtaatagctggtatagttttttttttttctcttaagatgttctgttattagtctgagacagccatttttttgttttaaggaaaaatatcagtcagtgctccgggaggtaatttcctgtggggtctgcaccctcctgtctgggtggtggatgtgggtttgagaagtaggagagcagggtggtaccgtgtgggctcttaccctttatgtgattttggacaacagtgccttccattaaagttctttttatcaactgtta

SEQ ID NO: 445374 - DNA, 2555 bp, Homo sapiens
agcgggcgctttacggccgcggggacggagcgagccggcgccaggcccctcgggccgggaagaggggaaggggagcgaggttgatgcccggcggaggggcgagcgcggcgtctggccggcttctcaccgccgcggagcaaagagggtcccgggaagcggcagggtcggcgtccaggagcggcttcgggggctccggcggcggcagaggcggagcaagcggccccgggtccgggagcggaggccctgggggccccgcgggcaggatgagcttgaccccgaaggagctctcgagcctgctgagcatcatatcggaggaggcgggcggcggcagcaccttcgagggcctgtccaccgccttccaccactacttcagcaaggccgaccacttccgcctgggctcggtgctcgtcatgctgctccagcagcccgacctgctgcctagcgcggcgcagcgcctcacggcgctctacctgctctgggagatgtaccgcaccgagccgctggccgccaaccccttcgccgccagcttcgcgcacctgctcaaccccgcgccgcccgcccgcggcggccaggaacccgaccgccctccgctctcaggatttttacctcctataactccaccagaaaagttttttctttcccagctgatgctggcacccccacgggaactcttcaaaaagacgcctcgccagattgcactgatggacgttggaaacatgggccagtctgtggacattagtgggcttcagttagccttggccgaacgccaatctgaattgccaacgcaaagcaaagcgagcttccccagtattctcagtgacccagacccggattcttctaattctggatttgacagctcagttgcctctcagatcacagaagctttagtcagcggaccaaagccacctattgaaagccattttcgaccagagtttattcgtccaccgcctccactccacatttgtgaggatgaacttgcttggctaaaccccacggagcctgaccacgcgatccagtgggataaatcgatgtgtgttaagaatagcactggtgtggagatcaaacgaataatggccaaagccttcaaaagccccttatcctctccccaacaaacacagctacttggtgagttggaaaaagaccccaaacttgtctaccatattggcctcaccccagccaaacttcctgaccttgtggaaaacaaccctttagtcgctatagaaatgttgctgaaattaatgcagtcaagccagatcactgagtatttctctgtcctggtcaatatggacatgtctttacattcaatggaagttgtaaatcgactaactacagctgttgatctacctcctgaatttattcacctttatatatcaaattgcatctctacttgtgaacagattaaggataaatatatgcagaatcggttggtgcgtcttgtgtgtgtgtttctccaatccttgatccgtaacaaaattattaatgtacaggatttgtttatagaagtgcaggcattctgtattgaattcagtaggaaaagaccagcagcttctcgtatcctactgaattcaatacgagaagctgctggtcttttccggttgttgaagacattggatactggggaaacaccttctgagaccaaaatgtcaaaataatacctcatcagaaccatcccatccattcactgttcagctgtactgtgatttagtttttacaccgttaaaaccctgagtggattgcttggtttaatgcatataaacagtactttatctacttaaagcaaagttttgctttcttgaatgactttttctgtgagatgaatttttgataagaactagggaaaacatgtcttttaggtgtcttgctgatgactatccataggaggaatggctatcccaaaaaaagttccgcaaaaaagtagatgagtttcttttttttttaagcactaaagaacaaaatgcatttttcattaatacaggcttctgatgaaccaggaatcctgttttcgtaaagttccaatgttgatgagagtaaattcttaagcatttgtcctagaggtgaaagcagctgaatgtttctgaaccatcaagaggcaaacaaacaggagtttgtttcttgaacctgcttatgcacacagctcttaactcctcatgaggcacacagctcttaactcctgatgaaccaaggatttactcataactttctccttgtcatggaggcttaatagacaacagaataaatgcatttcttgggcctcttataaacttgggaattcttagaaagctgcttctattaccaggctgtaatagctggtatagttttttttttttctcttaagatgttctgttattagtctgagacagccatttttttgttttaaggaaaaatatcagtcagtgctccgggaggtaatttcctgtggggtctgcaccctcctgtctgggtggtggatgtgggtttgagaagtaggagagcagggtggtaccgtgtgggctcttaccctttatgtgattttggacaacagtgccttccattaaagttctttttatcaactgtta

SEQ ID NO: 445375 - DNA, 425 bp, Homo sapiens
attaagagatttctttgcatactttattaagtgaaatgtgtgagatgtgtagagatgttagcttcctgataggagcaactatcacggctctcattacaggccattttcgaccagagtttattcgtccaccgcctccactccacatttgtgaggatgaacttgcttggctaaaccccacggagcctgaccacgcgatccagtgggataaatcgatgtgtgttaagaatagcactggtgtggagatcaaacgaataatggccaaagccttcaaaagccccttatcctctccccaacaaacacaggtgtgtattgattgtaagcattttcttatctttttttttaaatttatttttaattaaaaaaatttgtttttgagacagagtctcactcggctgcccagggtggagtgcagtggcacgatctcg

SEQ ID NO: 445376 - DNA, 779 bp, Homo sapiens
ctcttgggggcgggacgcgcggtggctaccgactcccggcccgccccggcccgcgtgcaggacccggtcgtcccctcctgctgtcctggagcccggactgaggccccgggggcgcggcagggctcccggtccacgcgagccatggcccgaccgcgcctcggctcagccctgccctccgcagccgctttcgggtggctccgcccgcggcccaatttccaggcgaccgtttcccggcgacggcgggcggggccgtctctgccgccccccgccgcgcgctccgcgggcgcctgcgacgccccgcctctggctcgggtgcgggagcggggcctgcccggactgcgacgccgccacagcttggggccagttcgcccagtcagggggatggctcggtcggcctcgggggtcgacgatcccccgggtaggcgacgtgccctgtccaggcctcacttcccgcgtccgcaaaacggggtggacaacgcagcctaaggcagagccgcgccaaggtccctcgctgtcgccgggctctggcggcctgaccgggcctggggtccgagcgtgcccccgggcctgggggggtcgccgcgatggactcgctggcagcgccccaggaccgcctggtggagcagctgctgtcgccgcggacccaggcccagaggcggctcaagcggcctcgcaggtccgcggccccacggtggggcgacgtgccctgtccaggcctcacctcacgcgactccaaaacgcggcggagaatgcggccgtgggacccctccaggggcccc

SEQ ID NO: 445377 - DNA, 3218 bp, Homo sapiens
gctcaccccgcagcccggcctcggcctccgccgcttgtcgtcgcgccccgcccgcgagcccgccccgcacgtcccccgccggcggccaccatgagcacaggcctgcggtacaagagcaagctggcgaccccagaggacaagcaggacattgacaagcagtacgtgggcttcgccacactgcccaaccaggtgcaccgcaagtcggtgaagaaaggctttgacttcacactcatggtggctggtgagtcaggcctggggaagtccacactggtccacagcctcttcctgacagacttgtacaaggaccggaagctgctcagtgctgaggagcgcatcagccagacggtagagattctaaaacacacggtggacattgaggagaagggagtcaagctgaagctcaccatcgtggacacgccgggattcggggacgctgtcaacaacaccgagtgctggaagcccatcaccgactatgtggaccagcagtttgagcagtacttccgtgatgagagcggcctcaaccgaaagaacatccaagacaaccgagtgcactgctgcctatacttcatctcccccttcgggcatgggctgcggccagtggatgtgggtttcatgaaggcattgcatgagaaggtcaacatcgtgcctctcatcgccaaagctgactgtcttgtccccagtgagatccggaagctgaaggagcggatccgggaggagattgacaagtttgggatccatgtataccagttccctgagtgtgactcggacgaggatgaggacttcaagcagcaggaccgggaactgaaggagagcgcgcccttcgccgttataggcagcaacacggtggtggaggccaaggggcagcgggtccggggccgactgtacccctgggggatcgtggaggtggagaaccaggcgcattgcgacttcgtgaagctgcgcaacatgctcatccgcacgcatatgcacgacctcaaggacgtgacgtgcgacgtgcactacgagaactaccgcgcgcactgcatccagcagatgaccagcaaactgacccaggacagccgcatggagagccccatcccgatcctgccgctgcccaccccggacgccgagactgagaagcttatcaggatgaaggatgaggaactgaggcgcatgcaggagatgctgcagaggatgaagcagcagatgcaggaccagtgacgctcgccgcggacacaccgtccgtctccgggacgccctcgcacccctggacaccagaccggactgttcccgacccggagacgcggggccacagcccccagctgaccctaatttattctcagcaccaccccctcccaggtcattgtgtctgtttccgaggggcctggaccgtagcccccgcccagctggccctctctgaccttgggggatcaggagcgaagttgggcgggacttcagagatccgcctcccttgcccttcccccgcccccggacggtcacagcacccaaaccgcaggccctgctctggcaggcaggcaaagctaggcagaagaggattcccaggatcctgggtctgttccctgccccagtgctgcagaacggacttgggagccctcctttgcctgctcccgcgggtcacccagcgagtgctgagaccccattttctgtcgaggcgggccgagtcttcccttatccccagacgcctagcgggcagggttgggctgaatcaaatgggagccctccagacataaggaggccagaggctgcaaggagcggggtcgtgaccgcttacaccccttctccacagcccggcccgacctggagggcccccggggcactgggcggtgagccacctcctggcaactctcggtgccgtcccctgccctcgctcgaggcctcttctccccagcaccgctgtggtgtgccgggatcctgagcctaggcctcccgatgttcccacccgcatgatcccttcccgccacacgatgctccgttttcttccgttgtgaatgccgcgtcctgtcctggtgacaggagaacaatgttggtgaacgtcgcagcgggtgtccgagtgctccgtgtgcccctgagagcgggtgggagcggaagcctgagcggcctgcggcctccggcgatagtgtgctatctgccgctgcagcgcgcgtccgcgcggcctctgggctatttctggccaggccgcagcactgtggtcggtgcgggcgtggcaggggcggggcggccttatcgctcggctctcccgcctacgcctcccgctgcagagtaagccgggctgccgtcttctcgccatgggctccgggccgcgcggggcgctgagcttactgctcctgctgctggccccgccgagccgcccggccgcaggttgcccggcgccctgtagctgcgcggggacgctcgtggactgcgggcgccgcgggctgacttgggcctcgctgccgaccgccttccctgtcgacacaaccgagctggtgctgaccggcaacaacctgacggcgctgccgccggggctgctggacgcgctgcccgcgctgcgcaccgcacacctgggcgccaacccctggcgctgcgactgccgccttgtgccgctgcgcgcctggctggccggccgccccgagcgtgcgccctaccgcgacctgcgttgcgtggcgcccccagcgctgcgcggccgcctgctgccctatctggccgaggacgagctgcgcgccgcttgcgctcccggcccgctctgctggggggcgctggcggcgcagcttgcgctgctgggccttgggctgctgcacgcgttgctgctggtgctgctgctgtgccgcctgcggaggctgcgggcccgggcccgcgctcgcgccgcagcccggctgtcgctgaccgacccgctggtggccgagcgagccggaaccgacgagtcctgaggagagaaccggtgcgtcctgaggagagaaccggcgctgggcaacacgggcctgcaaactcgacaggaccctgcccgaggggccctcgcgccaacctggaccggtccccgcctcctccgctgcccaatctctcagacccaccccacctgcaggcccagaccacgtgggacagaactcctgcccaccctaccccgagggaggcgaacccgcacttccaggcttgggaggaccatggggcacaatgcggtccagaccctgctgcgtctcccttccaaactctggtgctgaataaacccttctgatctggtcttc

SEQ ID NO: 445378 - DNA, 4621 bp, Homo sapiens
  misc_feature (4343)..(4343): n is a, c, g, or t
  misc_feature (4477)..(4477): n is a, c, g, or t
  misc_feature (4582)..(4584): n is a, c, g, or t
  misc_feature (4586)..(4586): n is a, c, g, or t
  misc_feature (4589)..(4589): n is a, c, g, or t
  misc_feature (4593)..(4593): n is a, c, g, or t
  misc_feature (4600)..(4600): n is a, c, g, or t
  misc_feature (4602)..(4602): n is a, c, g, or t
  misc_feature (4611)..(4611): n is a, c, g, or t
  misc_feature (4619)..(4619): n is a, c, g, or t
ctcttgggggcgggacgcgcggtggctaccgactcccggcccgccccggcccgcgtgcaggacccggtcgtcccctcctgctgtcctggagcccggactgaggccccgggggcgcggcagggctcccggtccacgcgagccatggcccgaccgcgcctcggctcagccctgccctccgcagccgctttcgggtggctccgcccgcggcccaatttccaggcgaccgtttcccggcgacggcgggcggggccgtctctgccgccccccgccgcgcgctccgcgggcgcctgcgacgccccgcctctggctcgggtgcgggagcggggcctgcccggactgcgacgccgccacagcttggggccagttcgcccagtcagggggatggctcggtcggcctcgggggtcgacgatcccccgggtaggcgacgtgccctgtccaggcctcacttcccgcgtccgcaaaacggggtggacaacgcagcctaaggcagagccgcgccaaggtccctcgctgtcgccgggctctggcggcctgaccgggcctggggtccgagcgtgcccccgggcctgggggggtcgccgcgatggactcgctggcagcgccccaggaccgcctggtggagcagctgctgtcgccgcggacccaggcccagaggcggctcaagaggacattgacaagcagtacgtgggcttcgccacactgcccaaccaggtgcaccgcaagtcggtgaagaaaggctttgacttcacactcatggtggctggtgagtcaggcctggggaagtccacactggtccacagcctcttcctgacagacttgtacaaggaccggaagctgctcagtgctgaggagcgcatcagccagacggtagagattctaaaacacacggtggacattgaggagaagggagtcaagctgaagctcaccatcgtggacacgccgggattcggggacgctgtcaacaacaccgagtgctggaagcccatcaccgactatgtggaccagcagtttgagcagtacttccgtgatgagagcggcctcaaccgaaagaacatccaagacaaccgagtgcactgctgcctatacttcatctcccccttcgggcatgggctgcggccagtggatgtgggtttcatgaaggcattgcatgagaaggtcaacatcgtgcctctcatcgccaaagctgactgtcttgtccccagtgagatccggaagctgaaggagcggatccgggaggagattgacaagtttgggatccatgtataccagttccctgagtgtgactcggacgaggatgaggacttcaagcagcaggaccgggaactgaaggagagcgcgcccttcgccgttataggcagcaacacggtggtggaggccaaggggcagcgggtccggggccgactgtacccctgggggatcgtggaggtggagaaccaggcgcattgcgacttcgtgaagctgcgcaacatgctcatccgcacgcatatgcacgacctcaaggacgtgacgtgcgacgtgcactacgagaactaccgcgcgcactgcatccagcagatgaccagcaaactgacccaggacagccgcatggagagccccatcccgatcctgccgctgcccaccccggacgccgagactgagaagcttatcaggatgaaggatgaggaactgaggcgcatgcaggagatgctgcagaggatgaagcagcagatgcaggaccagtgacgctcgccgcggacacaccgtccgtctccgggacgccctcgcacccctggacaccagaccggactgttcccgacccggagacgcggggccacagcccccagctgaccctaatttattctcagcaccaccccctcccaggtcattgtgtctgtttccgaggggcctggaccgtagcccccgcccagctggccctctctgaccttgggggatcaggagcgaagttgggcgggacttcagagatccgcctcccttgcccttcccccgcccccggacggtcacagcacccaaaccgcaggccctgctctggcaggcaggcaaagctaggcagaagaggattcccaggatcctgggtctgttccctgccccagtgctgcagaacggacttgggagccctcctttgcctgctcccgcgggtcacccagcgagtgctgagaccccattttctgtcgaggcgggccgagtcttcccttatccccagacgcctagcgggcagggttgggctgaatcaaatgggagccctccagacataaggaggccagaggctgcaaggagcggggtcgtgaccgcttacaccccttctccacagcccggcccgacctggagggcccccggggcactgggcggtgagccacctcctggcaactctcggtgccgtcccctgccctcgctcgaggcctcttctccccagcaccgctgtggtgtgccgggatcctgagcctaggcctcccgatgttcccacccgcatgatcccttcccgccacacgatgctccgttttcttccgttgtgaatgccgcgtcctgtcctggtgacaggagaacaatgttggtgaacgtcgcagcgggtgtccgagtgctccgtgtgcccctgagagcgggtgggagcggaagcctgagcggcctgcggcctccggcgatagtgtgctatctgccgctgcagcgcgcgtccgcgcggcctctgggctatttctggccaggccgcagcactgtggtcggtgcgggcgtggcaggggcggggcggccttatcgctcggctctcccgcctacgcctcccgctgcagagtaagccgggctgccgtcttctcgccatgggctccggtgagtctggagtccggtcgggcccccggctgctccctaggccgacccgggttgagaggagctctggtcgtttggctgcagctgggagagacttgggtcagacttagaggggacttccagccggcgtgcggggtggtcagggtggagaggctggcgggctaccgggacgccgggcatcaggggctggatggagccgggccggcagtctgggtactcagagatgtcgcccaggtgcccgccgaccgctcggcttactgcggcgcttcccttgcagggccgcgcggggcgctgagcttactgctcctgctgctggccccgccgagccgcccggccgcaggttgcccggcgccctgtagctgcgcggggacgctcgtggactgcgggcgccgcgggctgacttgggcctcgctgccgaccgccttccctgtcgacacaaccgagctggtgctgaccggcaacaacctgacggcgctgccgccggggctgctggacgcgctgcccgcgctgcgcaccgcacacctgggcgccaacccctggcgctgcgactgccgccttgtgccgctgcgcgcctggctggccggccgccccgagcgtgcgccctaccgcgacctgcgttgcgtggcgcccccagcgctgcgcggccgcctgctgccctatctggccgaggacgagctgcgcgccgcttgcgctcccggcccgctctgctggggggcgctggcggcgcagcttgcgctgctgggccttgggctgctgcacgcgttgctgctggtgctgctgctgtgccgcctgcggaggctgcgggcccgggcccgcgctcgcgccgcagcccggctgtcgctgaccgacccgctggtggccgagcgagccggaaccgacgagtcctgaggagagaaccggtgcgtcctgaggagagaaccggcgctgggcaacacgggcctgcaaactcgacaggaccctgcccgaggggccctcgcgccaacctggaccggtccccgcctcctccgctgcccaatctctcagacccaccccacctgcaggcccagaccacgtgggacagaactcctgcccaccctaccccgagggaggcgaacccgcacttccaggcttgggaggaccatggggcacaatgcggtccagaccctgctgcgtctcccttccaaactctggtgctgaataaacccttctgatctggtcttctctgcacgactgacctggaaattcccctcgccaaactcaggaaaaggccccaggaggcggttcaaggggacacaaacacatcctcacatgcccaccctaacctcaggggcagacaggagtcagtgggtgacctctccccttccagacacactcccaaaaggccacatgggaaggcatgagagagatgctaagtgataacgtgggggccagtgaggacgttgtggggacactgaggaccctgtgggggcagtgaggatgctgtggggatgctgtggggacagtaaggacactgggggcagtgaggacgctgtggacactgcggacgctntggggacaatgacgctgtggacagtgaggacgctgtgggggcggtgaggacactgtggagtgaggacactgggggcagtgaggacgctgtggacagtggggcgctgtgggggcggtgaggacgctgtaggggcngtgaggacgctgtggacggtgagaacgctgtggggacactgaggatgctgtgaggacgctgtgggggcagtgaggacgctgtggaccgtgaggacgctgtggggnnngngangacnctgtggncngtgaggacnctgtggangg

SEQ ID NO: 445379 - DNA, 4122 bp, Homo sapiens
  misc_feature (3844)..(3844): n is a, c, g, or t
  misc_feature (3978)..(3978): n is a, c, g, or t
  misc_feature (4083)..(4085): n is a, c, g, or t
  misc_feature (4087)..(4087): n is a, c, g, or t
  misc_feature (4090)..(4090): n is a, c, g, or t
  misc_feature (4094)..(4094): n is a, c, g, or t
  misc_feature (4101)..(4101): n is a, c, g, or t
  misc_feature (4103)..(4103): n is a, c, g, or t
  misc_feature (4112)..(4112): n is a, c, g, or t
  misc_feature (4120)..(4120): n is a, c, g, or t
atctccaggcttttgcccacgggccctccccttatttttgccaacgaaatgccccaccctgggaaccgtaccctctgctgtctcctcataccgcatttggtaagagacagggtattgggcttctggagaaacctttgtgtccctaccctgttccatcctgtccccaaggacattgacaagcagtacgtgggcttcgccacactgcccaaccaggtgcaccgcaagtcggtgaagaaaggctttgacttcacactcatggtggctggtgagtcaggcctggggaagtccacactggtccacagcctcttcctgacagacttgtacaaggaccggaagctgctcagtgctgaggagcgcatcagccagacggtagagattctaaaacacacggtggacattgaggagaagggagtcaagctgaagctcaccatcgtggacacgccgggattcggggacgctgtcaacaacaccgagtgctggaagcccatcaccgactatgtggaccagcagtttgagcagtacttccgtgatgagagcggcctcaaccgaaagaacatccaagacaaccgagtgcactgctgcctatacttcatctcccccttcgggcatgggctgcggccagtggatgtgggtttcatgaaggcattgcatgagaaggtcaacatcgtgcctctcatcgccaaagctgactgtcttgtccccagtgagatccggaagctgaaggagcggatccgggaggagattgacaagtttgggatccatgtataccagttccctgagtgtgactcggacgaggatgaggacttcaagcagcaggaccgggaactgaaggagagcgcgcccttcgccgttataggcagcaacacggtggtggaggccaaggggcagcgggtccggggccgactgtacccctgggggatcgtggaggtggagaaccaggcgcattgcgacttcgtgaagctgcgcaacatgctcatccgcacgcatatgcacgacctcaaggacgtgacgtgcgacgtgcactacgagaactaccgcgcgcactgcatccagcagatgaccagcaaactgacccaggacagccgcatggagagccccatcccgatcctgccgctgcccaccccggacgccgagactgagaagcttatcaggatgaaggatgaggaactgaggcgcatgcaggagatgctgcagaggatgaagcagcagatgcaggaccagtgacgctcgccgcggacacaccgtccgtctccgggacgccctcgcacccctggacaccagaccggactgttcccgacccggagacgcggggccacagcccccagctgaccctaatttattctcagcaccaccccctcccaggtcattgtgtctgtttccgaggggcctggaccgtagcccccgcccagctggccctctctgaccttgggggatcaggagcgaagttgggcgggacttcagagatccgcctcccttgcccttcccccgcccccggacggtcacagcacccaaaccgcaggccctgctctggcaggcaggcaaagctaggcagaagaggattcccaggatcctgggtctgttccctgccccagtgctgcagaacggacttgggagccctcctttgcctgctcccgcgggtcacccagcgagtgctgagaccccattttctgtcgaggcgggccgagtcttcccttatccccagacgcctagcgggcagggttgggctgaatcaaatgggagccctccagacataaggaggccagaggctgcaaggagcggggtcgtgaccgcttacaccccttctccacagcccggcccgacctggagggcccccggggcactgggcggtgagccacctcctggcaactctcggtgccgtcccctgccctcgctcgaggcctcttctccccagcaccgctgtggtgtgccgggatcctgagcctaggcctcccgatgttcccacccgcatgatcccttcccgccacacgatgctccgttttcttccgttgtgaatgccgcgtcctgtcctggtgacaggagaacaatgttggtgaacgtcgcagcgggtgtccgagtgctccgtgtgcccctgagagcgggtgggagcggaagcctgagcggcctgcggcctccggcgatagtgtgctatctgccgctgcagcgcgcgtccgcgcggcctctgggctatttctggccaggccgcagcactgtggtcggtgcgggcgtggcaggggcggggcggccttatcgctcggctctcccgcctacgcctcccgctgcagagtaagccgggctgccgtcttctcgccatgggctccggtgagtctggagtccggtcgggcccccggctgctccctaggccgacccgggttgagaggagctctggtcgtttggctgcagctgggagagacttgggtcagacttagaggggacttccagccggcgtgcggggtggtcagggtggagaggctggcgggctaccgggacgccgggcatcaggggctggatggagccgggccggcagtctgggtactcagagatgtcgcccaggtgcccgccgaccgctcggcttactgcggcgcttcccttgcagggccgcgcggggcgctgagcttactgctcctgctgctggccccgccgagccgcccggccgcaggttgcccggcgccctgtagctgcgcggggacgctcgtggactgcgggcgccgcgggctgacttgggcctcgctgccgaccgccttccctgtcgacacaaccgagctggtgctgaccggcaacaacctgacggcgctgccgccggggctgctggacgcgctgcccgcgctgcgcaccgcacacctgggcgccaacccctggcgctgcgactgccgccttgtgccgctgcgcgcctggctggccggccgccccgagcgtgcgccctaccgcgacctgcgttgcgtggcgcccccagcgctgcgcggccgcctgctgccctatctggccgaggacgagctgcgcgccgcttgcgctcccggcccgctctgctggggggcgctggcggcgcagcttgcgctgctgggccttgggctgctgcacgcgttgctgctggtgctgctgctgtgccgcctgcggaggctgcgggcccgggcccgcgctcgcgccgcagcccggctgtcgctgaccgacccgctggtggccgagcgagccggaaccgacgagtcctgaggagagaaccggtgcgtcctgaggagagaaccggcgctgggcaacacgggcctgcaaactcgacaggaccctgcccgaggggccctcgcgccaacctggaccggtccccgcctcctccgctgcccaatctctcagacccaccccacctgcaggcccagaccacgtgggacagaactcctgcccaccctaccccgagggaggcgaacccgcacttccaggcttgggaggaccatggggcacaatgcggtccagaccctgctgcgtctcccttccaaactctggtgctgaataaacccttctgatctggtcttctctgcacgactgacctggaaattcccctcgccaaactcaggaaaaggccccaggaggcggttcaaggggacacaaacacatcctcacatgcccaccctaacctcaggggcagacaggagtcagtgggtgacctctccccttccagacacactcccaaaaggccacatgggaaggcatgagagagatgctaagtgataacgtgggggccagtgaggacgttgtggggacactgaggaccctgtgggggcagtgaggatgctgtggggatgctgtggggacagtaaggacactgggggcagtgaggacgctgtggacactgcggacgctntggggacaatgacgctgtggacagtgaggacgctgtgggggcggtgaggacactgtggagtgaggacactgggggcagtgaggacgctgtggacagtggggcgctgtgggggcggtgaggacgctgtaggggcngtgaggacgctgtggacggtgagaacgctgtggggacactgaggatgctgtgaggacgctgtgggggcagtgaggacgctgtggaccgtgaggacgctgtggggnnngngangacnctgtggncngtgaggacnctgtggangg

SEQ ID NO: 445380 - DNA, 3843 bp, Homo sapiens
  misc_feature (3565)..(3565): n is a, c, g, or t
  misc_feature (3699)..(3699): n is a, c, g, or t
  misc_feature (3804)..(3806): n is a, c, g, or t
  misc_feature (3808)..(3808): n is a, c, g, or t
  misc_feature (3811)..(3811): n is a, c, g, or t
  misc_feature (3815)..(3815): n is a, c, g, or t
  misc_feature (3822)..(3822): n is a, c, g, or t
  misc_feature (3824)..(3824): n is a, c, g, or t
  misc_feature (3833)..(3833): n is a, c, g, or t
  misc_feature (3841)..(3841): n is a, c, g, or t
catggtcacagctgtctgtctggtcgcactggtgtggaggagacggggtaccgacgctgcggatgcggtagtgcattgatcatagactggttaccgattctaaaacacacggtggacattgaggagaagggagtcaagctgaagctcaccatcgtggacacgccgggattcggggacgctgtcaacaacaccgagtgctggaagcccatcaccgactatgtggaccagcagtttgagcagtacttccgtgatgagagcggcctcaaccgaaagaacatccaagacaaccgagtgcactgctgcctatacttcatctcccccttcgggcatgggctgcggccagtggatgtgggtttcatgaaggcattgcatgagaaggtcaacatcgtgcctctcatcgccaaagctgactgtcttgtccccagtgagatccggaagctgaaggagcggatccgggaggagattgacaagtttgggatccatgtataccagttccctgagtgtgactcggacgaggatgaggacttcaagcagcaggaccgggaactgaaggagagcgcgcccttcgccgttataggcagcaacacggtggtggaggccaaggggcagcgggtccggggccgactgtacccctgggggatcgtggaggtggagaaccaggcgcattgcgacttcgtgaagctgcgcaacatgctcatccgcacgcatatgcacgacctcaaggacgtgacgtgcgacgtgcactacgagaactaccgcgcgcactgcatccagcagatgaccagcaaactgacccaggacagccgcatggagagccccatcccgatcctgccgctgcccaccccggacgccgagactgagaagcttatcaggatgaaggatgaggaactgaggcgcatgcaggagatgctgcagaggatgaagcagcagatgcaggaccagtgacgctcgccgcggacacaccgtccgtctccgggacgccctcgcacccctggacaccagaccggactgttcccgacccggagacgcggggccacagcccccagctgaccctaatttattctcagcaccaccccctcccaggtcattgtgtctgtttccgaggggcctggaccgtagcccccgcccagctggccctctctgaccttgggggatcaggagcgaagttgggcgggacttcagagatccgcctcccttgcccttcccccgcccccggacggtcacagcacccaaaccgcaggccctgctctggcaggcaggcaaagctaggcagaagaggattcccaggatcctgggtctgttccctgccccagtgctgcagaacggacttgggagccctcctttgcctgctcccgcgggtcacccagcgagtgctgagaccccattttctgtcgaggcgggccgagtcttcccttatccccagacgcctagcgggcagggttgggctgaatcaaatgggagccctccagacataaggaggccagaggctgcaaggagcggggtcgtgaccgcttacaccccttctccacagcccggcccgacctggagggcccccggggcactgggcggtgagccacctcctggcaactctcggtgccgtcccctgccctcgctcgaggcctcttctccccagcaccgctgtggtgtgccgggatcctgagcctaggcctcccgatgttcccacccgcatgatcccttcccgccacacgatgctccgttttcttccgttgtgaatgccgcgtcctgtcctggtgacaggagaacaatgttggtgaacgtcgcagcgggtgtccgagtgctccgtgtgcccctgagagcgggtgggagcggaagcctgagcggcctgcggcctccggcgatagtgtgctatctgccgctgcagcgcgcgtccgcgcggcctctgggctatttctggccaggccgcagcactgtggtcggtgcgggcgtggcaggggcggggcggccttatcgctcggctctcccgcctacgcctcccgctgcagagtaagccgggctgccgtcttctcgccatgggctccggtgagtctggagtccggtcgggcccccggctgctccctaggccgacccgggttgagaggagctctggtcgtttggctgcagctgggagagacttgggtcagacttagaggggacttccagccggcgtgcggggtggtcagggtggagaggctggcgggctaccgggacgccgggcatcaggggctggatggagccgggccggcagtctgggtactcagagatgtcgcccaggtgcccgccgaccgctcggcttactgcggcgcttcccttgcagggccgcgcggggcgctgagcttactgctcctgctgctggccccgccgagccgcccggccgcaggttgcccggcgccctgtagctgcgcggggacgctcgtggactgcgggcgccgcgggctgacttgggcctcgctgccgaccgccttccctgtcgacacaaccgagctggtgctgaccggcaacaacctgacggcgctgccgccggggctgctggacgcgctgcccgcgctgcgcaccgcacacctgggcgccaacccctggcgctgcgactgccgccttgtgccgctgcgcgcctggctggccggccgccccgagcgtgcgccctaccgcgacctgcgttgcgtggcgcccccagcgctgcgcggccgcctgctgccctatctggccgaggacgagctgcgcgccgcttgcgctcccggcccgctctgctggggggcgctggcggcgcagcttgcgctgctgggccttgggctgctgcacgcgttgctgctggtgctgctgctgtgccgcctgcggaggctgcgggcccgggcccgcgctcgcgccgcagcccggctgtcgctgaccgacccgctggtggccgagcgagccggaaccgacgagtcctgaggagagaaccggtgcgtcctgaggagagaaccggcgctgggcaacacgggcctgcaaactcgacaggaccctgcccgaggggccctcgcgccaacctggaccggtccccgcctcctccgctgcccaatctctcagacccaccccacctgcaggcccagaccacgtgggacagaactcctgcccaccctaccccgagggaggcgaacccgcacttccaggcttgggaggaccatggggcacaatgcggtccagaccctgctgcgtctcccttccaaactctggtgctgaataaacccttctgatctggtcttctctgcacgactgacctggaaattcccctcgccaaactcaggaaaaggccccaggaggcggttcaaggggacacaaacacatcctcacatgcccaccctaacctcaggggcagacaggagtcagtgggtgacctctccccttccagacacactcccaaaaggccacatgggaaggcatgagagagatgctaagtgataacgtgggggccagtgaggacgttgtggggacactgaggaccctgtgggggcagtgaggatgctgtggggatgctgtggggacagtaaggacactgggggcagtgaggacgctgtggacactgcggacgctntggggacaatgacgctgtggacagtgaggacgctgtgggggcggtgaggacactgtggagtgaggacactgggggcagtgaggacgctgtggacagtggggcgctgtgggggcggtgaggacgctgtaggggcngtgaggacgctgtggacggtgagaacgctgtggggacactgaggatgctgtgaggacgctgtgggggcagtgaggacgctgtggaccgtgaggacgctgtggggnnngngangacnctgtggncngtgaggacnctgtggangg

SEQ ID NO: 445381 - DNA, 3357 bp, Homo sapiens
  misc_feature (3079)..(3079): n is a, c, g, or t
  misc_feature (3213)..(3213): n is a, c, g, or t
  misc_feature (3318)..(3320): n is a, c, g, or t
  misc_feature (3322)..(3322): n is a, c, g, or t
  misc_feature (3325)..(3325): n is a, c, g, or t
  misc_feature (3329)..(3329): n is a, c, g, or t
  misc_feature (3336)..(3336): n is a, c, g, or t
  misc_feature (3338)..(3338): n is a, c, g, or t
  misc_feature (3347)..(3347): n is a, c, g, or t
  misc_feature (3355)..(3355): n is a, c, g, or t
gagaaaaagaacaaaaccaaccccagcagccctaagaaatctgcgccccctgagcccccactgaaggagagcgcgcccttcgccgttataggcagcaacacggtggtggaggccaaggggcagcgggtccggggccgactgtacccctgggggatcgtggaggtggagaaccaggcgcattgcgacttcgtgaagctgcgcaacatgctcatccgcacgcatatgcacgacctcaaggacgtgacgtgcgacgtgcactacgagaactaccgcgcgcactgcatccagcagatgaccagcaaactgacccaggacagccgcatggagagccccatcccgatcctgccgctgcccaccccggacgccgagactgagaagcttatcaggatgaaggatgaggaactgaggcgcatgcaggagatgctgcagaggatgaagcagcagatgcaggaccagtgacgctcgccgcggacacaccgtccgtctccgggacgccctcgcacccctggacaccagaccggactgttcccgacccggagacgcggggccacagcccccagctgaccctaatttattctcagcaccaccccctcccaggtcattgtgtctgtttccgaggggcctggaccgtagcccccgcccagctggccctctctgaccttgggggatcaggagcgaagttgggcgggacttcagagatccgcctcccttgcccttcccccgcccccggacggtcacagcacccaaaccgcaggccctgctctggcaggcaggcaaagctaggcagaagaggattcccaggatcctgggtctgttccctgccccagtgctgcagaacggacttgggagccctcctttgcctgctcccgcgggtcacccagcgagtgctgagaccccattttctgtcgaggcgggccgagtcttcccttatccccagacgcctagcgggcagggttgggctgaatcaaatgggagccctccagacataaggaggccagaggctgcaaggagcggggtcgtgaccgcttacaccccttctccacagcccggcccgacctggagggcccccggggcactgggcggtgagccacctcctggcaactctcggtgccgtcccctgccctcgctcgaggcctcttctccccagcaccgctgtggtgtgccgggatcctgagcctaggcctcccgatgttcccacccgcatgatcccttcccgccacacgatgctccgttttcttccgttgtgaatgccgcgtcctgtcctggtgacaggagaacaatgttggtgaacgtcgcagcgggtgtccgagtgctccgtgtgcccctgagagcgggtgggagcggaagcctgagcggcctgcggcctccggcgatagtgtgctatctgccgctgcagcgcgcgtccgcgcggcctctgggctatttctggccaggccgcagcactgtggtcggtgcgggcgtggcaggggcggggcggccttatcgctcggctctcccgcctacgcctcccgctgcagagtaagccgggctgccgtcttctcgccatgggctccggtgagtctggagtccggtcgggcccccggctgctccctaggccgacccgggttgagaggagctctggtcgtttggctgcagctgggagagacttgggtcagacttagaggggacttccagccggcgtgcggggtggtcagggtggagaggctggcgggctaccgggacgccgggcatcaggggctggatggagccgggccggcagtctgggtactcagagatgtcgcccaggtgcccgccgaccgctcggcttactgcggcgcttcccttgcagggccgcgcggggcgctgagcttactgctcctgctgctggccccgccgagccgcccggccgcaggttgcccggcgccctgtagctgcgcggggacgctcgtggactgcgggcgccgcgggctgacttgggcctcgctgccgaccgccttccctgtcgacacaaccgagctggtgctgaccggcaacaacctgacggcgctgccgccggggctgctggacgcgctgcccgcgctgcgcaccgcacacctgggcgccaacccctggcgctgcgactgccgccttgtgccgctgcgcgcctggctggccggccgccccgagcgtgcgccctaccgcgacctgcgttgcgtggcgcccccagcgctgcgcggccgcctgctgccctatctggccgaggacgagctgcgcgccgcttgcgctcccggcccgctctgctggggggcgctggcggcgcagcttgcgctgctgggccttgggctgctgcacgcgttgctgctggtgctgctgctgtgccgcctgcggaggctgcgggcccgggcccgcgctcgcgccgcagcccggctgtcgctgaccgacccgctggtggccgagcgagccggaaccgacgagtcctgaggagagaaccggtgcgtcctgaggagagaaccggcgctgggcaacacgggcctgcaaactcgacaggaccctgcccgaggggccctcgcgccaacctggaccggtccccgcctcctccgctgcccaatctctcagacccaccccacctgcaggcccagaccacgtgggacagaactcctgcccaccctaccccgagggaggcgaacccgcacttccaggcttgggaggaccatggggcacaatgcggtccagaccctgctgcgtctcccttccaaactctggtgctgaataaacccttctgatctggtcttctctgcacgactgacctggaaattcccctcgccaaactcaggaaaaggccccaggaggcggttcaaggggacacaaacacatcctcacatgcccaccctaacctcaggggcagacaggagtcagtgggtgacctctccccttccagacacactcccaaaaggccacatgggaaggcatgagagagatgctaagtgataacgtgggggccagtgaggacgttgtggggacactgaggaccctgtgggggcagtgaggatgctgtggggatgctgtggggacagtaaggacactgggggcagtgaggacgctgtggacactgcggacgctntggggacaatgacgctgtggacagtgaggacgctgtgggggcggtgaggacactgtggagtgaggacactgggggcagtgaggacgctgtggacagtggggcgctgtgggggcggtgaggacgctgtaggggcngtgaggacgctgtggacggtgagaacgctgtggggacactgaggatgctgtgaggacgctgtgggggcagtgaggacgctgtggaccgtgaggacgctgtggggnnngngangacnctgtggncngtgaggacnctgtggangg

SEQ ID NO: 445382 - DNA, 3037 bp, Homo sapiens
gctcaccccgcagcccggcctcggcctccgccgcttgtcgtcgcgccccgcccgcgagcccgccccgcacgtcccccgccggcggccaccatgagcacaggcctgcggtacaagagcaagctggcgaccccagaggacaagcaggacattgacaagcagtacgtgggcttcgccacactgcccaaccaggtgcaccgcaagtcggtgaagaaaggctttgacttcacactcatggtggctggtgagtcaggcctggggaagtccacactggtccacagcctcttcctgacagacttgtacaaggaccggaagctgctcagtgctgaggagcgcatcagccagacggtagagattctaaaacacacggtggacattgaggagaagggagtcaagctgaagctcaccatcgtggacacgccgggattcggggacgctgtcaacaacaccgagtgctggaagcccatcaccgactatgtggaccagcagtttgagcagtacttccgtgatgagagcggcctcaaccgaaagaacatccaagacaaccgagtgcactgctgcctatacttcatctcccccttcgggcatgggctgcggccagtggatgtgggtttcatgaaggcattgcatgagaaggtcaacatcgtgcctctcatcgccaaagctgactgtcttgtccccagtgagatccggaagctgaaggagcggatccgggaggagattgacaagtttgggatccatgtataccagttccctgagtgtgactcggacgaggatgaggacttcaagcagcaggaccgggaactgaaggagagcgcgcccttcgccgttataggcagcaacacggtggtggaggccaaggggcagcgggtccggggccgactgtacccctgggggatcgtggaggtggagaaccaggcgcattgcgacttcgtgaagctgcgcaacatgctcatccgcacgcatatgcacgacctcaaggacgtgacgtgcgacgtgcactacgagaactaccgcgcgcactgcatccagcagatgaccagcaaactgacccaggacagccgcatggagagccccatcccgatcctgccgctgcccaccccggacgccgagactgagaagcttatcaggatgaaggatgaggaactgaggcgcatgcaggagatgctgcagaggatgaagcagcagatgcaggaccagtgacgctcgccgcggacacaccgtccgtctccgggacgccctcgcacccctggacaccagaccggactgttcccgacccggagacgcggggccacagcccccagctgaccctaatttattctcagcaccaccccctcccaggtcattgtgtctgtttccgaggggcctggaccgtagcccccgcccagctggccctctctgaccttgggggatcaggagcgaagttgggcgggacttcagagatccgcctcccttgcccttcccccgcccccggacggtcacagcacccaaaccgcaggccctgctctggcaggcaggcaaagctaggcagaagaggattcccaggatcctgggtctgttccctgccccagtgctgcagaacggacttgggactgtcgaggcgggccgagtcttcccttatccccagacgcctagcgggcagggttgggctgaatcaaatgggagccctccagacataaggaggccagaggctgcaaggagcggggtcgtgaccgcttacaccccttctccacaggagcctaggcctcccgatgttcccacccgcatgatcccttcccgccacacgatgctccgttttcttccgttgtgaatgccgcgtcctgtcctggtgacaggagaacaatgttggtgaacgtcgcagcgggtgtccgagtgctccgtgtgcccctgagagcgggtgggagcggaagcctgagcggcctgcggcctccggcgatagtgtgctatctgccgctgcagcgcgcgtccgcgcggcctctgggctatttctggccaggccgcagcactgtggtcggtgcgggcgtggcaggggcggggcggccttatcgctcggctctcccgcctacgcctcccgctgcagagtaagccgggctgccgtcttctcgccatgggctccgggccgcgcggggcgctgagcttactgctcctgctgctggccccgccgagccgcccggccgcaggttgcccggcgccctgtagctgcgcggggacgctcgtggactgcgggcgccgcgggctgacttgggcctcgctgccgaccgccttccctgtcgacacaaccgagctggtgctgaccggcaacaacctgacggcgctgccgccggggctgctggacgcgctgcccgcgctgcgcaccgcacacctgggcgccaacccctggcgctgcgactgccgccttgtgccgctgcgcgcctggctggccggccgccccgagcgtgcgccctaccgcgacctgcgttgcgtggcgcccccagcgctgcgcggccgcctgctgccctatctggccgaggacgagctgcgcgccgcttgcgctcccggcccgctctgctggggggcgctggcggcgcagcttgcgctgctgggccttgggctgctgcacgcgttgctgctggtgctgctgctgtgccgcctgcggaggctgcgggcccgggcccgcgctcgcgccgcagcccggctgtcgctgaccgacccgctggtggccgagcgagccggaaccgacgagtcctgaggagagaaccggtgcgtcctgaggagagaaccggcgctgggcaacacgggcctgcaaactcgacaggaccctgcccgaggggccctcgcgccaacctggaccggtccccgcctcctccgctgcccaatctctcagacccaccccacctgcaggcccagaccacgtgggacagaactcctgcccaccctaccccgagggaggcgaacccgcacttccaggcttgggaggaccatggggcacaatgcggtccagaccctgctgcgtctcccttccaaactctggtgctgaataaacccttctgatctggtcttc

SEQ ID NO: 445383 - DNA, 1317 bp, Homo sapiens
gctcaccccgcagcccggcctcggcctccgccgcttgtcgtcgcgccccgcccgcgagcccgccccgcacgtcccccgccggcggccaccatgagcacaggcctgcggtacaagagcaagctggcgaccccagaggacaagcaggacattgacaagcagtacgtgggcttcgccacactgcccaaccaggtgcaccgcaagtcggtgaagaaaggctttgacttcacactcatggtggctggtgagtcaggcctggggaagtccacactggtccacagcctcttcctgacagacttgtacaaggaccggaagctgctcagtgctgaggagcgcatcagccagacggtagagattctaaaacacacggtggacattgaggagaagggagtcaagctgaagctcaccatcgtggacacgccgggattcggggacgctgtcaacaacaccgagtgctggaagcccatcaccgactatgtggaccagcagtttgagcagtacttccgtgatgagagcggcctcaaccgaaagaacatccaagacaaccgagtgcactgctgcctatacttcatctcccccttcgggcatgggctgcggccagtggatgtgggtttcatgaaggcattgcatgagaaggtcaacatcgtgcctctcatcgccaaagctgactgtcttgtccccagtgagatccggaagctgaaggagcggatccgggaggagattgacaagtttgggatccatgtataccagttccctgagtgtgactcggacgaggatgaggacttcaagcagcaggaccgggaactgaaggagagcgcgcccttcgccgttataggcagcaacacggtggtggaggccaaggggcagcgggtccggggccgactgtacccctgggggatcgtggaggtggagaaccaggcgcattgcgacttcgtgaagctgcgcaacatgctcatccgcacgcatatgcacgacctcaaggacgtgacgtgcgacgtgcactacgagaactaccgcgcgcactgcatccagcagatgaccagcaaactgacccaggacagccgcatggagagccccatcccgatcctgccgctgcccaccccggacgccgagactgagaagcttatcaggatgaaggatgaggaactgaggcgcatgcaggagatgctgcagaggatgaagcagcagatgcaggaccagtgacgctcgccgcggacacaccgtccgtctccgggacgccctcgcacccctggacaccagaccctgctgcgtctcccttccaaactctggtgctgaataaacccttctgatctggtcttc

SEQ ID NO: 445384 - DNA, 1195 bp, Homo sapiens
gctcaccccgcagcccggcctcggcctccgccgcttgtcgtcgcgccccgcccgcgagcccgccccgcacgtcccccgccggcggccaccatgagcacaggcctgcggtacaagagcaagctggcgaccccagaggacaagcaggacattgacaagcagtacgtgggcttcgccacactgcccaaccaggtgcaccgcaagtcggtgaagaaaggctttgacttcacactcatggtggctggtgagtcaggcctggggaagtccacactggtccacagcctcttcctgacagacttgtacaaggaccggaagctgctcagtgctgaggagcgcatcagccagacggtagagattctaaaacacacggtggacattgaggagaagggagtcaagctgaagctcaccatcgtggacacgccgggattcggggacgctgtcaacaacaccgagtgctggaagcccatcaccgactatgtggaccagcagtttgagcagtacttccgtgatgagagcggcctcaaccgaaagaacatccaagacaaccgagtgcactgctgcctatacttcatctcccccttcgggcatgggctgcggccagtggatgtgggtttcatgaaggcattgcatgagaaggtcaacatcgtgcctctcatcgccaaagctgactgtcttgtccccagtgagatccggaagctgaaggagcggatccgggaggagattgacaagtttgggatccatgtataccagttccctgagtgtgactcggacgaggatgaggacttcaagcagcaggaccgggaactgaaggagagcgcgcccttcgccgttataggcagcaacacggtggtggaggccaaggggcagcgggtccggggccgactgtacccctgggggatcgtggaggtggagaaccaggcgcattgcgacttcgtgaagctgcgcaacatgctcatccgcacgcatatgcacgacctcaaggacgtgacgtgcgacgtgcactacgagaactaccgcgcgcactgcatccagcagatgaccaggtgcgcgccccagccgcgagccagacctcgcccctctggccccgcccacgtctccataactgagggccggtcctgtcagcccacccagacttgaactttgcaccattccctaagccccccccctcccccagagcctggtctccctagaaccaagt

SEQ ID NO: 445385 - DNA, 3494 bp, Homo sapiens
ctcttgggggcgggacgcgcggtggctaccgactcccggcccgccccggcccgcgtgcaggacccggtcgtcccctcctgctgtcctggagcccggactgaggccccgggggcgcggcagggctcccggtccacgcgagccatggcccgaccgcgcctcggctcagccctgccctccgcagccgctttcgggtggctccgcccgcggcccaatttccaggcgaccgtttcccggcgacggcgggcggggccgtctctgccgccccccgccgcgcgctccgcgggcgcctgcgacgccccgcctctggctcgggtgcgggagcggggcctgcccggactgcgacgccgccacagcttggggccagttcgcccagtcagggggatggctcggtcggcctcgggggtcgacgatcccccggaggacattgacaagcagtacgtgggcttcgccacactgcccaaccaggtgcaccgcaagtcggtgaagaaaggctttgacttcacactcatggtggctggtgagtcaggcctggggaagtccacactggtccacagcctcttcctgacagacttgtacaaggaccggaagctgctcagtgctgaggagcgcatcagccagacggtagagattctaaaacacacggtggacattgaggagaagggagtcaagctgaagctcaccatcgtggacacgccgggattcggggacgctgtcaacaacaccgagtgctggaagcccatcaccgactatgtggaccagcagtttgagcagtacttccgtgatgagagcggcctcaaccgaaagaacatccaagacaaccgagtgcactgctgcctatacttcatctcccccttcgggcatgggctgcggccagtggatgtgggtttcatgaaggcattgcatgagaaggtcaacatcgtgcctctcatcgccaaagctgactgtcttgtccccagtgagatccggaagctgaaggagcggatccgggaggagattgacaagtttgggatccatgtataccagttccctgagtgtgactcggacgaggatgaggacttcaagcagcaggaccgggaactgaaggagagcgcgcccttcgccgttataggcagcaacacggtggtggaggccaaggggcagcgggtccggggccgactgtacccctgggggatcgtggaggtggagaaccaggcgcattgcgacttcgtgaagctgcgcaacatgctcatccgcacgcatatgcacgacctcaaggacgtgacgtgcgacgtgcactacgagaactaccgcgcgcactgcatccagcagatgaccagcaaactgacccaggacagccgcatggagagccccatcccgatcctgccgctgcccaccccggacgccgagactgagaagcttatcaggatgaaggatgaggaactgaggcgcatgcaggagatgctgcagaggatgaagcagcagatgcaggaccagtgacgctcgccgcggacacaccgtccgtctccgggacgccctcgcacccctggacaccagaccggactgttcccgacccggagacgcggggccacagcccccagctgaccctaatttattctcagcaccaccccctcccaggtcattgtgtctgtttccgaggggcctggaccgtagcccccgcccagctggccctctctgaccttgggggatcaggagcgaagttgggcgggacttcagagatccgcctcccttgcccttcccccgcccccggacggtcacagcacccaaaccgcaggccctgctctggcaggcaggcaaagctaggcagaagaggattcccaggatcctgggtctgttccctgccccagtgctgcagaacggacttgggagccctcctttgcctgctcccgcgggtcacccagcgagtgctgagaccccattttctgtcgaggcgggccgagtcttcccttatccccagacgcctagcgggcagggttgggctgaatcaaatgggagccctccagacataaggaggccagaggctgcaaggagcggggtcgtgaccgcttacaccccttctccacagcccggcccgacctggagggcccccggggcactgggcggtgagccacctcctggcaactctcggtgccgtcccctgccctcgctcgaggcctcttctccccagcaccgctgtggtgtgccgggatcctgagcctaggcctcccgatgttcccacccgcatgatcccttcccgccacacgatgctccgttttcttccgttgtgaatgccgcgtcctgtcctggtgacaggagaacaatgttggtgaacgtcgcagcgggtgtccgagtgctccgtgtgcccctgagagcgggtgggagcggaagcctgagcggcctgcggcctccggcgatagtgtgctatctgccgctgcagcgcgcgtccgcgcggcctctgggctatttctggccaggccgcagcactgtggtcggtgcgggcgtggcaggggcggggcggccttatcgctcggctctcccgcctacgcctcccgctgcagagtaagccgggctgccgtcttctcgccatgggctccgggccgcgcggggcgctgagcttactgctcctgctgctggccccgccgagccgcccggccgcaggttgcccggcgccctgtagctgcgcggggacgctcgtggactgcgggcgccgcgggctgacttgggcctcgctgccgaccgccttccctgtcgacacaaccgagctggtgctgaccggcaacaacctgacggcgctgccgccggggctgctggacgcgctgcccgcgctgcgcaccgcacacctgggcgccaacccctggcgctgcgactgccgccttgtgccgctgcgcgcctggctggccggccgccccgagcgtgcgccctaccgcgacctgcgttgcgtggcgcccccagcgctgcgcggccgcctgctgccctatctggccgaggacgagctgcgcgccgcttgcgctcccggcccgctctgctggggggcgctggcggcgcagcttgcgctgctgggccttgggctgctgcacgcgttgctgctggtgctgctgctgtgccgcctgcggaggctgcgggcccgggcccgcgctcgcgccgcagcccggctgtcgctgaccgacccgctggtggccgagcgagccggaaccgacgagtcctgaggagagaaccggtgcgtcctgaggagagaaccggcgctgggcaacacgggcctgcaaactcgacaggaccctgcccgaggggccctcgcgccaacctggaccggtccccgcctcctccgctgcccaatctctcagacccaccccacctgcaggcccagaccacgtgggacagaactcctgcccaccctaccccgagggaggcgaacccgcacttccaggcttgggaggaccatggggcacaatgcggtccagaccctgctgcgtctcccttccaaactctggtgctgaataaacccttctgatctggtcttc

SEQ ID NO: 445386 - DNA, 4098 bp, Homo sapiens
  misc_feature (3820)..(3820): n is a, c, g, or t
  misc_feature (3954)..(3954): n is a, c, g, or t
  misc_feature (4059)..(4061): n is a, c, g, or t
  misc_feature (4063)..(4063): n is a, c, g, or t
  misc_feature (4066)..(4066): n is a, c, g, or t
  misc_feature (4070)..(4070): n is a, c, g, or t
  misc_feature (4077)..(4077): n is a, c, g, or t
  misc_feature (4079)..(4079): n is a, c, g, or t
  misc_feature (4088)..(4088): n is a, c, g, or t
  misc_feature (4096)..(4096): n is a, c, g, or t
gctcaccccgcagcccggcctcggcctccgccgcttgtcgtcgcgccccgcccgcgagcccgccccgcacgtcccccgccggcggccaccatgagcacaggcctgcggtacaagagcaagctggcgaccccagaggacaagcaggacattgacaagcagtacgtgggcttcgccacactgcccaaccaggtgcaccgcaagtcggtgaagaaaggctttgacttcacactcatggtggctggtgagtcaggcctggggaagtccacactggtccacagcctcttcctgacagacttgtacaaggaccggaagctgctcagtgctgaggagcgcatcagccagacggtagagattctaaaacacacggtggacattgaggagaagggagtcaagctgaagctcaccatcgtggacacgccgggattcggggacgctgtcaacaacaccgagtgctggaagcccatcaccgactatgtggaccagcagtttgagcagtacttccgtgatgagagcggcctcaaccgaaagaacatccaagacaaccgagtgcactgctgcctatacttcatctcccccttcgggcatgggctgcggccagtggatgtgggtttcatgaaggcattgcatgagaaggtcaacatcgtgcctctcatcgccaaagctgactgtcttgtccccagtgagatccggaagctgaaggagcggatccgggaggagattgacaagtttgggatccatgtataccagttccctgagtgtgactcggacgaggatgaggacttcaagcagcaggaccgggaactgaaggagagcgcgcccttcgccgttataggcagcaacacggtggtggaggccaaggggcagcgggtccggggccgactgtacccctgggggatcgtggaggtggagaaccaggcgcattgcgacttcgtgaagctgcgcaacatgctcatccgcacgcatatgcacgacctcaaggacgtgacgtgcgacgtgcactacgagaactaccgcgcgcactgcatccagcagatgaccagcaaactgacccaggacagccgcatggagagccccatcccgatcctgccgctgcccaccccggacgccgagactgagaagcttatcaggatgaaggatgaggaactgaggcgcatgcaggagatgctgcagaggatgaagcagcagatgcaggaccagtgacgctcgccgcggacacaccgtccgtctccgggacgccctcgcacccctggacaccagaccggactgttcccgacccggagacgcggggccacagcccccagctgaccctaatttattctcagcaccaccccctcccaggtcattgtgtctgtttccgaggggcctggaccgtagcccccgcccagctggccctctctgaccttgggggatcaggagcgaagttgggcgggacttcagagatccgcctcccttgcccttcccccgcccccggacggtcacagcacccaaaccgcaggccctgctctggcaggcaggcaaagctaggcagaagaggattcccaggatcctgggtctgttccctgccccagtgctgcagaacggacttgggagccctcctttgcctgctcccgcgggtcacccagcgagtgctgagaccccattttctgtcgaggcgggccgagtcttcccttatccccagacgcctagcgggcagggttgggctgaatcaaatgggagccctccagacataaggaggccagaggctgcaaggagcggggtcgtgaccgcttacaccccttctccacagcccggcccgacctggagggcccccggggcactgggcggtgagccacctcctggcaactctcggtgccgtcccctgccctcgctcgaggcctcttctccccagcaccgctgtggtgtgccgggatcctgagcctaggcctcccgatgttcccacccgcatgatcccttcccgccacacgatgctccgttttcttccgttgtgaatgccgcgtcctgtcctggtgacaggagaacaatgttggtgaacgtcgcagcgggtgtccgagtgctccgtgtgcccctgagagcgggtgggagcggaagcctgagcggcctgcggcctccggcgatagtgtgctatctgccgctgcagcgcgcgtccgcgcggcctctgggctatttctggccaggccgcagcactgtggtcggtgcgggcgtggcaggggcggggcggccttatcgctcggctctcccgcctacgcctcccgctgcagagtaagccgggctgccgtcttctcgccatgggctccggtgagtctggagtccggtcgggcccccggctgctccctaggccgacccgggttgagaggagctctggtcgtttggctgcagctgggagagacttgggtcagacttagaggggacttccagccggcgtgcggggtggtcagggtggagaggctggcgggctaccgggacgccgggcatcaggggctggatggagccgggccggcagtctgggtactcagagatgtcgcccaggtgcccgccgaccgctcggcttactgcggcgcttcccttgcagggccgcgcggggcgctgagcttactgctcctgctgctggccccgccgagccgcccggccgcaggttgcccggcgccctgtagctgcgcggggacgctcgtggactgcgggcgccgcgggctgacttgggcctcgctgccgaccgccttccctgtcgacacaaccgagctggtgctgaccggcaacaacctgacggcgctgccgccggggctgctggacgcgctgcccgcgctgcgcaccgcacacctgggcgccaacccctggcgctgcgactgccgccttgtgccgctgcgcgcctggctggccggccgccccgagcgtgcgccctaccgcgacctgcgttgcgtggcgcccccagcgctgcgcggccgcctgctgccctatctggccgaggacgagctgcgcgccgcttgcgctcccggcccgctctgctggggggcgctggcggcgcagcttgcgctgctgggccttgggctgctgcacgcgttgctgctggtgctgctgctgtgccgcctgcggaggctgcgggcccgggcccgcgctcgcgccgcagcccggctgtcgctgaccgacccgctggtggccgagcgagccggaaccgacgagtcctgaggagagaaccggtgcgtcctgaggagagaaccggcgctgggcaacacgggcctgcaaactcgacaggaccctgcccgaggggccctcgcgccaacctggaccggtccccgcctcctccgctgcccaatctctcagacccaccccacctgcaggcccagaccacgtgggacagaactcctgcccaccctaccccgagggaggcgaacccgcacttccaggcttgggaggaccatggggcacaatgcggtccagaccctgctgcgtctcccttccaaactctggtgctgaataaacccttctgatctggtcttctctgcacgactgacctggaaattcccctcgccaaactcaggaaaaggccccaggaggcggttcaaggggacacaaacacatcctcacatgcccaccctaacctcaggggcagacaggagtcagtgggtgacctctccccttccagacacactcccaaaaggccacatgggaaggcatgagagagatgctaagtgataacgtgggggccagtgaggacgttgtggggacactgaggaccctgtgggggcagtgaggatgctgtggggatgctgtggggacagtaaggacactgggggcagtgaggacgctgtggacactgcggacgctntggggacaatgacgctgtggacagtgaggacgctgtgggggcggtgaggacactgtggagtgaggacactgggggcagtgaggacgctgtggacagtggggcgctgtgggggcggtgaggacgctgtaggggcngtgaggacgctgtggacggtgagaacgctgtggggacactgaggatgctgtgaggacgctgtgggggcagtgaggacgctgtggaccgtgaggacgctgtggggnnngngangacnctgtggncngtgaggacnctgtggangg

SEQ ID NO: 445387 - DNA, 2996 bp, Homo sapiens
gctcaccccgcagcccggcctcggcctccgccgcttgtcgtcgcgccccgcccgcgagcccgccccgcacgtcccccgccggcggccaccatgagcacaggcctgcggtacaagagcaagctggcgaccccagaggacaagcaggacattgacaagcagtacgtgggcttcgccacactgcccaaccaggtgcaccgcaagtcggtgaagaaaggctttgacttcacactcatggtggctggtgagtcaggcctggggaagtccacactggtccacagcctcttcctgacagacttgtacaaggaccggaagctgctcagtgctgaggagcgcatcagccagacggtagagattctaaaacacacggtggacattgaggagaagggagtcaagctgaagctcaccatcgtggacacgccgggattcggggacgctgtcaacaacaccgagtgctggaagcccatcaccgactatgtggaccagcagtttgagcagtacttccgtgatgagagcggcctcaaccgaaagaacatccaagacaaccgagtgcactgctgcctatacttcatctcccccttcgggcatgggctgcggccagtggatgtgggtttcatgaaggcattgcatgagaaggtcaacatcgtgcctctcatcgccaaagctgactgtcttgtccccagtgagatccggaagctgaaggagcggatccgggaggagattgacaagtttgggatccatgtataccagttccctgagtgtgactcggacgaggatgaggacttcaagcagcaggaccgggaactgaaggagagcgcgcccttcgccgttataggcagcaacacggtggtggaggccaaggggcagcgggtccggggccgactgtacccctgggggatcgtggaggtggagaaccaggcgcattgcgacttcgtgaagctgcgcaacatgctcatccgcacgcatatgcacgacctcaaggacgtgacgtgcgacgtgcactacgagaactaccgcgcgcactgcatccagcagatgaccagcaaactgacccaggacagccgcatggagagccccatcccgatcctgccgctgcccaccccggacgccgagactgagaagcttatcaggatgaaggatgaggaactgaggcgcatgcaggagatgctgcagaggatgaagcagcagatgcaggaccagtgacgctcgccgcggacacaccgtccgtctccgggacgccctcgcacccctggacaccagaccggactgttcccgacccggagacgcggggccacagcccccagctgaccctaatttattctcagcaccaccccctcccaggtcattgtgtctgtttccgaggggcctggaccgtagcccccgcccagctggccctctctgaccttgggggatcaggagcgaagttgggcgggacttcagagatccgcctcccttgcccttcccccgcccccggacggtcacagcacccaaaccgcaggccctgctctggcaggcaggcaaagctaggcagaagaggattcccaggatcctgggtctgttccctgccccagtgctgcagaacggacttgggagccctcctttgcctgctcccgcgggtcacccagcgagtgctgagaccccattttctgtcgaggcgggccgagtcttcccttatccccagacgcctagcgggcagggttgggctgaatcaaatgggagccctccagacataaggaggccagaggctgcaaggagcggggtcgtgaccgcttacaccccttctccacagcccggcccgacctggagggcccccggggcactgggcggtgagccacctcctggcaactctcggtgccgtcccctgccctcgctcgaggcctcttctccccagcaccgctgtggtgtgccgggatcctgagcctaggcctcccgatgttcccacccgcatgatcccttcccgccacacgatgctccgttttcttccgttgtgaatgccgcgtcctgtcctggtgacaggagaacaatgttggtgaacgtcgcagcgggtgtccgagtgctccgtgtgcccctgagagcgggtgggagcggaagcctgagcggcctgcggcctccggcgatagtgtgctatctgccgctgcagcgcgcgtccgcgcggcctctgggctatttctggccaggccgcagcactgtggtcggtgcgggcgtggcaggggcggggcggccttatcgctcggctctcccgcctacgcctcccgctgcagagtaagccgggctgccgtcttctcgccatgggctccggtgagtctggagtccggtcgggcccccggctgctccctaggccgacccgggttgagaggagctctggtcgtttggctgcagctgggagagacttgggtcagacttagaggggacttccagccggcgtgcggggtggtcagggtggagaggctggcgggctaccgggacgccgggcatcaggggctggatggagccgggccggcagtctgggtactcagagatgtcgcccaggtgcccgccgaccgctcggcttactgcggcgcttcccttgcagggccgcgcggggcgctgagcttactgctcctgctgctggccccgccgagccgcccggccgcaggttgcccggcgccctgtagctgcgcggggacgctcgtggactgcgggcgccgcgggctgacttgggcctcgctgccgaccgccttccctgtcgacacaaccgagctggtgctgaccggcaacaacctgacggcgctgccgccggggctgctggacgcgctgcccgcgctgcgcaccgcacacctgggcgccaacccctggcgctgcgactgccgccttgtgcgtggcgctggtggcggcgccgagcgtggctacggactggttggtgggcccggctggggcgctggtgctattggcgggaagtggcgcctggcccgccccggggggggcggggctttcgtggcttgtggctttttgttgttgcc

SEQ ID NO: 445388 - DNA, 4127 bp, Homo sapiens
  misc_feature (3849)..(3849): n is a, c, g, or t
  misc_feature (3983)..(3983): n is a, c, g, or t
  misc_feature (4088)..(4090): n is a, c, g, or t
  misc_feature (4092)..(4092): n is a, c, g, or t
  misc_feature (4095)..(4095): n is a, c, g, or t
  misc_feature (4099)..(4099): n is a, c, g, or t
  misc_feature (4106)..(4106): n is a, c, g, or t
  misc_feature (4108)..(4108): n is a, c, g, or t
  misc_feature (4117)..(4117): n is a, c, g, or t
  misc_feature (4125)..(4125): n is a, c, g, or t
gctcaccccgcagcccggcctcggcctccgccgcttgtcgtcgcgccccgcccgcgagcccgccccgcacgtcccccgccggcggccaccatgagcacaggcctgcggtacaagagcaagctggcgaccccagaggacaagcaggacattgacaagcagtacgtgggcttcgccacactgcccaaccaggtgcaccgcaagtcggtgaagaaaggctttgacttcacactcatggtggctggtgagtcaggcctggggaagtccacactggtccacagcctcttcctgacagacttgtacaaggaccggaagctgctcagtgctgaggagcgcatcagccagacggtagagattctaaaacacacggtggacattgaggagaagggagtcaagctgaagctcaccatcgtggacacgccgggattcggggacgctgtcaacaacaccgagtgctggaagcccatcaccgactatgtggaccagcagtttgagcagtacttccgtgatgagagcggcctcaaccgaaagaacatccaagacaaccgagtgcactgctgcctatacttcatctcccccttcgggcatgggctgcggccagtggatgtgggtttcatgaaggcattgcatgagaaggtcaacatcgtgcctctcatcgccaaagctgactgtcttgtccccagtgagatccggaagctgaaggagcggatccgggaggagattgacaagtttgggatccatgtataccagttccctgagtgtgactcggacgaggatgaggacttcaagcagcaggaccgggaactgaaggtgtgagcctttctccctccttcccccaggagagcgcgcccttcgccgttataggcagcaacacggtggtggaggccaaggggcagcgggtccggggccgactgtacccctgggggatcgtggaggtggagaaccaggcgcattgcgacttcgtgaagctgcgcaacatgctcatccgcacgcatatgcacgacctcaaggacgtgacgtgcgacgtgcactacgagaactaccgcgcgcactgcatccagcagatgaccagcaaactgacccaggacagccgcatggagagccccatcccgatcctgccgctgcccaccccggacgccgagactgagaagcttatcaggatgaaggatgaggaactgaggcgcatgcaggagatgctgcagaggatgaagcagcagatgcaggaccagtgacgctcgccgcggacacaccgtccgtctccgggacgccctcgcacccctggacaccagaccggactgttcccgacccggagacgcggggccacagcccccagctgaccctaatttattctcagcaccaccccctcccaggtcattgtgtctgtttccgaggggcctggaccgtagcccccgcccagctggccctctctgaccttgggggatcaggagcgaagttgggcgggacttcagagatccgcctcccttgcccttcccccgcccccggacggtcacagcacccaaaccgcaggccctgctctggcaggcaggcaaagctaggcagaagaggattcccaggatcctgggtctgttccctgccccagtgctgcagaacggacttgggagccctcctttgcctgctcccgcgggtcacccagcgagtgctgagaccccattttctgtcgaggcgggccgagtcttcccttatccccagacgcctagcgggcagggttgggctgaatcaaatgggagccctccagacataaggaggccagaggctgcaaggagcggggtcgtgaccgcttacaccccttctccacagcccggcccgacctggagggcccccggggcactgggcggtgagccacctcctggcaactctcggtgccgtcccctgccctcgctcgaggcctcttctccccagcaccgctgtggtgtgccgggatcctgagcctaggcctcccgatgttcccacccgcatgatcccttcccgccacacgatgctccgttttcttccgttgtgaatgccgcgtcctgtcctggtgacaggagaacaatgttggtgaacgtcgcagcgggtgtccgagtgctccgtgtgcccctgagagcgggtgggagcggaagcctgagcggcctgcggcctccggcgatagtgtgctatctgccgctgcagcgcgcgtccgcgcggcctctgggctatttctggccaggccgcagcactgtggtcggtgcgggcgtggcaggggcggggcggccttatcgctcggctctcccgcctacgcctcccgctgcagagtaagccgggctgccgtcttctcgccatgggctccggtgagtctggagtccggtcgggcccccggctgctccctaggccgacccgggttgagaggagctctggtcgtttggctgcagctgggagagacttgggtcagacttagaggggacttccagccggcgtgcggggtggtcagggtggagaggctggcgggctaccgggacgccgggcatcaggggctggatggagccgggccggcagtctgggtactcagagatgtcgcccaggtgcccgccgaccgctcggcttactgcggcgcttcccttgcagggccgcgcggggcgctgagcttactgctcctgctgctggccccgccgagccgcccggccgcaggttgcccggcgccctgtagctgcgcggggacgctcgtggactgcgggcgccgcgggctgacttgggcctcgctgccgaccgccttccctgtcgacacaaccgagctggtgctgaccggcaacaacctgacggcgctgccgccggggctgctggacgcgctgcccgcgctgcgcaccgcacacctgggcgccaacccctggcgctgcgactgccgccttgtgccgctgcgcgcctggctggccggccgccccgagcgtgcgccctaccgcgacctgcgttgcgtggcgcccccagcgctgcgcggccgcctgctgccctatctggccgaggacgagctgcgcgccgcttgcgctcccggcccgctctgctggggggcgctggcggcgcagcttgcgctgctgggccttgggctgctgcacgcgttgctgctggtgctgctgctgtgccgcctgcggaggctgcgggcccgggcccgcgctcgcgccgcagcccggctgtcgctgaccgacccgctggtggccgagcgagccggaaccgacgagtcctgaggagagaaccggtgcgtcctgaggagagaaccggcgctgggcaacacgggcctgcaaactcgacaggaccctgcccgaggggccctcgcgccaacctggaccggtccccgcctcctccgctgcccaatctctcagacccaccccacctgcaggcccagaccacgtgggacagaactcctgcccaccctaccccgagggaggcgaacccgcacttccaggcttgggaggaccatggggcacaatgcggtccagaccctgctgcgtctcccttccaaactctggtgctgaataaacccttctgatctggtcttctctgcacgactgacctggaaattcccctcgccaaactcaggaaaaggccccaggaggcggttcaaggggacacaaacacatcctcacatgcccaccctaacctcaggggcagacaggagtcagtgggtgacctctccccttccagacacactcccaaaaggccacatgggaaggcatgagagagatgctaagtgataacgtgggggccagtgaggacgttgtggggacactgaggaccctgtgggggcagtgaggatgctgtggggatgctgtggggacagtaaggacactgggggcagtgaggacgctgtggacactgcggacgctntggggacaatgacgctgtggacagtgaggacgctgtgggggcggtgaggacactgtggagtgaggacactgggggcagtgaggacgctgtggacagtggggcgctgtgggggcggtgaggacgctgtaggggcngtgaggacgctgtggacggtgagaacgctgtggggacactgaggatgctgtgaggacgctgtgggggcagtgaggacgctgtggaccgtgaggacgctgtggggnnngngangacnctgtggncngtgaggacnctgtggangg

SEQ ID NO: 445389 - DNA, 4528 bp, Homo sapiens
  misc_feature (4250)..(4250): n is a, c, g, or t
  misc_feature (4384)..(4384): n is a, c, g, or t
  misc_feature (4489)..(4491): n is a, c, g, or t
  misc_feature (4493)..(4493): n is a, c, g, or t
  misc_feature (4496)..(4496): n is a, c, g, or t
  misc_feature (4500)..(4500): n is a, c, g, or t
  misc_feature (4507)..(4507): n is a, c, g, or t
  misc_feature (4509)..(4509): n is a, c, g, or t
  misc_feature (4518)..(4518): n is a, c, g, or t
  misc_feature (4526)..(4526): n is a, c, g, or t
ctcttgggggcgggacgcgcggtggctaccgactcccggcccgccccggcccgcgtgcaggacccggtcgtcccctcctgctgtcctggagcccggactgaggccccgggggcgcggcagggctcccggtccacgcgagccatggcccgaccgcgcctcggctcagccctgccctccgcagccgctttcgggtggctccgcccgcggcccaatttccaggcgaccgtttcccggcgacggcgggcggggccgtctctgccgccccccgccgcgcgctccgcgggcgcctgcgacgccccgcctctggctcgggtgcgggagcggggcctgcccggactgcgacgccgccacagcttggggccagttcgcccagtcagggggatggctcggtcggcctcgggggtcgacgatcccccgggtaggcgacgtgccctgtccaggcctcacttcccgcgtccgcaaaacggggtggacaacgcagcctaaggcagagccgcgccaaggtccctcgctgtcgccgggctctggcggcctgaccgggcctggggtccgagcgtgcccccgggcctgggggggtcgccgcgatggactcgctggcagcgccccaggaccgcctggtggagcagctgctgtcgccgcggacccaggcccagaggcggctcaagaggacattgacaagcagtacgtgggcttcgccacactgcccaaccaggtgcaccgcaagtcggtgaagaaaggctttgacttcacactcatggtggctggtgagtcaggcctggggaagtccacactggtccacagcctcttcctgacagacttgtacaaggaccggaagctgctcagtgctgaggagcgcatcagccagacggtagagattctaaaacacacggtggacattgaggagaagggagtcaagctgaagctcaccatcgtggacacgccgggattcggggacgctgtcaacaacaccgagtgctggaagcccatcaccgactatgtggaccagcagtttgagcagtacttccgtgatgagagcggcctcaaccgaaagaacatccaagacaaccgagtgcactgctgcctatacttcatctcccccttcgggcatggtgagatccggaagctgaaggagcggatccgggaggagattgacaagtttgggatccatgtataccagttccctgagtgtgactcggacgaggatgaggacttcaagcagcaggaccgggaactgaaggagagcgcgcccttcgccgttataggcagcaacacggtggtggaggccaaggggcagcgggtccggggccgactgtacccctgggggatcgtggaggtggagaaccaggcgcattgcgacttcgtgaagctgcgcaacatgctcatccgcacgcatatgcacgacctcaaggacgtgacgtgcgacgtgcactacgagaactaccgcgcgcactgcatccagcagatgaccagcaaactgacccaggacagccgcatggagagccccatcccgatcctgccgctgcccaccccggacgccgagactgagaagcttatcaggatgaaggatgaggaactgaggcgcatgcaggagatgctgcagaggatgaagcagcagatgcaggaccagtgacgctcgccgcggacacaccgtccgtctccgggacgccctcgcacccctggacaccagaccggactgttcccgacccggagacgcggggccacagcccccagctgaccctaatttattctcagcaccaccccctcccaggtcattgtgtctgtttccgaggggcctggaccgtagcccccgcccagctggccctctctgaccttgggggatcaggagcgaagttgggcgggacttcagagatccgcctcccttgcccttcccccgcccccggacggtcacagcacccaaaccgcaggccctgctctggcaggcaggcaaagctaggcagaagaggattcccaggatcctgggtctgttccctgccccagtgctgcagaacggacttgggagccctcctttgcctgctcccgcgggtcacccagcgagtgctgagaccccattttctgtcgaggcgggccgagtcttcccttatccccagacgcctagcgggcagggttgggctgaatcaaatgggagccctccagacataaggaggccagaggctgcaaggagcggggtcgtgaccgcttacaccccttctccacagcccggcccgacctggagggcccccggggcactgggcggtgagccacctcctggcaactctcggtgccgtcccctgccctcgctcgaggcctcttctccccagcaccgctgtggtgtgccgggatcctgagcctaggcctcccgatgttcccacccgcatgatcccttcccgccacacgatgctccgttttcttccgttgtgaatgccgcgtcctgtcctggtgacaggagaacaatgttggtgaacgtcgcagcgggtgtccgagtgctccgtgtgcccctgagagcgggtgggagcggaagcctgagcggcctgcggcctccggcgatagtgtgctatctgccgctgcagcgcgcgtccgcgcggcctctgggctatttctggccaggccgcagcactgtggtcggtgcgggcgtggcaggggcggggcggccttatcgctcggctctcccgcctacgcctcccgctgcagagtaagccgggctgccgtcttctcgccatgggctccggtgagtctggagtccggtcgggcccccggctgctccctaggccgacccgggttgagaggagctctggtcgtttggctgcagctgggagagacttgggtcagacttagaggggacttccagccggcgtgcggggtggtcagggtggagaggctggcgggctaccgggacgccgggcatcaggggctggatggagccgggccggcagtctgggtactcagagatgtcgcccaggtgcccgccgaccgctcggcttactgcggcgcttcccttgcagggccgcgcggggcgctgagcttactgctcctgctgctggccccgccgagccgcccggccgcaggttgcccggcgccctgtagctgcgcggggacgctcgtggactgcgggcgccgcgggctgacttgggcctcgctgccgaccgccttccctgtcgacacaaccgagctggtgctgaccggcaacaacctgacggcgctgccgccggggctgctggacgcgctgcccgcgctgcgcaccgcacacctgggcgccaacccctggcgctgcgactgccgccttgtgccgctgcgcgcctggctggccggccgccccgagcgtgcgccctaccgcgacctgcgttgcgtggcgcccccagcgctgcgcggccgcctgctgccctatctggccgaggacgagctgcgcgccgcttgcgctcccggcccgctctgctggggggcgctggcggcgcagcttgcgctgctgggccttgggctgctgcacgcgttgctgctggtgctgctgctgtgccgcctgcggaggctgcgggcccgggcccgcgctcgcgccgcagcccggctgtcgctgaccgacccgctggtggccgagcgagccggaaccgacgagtcctgaggagagaaccggtgcgtcctgaggagagaaccggcgctgggcaacacgggcctgcaaactcgacaggaccctgcccgaggggccctcgcgccaacctggaccggtccccgcctcctccgctgcccaatctctcagacccaccccacctgcaggcccagaccacgtgggacagaactcctgcccaccctaccccgagggaggcgaacccgcacttccaggcttgggaggaccatggggcacaatgcggtccagaccctgctgcgtctcccttccaaactctggtgctgaataaacccttctgatctggtcttctctgcacgactgacctggaaattcccctcgccaaactcaggaaaaggccccaggaggcggttcaaggggacacaaacacatcctcacatgcccaccctaacctcaggggcagacaggagtcagtgggtgacctctccccttccagacacactcccaaaaggccacatgggaaggcatgagagagatgctaagtgataacgtgggggccagtgaggacgttgtggggacactgaggaccctgtgggggcagtgaggatgctgtggggatgctgtggggacagtaaggacactgggggcagtgaggacgctgtggacactgcggacgctntggggacaatgacgctgtggacagtgaggacgctgtgggggcggtgaggacactgtggagtgaggacactgggggcagtgaggacgctgtggacagtggggcgctgtgggggcggtgaggacgctgtaggggcngtgaggacgctgtggacggtgagaacgctgtggggacactgaggatgctgtgaggacgctgtgggggcagtgaggacgctgtggaccgtgaggacgctgtggggnnngngangacnctgtggncngtgaggacnctgtggangg

SEQ ID NO: 445390 - DNA, 3271 bp, Homo sapiens
  misc_feature (2993)..(2993): n is a, c, g, or t
  misc_feature (3127)..(3127): n is a, c, g, or t
  misc_feature (3232)..(3234): n is a, c, g, or t
  misc_feature (3236)..(3236): n is a, c, g, or t
  misc_feature (3239)..(3239): n is a, c, g, or t
  misc_feature (3243)..(3243): n is a, c, g, or t
  misc_feature (3250)..(3250): n is a, c, g, or t
  misc_feature (3252)..(3252): n is a, c, g, or t
  misc_feature (3261)..(3261): n is a, c, g, or t
  misc_feature (3269)..(3269): n is a, c, g, or t
ggttctcctgtacaaaacatcgtgggaatcttgtgtcgagggttgcttttacccaaagtagtggaagatcgtggaggtggagaaccaggcgcattgcgacttcgtgaagctgcgcaacatgctcatccgcacgcatatgcacgacctcaaggacgtgacgtgcgacgtgcactacgagaactaccgcgcgcactgcatccagcagatgaccagcaaactgacccaggacagccgcatggagagccccatcccgatcctgccgctgcccaccccggacgccgagactgagaagcttatcaggatgaaggatgaggaactgaggcgcatgcaggagatgctgcagaggatgaagcagcagatgcaggaccagtgacgctcgccgcggacacaccgtccgtctccgggacgccctcgcacccctggacaccagaccggactgttcccgacccggagacgcggggccacagcccccagctgaccctaatttattctcagcaccaccccctcccaggtcattgtgtctgtttccgaggggcctggaccgtagcccccgcccagctggccctctctgaccttgggggatcaggagcgaagttgggcgggacttcagagatccgcctcccttgcccttcccccgcccccggacggtcacagcacccaaaccgcaggccctgctctggcaggcaggcaaagctaggcagaagaggattcccaggatcctgggtctgttccctgccccagtgctgcagaacggacttgggagccctcctttgcctgctcccgcgggtcacccagcgagtgctgagaccccattttctgtcgaggcgggccgagtcttcccttatccccagacgcctagcgggcagggttgggctgaatcaaatgggagccctccagacataaggaggccagaggctgcaaggagcggggtcgtgaccgcttacaccccttctccacagcccggcccgacctggagggcccccggggcactgggcggtgagccacctcctggcaactctcggtgccgtcccctgccctcgctcgaggcctcttctccccagcaccgctgtggtgtgccgggatcctgagcctaggcctcccgatgttcccacccgcatgatcccttcccgccacacgatgctccgttttcttccgttgtgaatgccgcgtcctgtcctggtgacaggagaacaatgttggtgaacgtcgcagcgggtgtccgagtgctccgtgtgcccctgagagcgggtgggagcggaagcctgagcggcctgcggcctccggcgatagtgtgctatctgccgctgcagcgcgcgtccgcgcggcctctgggctatttctggccaggccgcagcactgtggtcggtgcgggcgtggcaggggcggggcggccttatcgctcggctctcccgcctacgcctcccgctgcagagtaagccgggctgccgtcttctcgccatgggctccggtgagtctggagtccggtcgggcccccggctgctccctaggccgacccgggttgagaggagctctggtcgtttggctgcagctgggagagacttgggtcagacttagaggggacttccagccggcgtgcggggtggtcagggtggagaggctggcgggctaccgggacgccgggcatcaggggctggatggagccgggccggcagtctgggtactcagagatgtcgcccaggtgcccgccgaccgctcggcttactgcggcgcttcccttgcagggccgcgcggggcgctgagcttactgctcctgctgctggccccgccgagccgcccggccgcaggttgcccggcgccctgtagctgcgcggggacgctcgtggactgcgggcgccgcgggctgacttgggcctcgctgccgaccgccttccctgtcgacacaaccgagctggtgctgaccggcaacaacctgacggcgctgccgccggggctgctggacgcgctgcccgcgctgcgcaccgcacacctgggcgccaacccctggcgctgcgactgccgccttgtgccgctgcgcgcctggctggccggccgccccgagcgtgcgccctaccgcgacctgcgttgcgtggcgcccccagcgctgcgcggccgcctgctgccctatctggccgaggacgagctgcgcgccgcttgcgctcccggcccgctctgctggggggcgctggcggcgcagcttgcgctgctgggccttgggctgctgcacgcgttgctgctggtgctgctgctgtgccgcctgcggaggctgcgggcccgggcccgcgctcgcgccgcagcccggctgtcgctgaccgacccgctggtggccgagcgagccggaaccgacgagtcctgaggagagaaccggtgcgtcctgaggagagaaccggcgctgggcaacacgggcctgcaaactcgacaggaccctgcccgaggggccctcgcgccaacctggaccggtccccgcctcctccgctgcccaatctctcagacccaccccacctgcaggcccagaccacgtgggacagaactcctgcccaccctaccccgagggaggcgaacccgcacttccaggcttgggaggaccatggggcacaatgcggtccagaccctgctgcgtctcccttccaaactctggtgctgaataaacccttctgatctggtcttctctgcacgactgacctggaaattcccctcgccaaactcaggaaaaggccccaggaggcggttcaaggggacacaaacacatcctcacatgcccaccctaacctcaggggcagacaggagtcagtgggtgacctctccccttccagacacactcccaaaaggccacatgggaaggcatgagagagatgctaagtgataacgtgggggccagtgaggacgttgtggggacactgaggaccctgtgggggcagtgaggatgctgtggggatgctgtggggacagtaaggacactgggggcagtgaggacgctgtggacactgcggacgctntggggacaatgacgctgtggacagtgaggacgctgtgggggcggtgaggacactgtggagtgaggacactgggggcagtgaggacgctgtggacagtggggcgctgtgggggcggtgaggacgctgtaggggcngtgaggacgctgtggacggtgagaacgctgtggggacactgaggatgctgtgaggacgctgtgggggcagtgaggacgctgtggaccgtgaggacgctgtggggnnngngangacnctgtggncngtgaggacnctgtggangg

SEQ ID NO: 445391 - DNA, 874 bp, Homo sapiens
gccgccgggaggttttcgggcaagtctgcgagaagacggcgggccctgaactgggcgggtacccgcgctgttgcgcgtgggtcccgggagcggcctccggcgccctctggcgggcggaagccgcgcagcacctcttgggggcgggacgcgcggtggctaccgactcccggcccgccccggcccgcgtgcaggacccggtcgtcccctcctgctgtcctggagcccggactgaggccccgggggcgcggcagggctcccggtccacgcgagccatggcccgaccgcgcctcggctcagccctgccctccgcagccgctttcgggtggctccgcccgcggcccaatttccaggcgaccgtttcccggcgacggcgggcggggccgtctctgccgccccccgccgcgcgctccgcgggcgcctgcgacgccccgcctctggctcgggtgcgggagcggggcctgcccggactgcgacgccgccacagcttggggccagttcgcccagtcagggggatggctcggtcggcctcgggggtcgacgatcccccgggtaggcgacgtgccctgtccaggcctcacttcccgcgtccgcaaaacggggtggacaacgcagcctaaggcagagccgcgccaaggtccctcgctgtcgccgggctctggcggcctgaccgggcctggggtccgagcgtgcccccgggcctgggggggtcgccgcgatggactcgctggcagcgccccaggaccgcctggtggagcagctgctgtcgccgcggacccaggcccagaggcggctcaaggtgcgtgtgtggagagggcggaacgtgggtctgtgaccccgcgggctccgggactcggcatggggtccccgtccccgc

SEQ ID NO: 445392 - DNA, 1804 bp, Homo sapiens
ctggcctactggagtgggaggaccctgcctcggggacttagggaggaaggaaggacgaggccggacaccccggcgcgcacacacacctgctgtccaggtaagcctcagccggtgctgcaggcagtctgactcgcagtccctcaagtgacttccaaggagcatctgtagaaaagaagatggcccaggtcctgcacgtgcctgctcccttcccagggacccctggcccagcctccccacctgccttccctgccaaggaccccgatccaccctactccgtggagaccccctatggctaccgcctggacctggacttcctcaagtacgtggatgacatcgagaagggccacacgctgcgacgcgtggcagtgcagcgccgcccccgcctgagctcgctgccccgtggccctggctcctggtggacgtccactgagtcgctgtgctccaatgccagtggggacagccgccactcagcctattcctactgcggccgtggcttctaccctcagtatggtgctctggagacccgcggtggcttcaatccgcgggtggagcgcacgctgctggatgcccgtcgccgtctcgaggaccaggcggccacacccaccggcctgggctccctgacccccagtgcggccggctcgacagcctccctggtgggcgtggggttgccacccccgacaccacggagttcaggactgtccacaccggtgcctcccagtgccgggcacctggcccacgtgcgggagcagatggcgggtgccctgcggaagctgcggcagctggaggagcaggtgaagctgatccctgtgctccaggtgaagctctcggtgctccaggaggaaaagcggcagctcacagtacaacttaagagccagaagttcctgggccaccccacagcgggccggggtcgcagcgagctctgcctggacctccccgatcccccagaggacccagtggcactggagacccggagtgtgggcacctgggttcgagaacgggacttgggcatgcctgatggggaggctgccctcgccgccaaggtcgctgtgctggagacccagctcaagaaggcgctgcaggagctgcaggcagctcaggcccggcaggctgacccccagccccaggcctggccaccgccggacagcccggtccgcgtggatacagtccgggtggtagaagggccacgggaggtggaggtggtggccagcacagccgctggcgcccccgcacagcgggcccagagcctggagccttacggcacagggctgagggccctggcaatgcctggtaggcctgagagcccacctgtgttccgcagccaggaggtggtggagacaatgtgcccagtgcccgctgcagctaccagcaacgtccatatggtgaagaagattagcatcacagagcgaagctgcgatggagcagcaggtaagcggtcgcaggcaggcaggggagaatggcttgggggggggggggcctctttcttcccatggctcatcctggactctcagaacgccagggtccaggcagggtgcggtggcgcatgcctgtaatcccagcactttgggaggccgaggcgggcagatcacttgaggtcaggagttggagaccagcctggccaacatggtgaaacccatctctactaaaaatacaaaaattagccaggtgtggtggcgtgcgcctgtaaacctcagctacccaggaggctgaggcaggagaatcgcttgaactagggaagcggaggttgcagtgagctgagattacaccactgcactccagcctgggcaacagagggagactctgtctc

SEQ ID NO: 445393 - DNA, 5730 bp, Homo sapiens
ctttctcttccccttactcgggacgtgctggtcctcatcgagggcggtgagatgactgaggaccctcagacctcagtctccgtatctgggaaacgggtagagatatctgatgtggagtctgagggtggtggcttggtgggcagtggggggatccaccaggcttaggttcatgttcaggcccagccacttccccatggccccagtgaccccgaggaagccactgtacctttctgtaccctctgcatcccctgtctgtgaaacggggcgataagtgcccatctcatagaattgtcatgacaattaaaagagttgatgttaggctgggtgcagtggctcatgcctgtaatcccagcactttgggaggccaaggcgggcggatcacctgaggtcaggagttcgagaccagcctgaccaacatggagaaacaccatctctactaaaaatacagaattagctaggcgtggtggcaggtgcctgtaatcccagctactcaggaggctgaggcaggagaatcgcttgaacctgggaggcagaggttgccgtgagctgagatcgcgccattgcactccagcctgggcgacaagagcaaaactccgtctcagaaaaaaaaaaaaaaaagagttgatgtgttgaaagacagagaagcgaagacagagacgtggaaagacagggagagagacacggagagagacgcagaaggacagagacgtggagagagacgcagagagacagagacgtggagagacacagagagacgtggagagacacagagagacttggagagagacaaagcaagacaggacgggagaacaaggacaagctcaggtaagcctcagccggtgctgcaggcagtctgactcgcagtccctcaagtgacttccaaggagcatctgtagaaaagaagatggcccaggtcctgcacgtgcctgctcccttcccagggacccctggcccagcctccccacctgccttccctgccaaggaccccgatccaccctactccgtggagaccccctatggctaccgcctggacctggacttcctcaagtacgtggatgacatcgagaagggccacacgctgcgacgcgtggcagtgcagcgccgcccccgcctgagctcgctgccccgtggccctggctcctggtggacgtccactgagtcgctgtgctccaatgccagtggggacagccgccactcagcctattcctactgcggccgtggcttctaccctcagtatggtgctctggagacccgcggtggcttcaatccgcgggtggagcgcacgctgctggatgcccgtcgccgtctcgaggaccaggcggccacacccaccggcctgggctccctgacccccagtgcggccggctcgacagcctccctggtgggcgtggggttgccacccccgacaccacggagttcaggactgtccacaccggtgcctcccagtgccgggcacctggcccacgtgcgggagcagatggcgggtgccctgcggaagctgcggcagctggaggagcaggtgaagctgatccctgtgctccaggtgaagctctcggtgctccaggaggaaaagcggcagctcacagtacaacttaagagccagaagttcctgggccaccccacagcgggccggggtcgcagcgagctctgcctggacctccccgatcccccagaggacccagtggcactggagacccggagtgtgggcacctgggttcgagaacgggacttgggcatgcctgatggggaggctgccctcgccgccaaggtcgctgtgctggagacccagctcaagaaggcgctgcaggagctgcaggcagctcaggcccggcaggctgacccccagccccaggcctggccaccgccggacagcccggtccgcgtggatacagtccgggtggtagaagggccacgggaggtggaggtggtggccagcacagccgctggcgcccccgcacagcgggcccagagcctggagccttacggcacagggctgagggccctggcaatgcctggtaggcctgagagcccacctgtgttccgcagccaggaggtggtggagacaatgtgcccagtgcccgctgcagctaccagcaacgtccatatggtgaagaagattagcatcacagagcgaagctgcgatggagcagcaggcctcccagaagttcctgccgaatcgtcttcgtcacccccggggtccgaggtagcctcccttacacagcctgagaagagcacaggccgagtgcccacccaggagcccacccacagggagcccaccaggcaagcagcctcccaagagtccgaggaggccgggggcaccggcgggcccccggcaggcgtgcgatctatcatgaaacggaaagaggaggttgcagaccccacggcccaccggaggagcctccagttcgtgggggtcaacggcgggtatgagtcgtcatccgaggactccagcacagcagagaacatctcagacaacgacagcacagagaacgaggccccagagccgagggagagggttccgagtgtggccgaagccccccagctcaggcctgcagggacggcagcggccaagaccagccggcaggagtgtcagctgtctcgagaatctcagcacatacccactgctgagggggcatcaggatcaaacacggaggaggagatcaggatggagctaagccctgacctcatctcagcctgcttggccctggaaaagtacctggacaatcccaacgccctcacagagcgggagctgaaagtggcctacaccacagtgctgcaggagtggctgcgcctggcctgccgcagcgacgcacaccccgagctggtgcggcggcacctggtcacgttccgggccatgtctgcgcggctgctggactacgtggtcaacatcgccgacagcaacggcaacacagccctgcactactccgtgtctcatgccaacttccccgtggtgcagcagctgctcgacagcggtgtctgcaaggtggacaaacagaaccgtgctggctacagccctattatgctcaccgccctggccaccctgaagacccaggacgacatcgagactgtccttcagctcttccggcttggcaacatcaatgccaaagccagccaggcaggacagacggccctgatgctggccgtcagccacgggcgggtggacgttgtcaaagccctgctggcctgtgaggcagatgtcaacgtgcaagatgatgacggctccacggccctcatgtgcgcctgtgagcacggccacaaggagatcgcggggctgctgctggccgtgcccagctgtgacatctcactcacagatcgcgatgggagcacagctctgatggtggccttggacgcagggcagagtgagattgcgtccatgctgtattcccgcatgaacatcaagtgctcgtttgccccaatgtcagatgacgagagccctacatcatcctcggcagaagagtagccgtgagggaggcggggaccagccagaccgggagcaaaccgtcccttgtccccgtctcctccctgttcccgttcctccctggcccaccccactcacactccccaaggcccacggctcaaaggcaagcgagctctccctctgcttccctgggggagccccaacggccacaggactccagctccaagtgggttttcttggctcccctgttcaaagtggccacagcgcagaccgaagcaaaattcttgtatacattggcgccagggctgatgctggggtgtgggttttatgaagaacattgagaacaatcagctggtaattatggatggaggaagagggagaggaaaaaaatattgtatttttgaatcattgttgcaggagggggtgggaatcttaggatttgttgccagatttgaaagtcactggaacttgcatattttcattttaatcctaagtgttattacgcaccagttggggttcacccttcatccctcacatttaattgtctgatatagaatagtgttgtgtccactgccccgctagacggctttcttaggggaattttcttctggttgtttcacaagacagattctgtccttgtcacccgggacagaaaactcagtcttttcaccctcattcagatgaagggactcaggacaggctctgtgacttacagggacccaatcaattcacaatgagaaattaccggccaggcgtggtgactcacgtctgtaatcccagcactttgggagggcaaggcaagagcttgagcttgagcctagacgttaaagaccagcctgggcaacacagcaagacccatctctacaagaaatttaaaaactagccaggcgtggtggtgcgcgcctgtagtcccagctacttgggaggctgagccctggaggtcgaggctacagtgagctatgatcacaccattgcacttcagcctgggcgacacagcgagaccctgtctcaagaaagaaaaaaaaaagagacaaattacccagaaacccctcccttccccacatggaggccttggcaaatgttaattttcctagaaaatccttcagacctgaagacgcaggaaaagaatctggctctcagggtggcttctgcgtccccgccgccaggccccagactatggtcacagggccgtcctgttcctccccgggactccagaatttctctcctcaaaggaaagaaaacagggcatgcgcttgttggcaaaacgcagggccggctcccaaaaaccccatgtgtgtacgattaaaagttggccgtccccaggcctcccagcgcaaacttaaagagacagggctttgctgaaaaccaaacatgggccagctgggctttttaacaacctagagactttccggagctgcctggaacagagcctgtgggaaacggggcttgccagagacactcacagtttccttcatggcctgttttggtcccctaagaatctccacatcattgtctttcttgtgccttttccttggtgagcaacagaaagggaagggttccaagcctctaaaaatgtgctttgtgatcaggagtgcgctccaaaccaaatacgcgcgctgccctttcgaggccagtgagctcagcctccaaggctttaaagccacatttcagcaagagaaagcgctgagagctcgcaggttcattaaagaaggcaaagcactggtttctctccttagaaaagtaggtttcttggcttgatgtagactggcttgctttgatttttagtgaagggaatgtacgtaaaacaaaatagggcttggctggtcaaaggagacaagcaggatggatggatggatggatgaatagatagatggtgtttgcatgtaaattgcagagaaaacaaaaccaaagctgattggaaacaattaattgtgggtgtctgagggggaaggtcgcagctttgggcagctttgagaagcggtacaagagttctgtgcctgtgtgtccagccctggagccagccagtgcatttattttaagctcttagaagcaactccttggcccaggaatgcgtgacccctgagatgggtccacgcatctctctacacttccttctctccgtgggatactggactcgtgcctctgcgcccattctcttctcacgcatatccatgagctttaatttcactttctgatcacggtacgtccataaagccagtattacacttaaatgaagtattcttttttgtaatcgttttttttagaaggtaaacaaatttaataaagctaccaataatgttgaaaaaaaaaaa

SEQ ID NO: 445394 - DNA, 5307 bp, Homo sapiens
cacgagggcggccggagcgcgcaagaattagctaggcgtggtggcaggtgcctgtaatcccagctactcaggaggctgaggcaggagaatcgcttgaacctgggaggcagaggttgccgtgagctgagatcgcgccattgcactccagcctgggcgacaagagcaaaactccgtctcagaaaaaaaaaaaaaaaagagttgatgtgttgaaagacagagaagcgaagacagagacgtggaaagacagggagagagacacggagagagacgcagaaggacagagacgtggagagagacgcagagagacagagacgtggagagacacagagagacgtggagagacacagagagacttggagagagacaaagcaagacaggacgggagaacaaggacaagctcaggtaagcctcagccggtgctgcaggcagtctgactcgcagtccctcaagtgacttccaaggagcatctgtagaaaagaagatggcccaggtcctgcacgtgcctgctcccttcccagggacccctggcccagcctccccacctgccttccctgccaaggaccccgatccaccctactccgtggagaccccctatggctaccgcctggacctggacttcctcaagtacgtggatgacatcgagaagggccacacgctgcgacgcgtggcagtgcagcgccgcccccgcctgagctcgctgccccgtggccctggctcctggtggacgtccactgagtcgctgtgctccaatgccagtggggacagccgccactcagcctattcctactgcggccgtggcttctaccctcagtatggtgctctggagacccgcggtggcttcaatccgcgggtggagcgcacgctgctggatgcccgtcgccgtctcgaggaccaggcggccacacccaccggcctgggctccctgacccccagtgcggccggctcgacagcctccctggtgggcgtggggttgccacccccgacaccacggagttcaggactgtccacaccggtgcctcccagtgccgggcacctggcccacgtgcgggagcagatggcgggtgccctgcggaagctgcggcagctggaggagcaggtgaagctgatccctgtgctccaggtgaagctctcggtgctccaggaggaaaagcggcagctcacagtacaacttaagagccagaagttcctgggccaccccacagcgggccggggtcgcagcgagctctgcctggacctccccgatcccccagaggacccagtggcactggagacccggagtgtgggcacctgggttcgagaacgggacttgggcatgcctgatggggaggctgccctcgccgccaaggtcgctgtgctggagacccagctcaagaaggcgctgcaggagctgcaggcagctcaggcccggcaggctgacccccagccccaggcctggccaccgccggacagcccggtccgcgtggatacagtccgggtggtagaagggccacgggaggtggaggtggtggccagcacagccgctggcgcccccgcacagcgggcccagagcctggagccttacggcacagggctgagggccctggcaatgcctggtaggcctgagagcccacctgtgttccgcagccaggaggtggtggagacaatgtgcccagtgcccgctgcagctaccagcaacgtccatatggtgaagaagattagcatcacagagcgaagctgcgatggagcagcaggcctcccagaagttcctgccgaatcgtcttcgtcacccccggggtccgaggtagcctcccttacacagcctgagaagagcacaggccgagtgcccacccaggagcccacccacagggagcccaccaggcaagcagcctcccaagagtccgaggaggccgggggcaccggcgggcccccggcaggcgtgcgatctatcatgaaacggaaagaggaggttgcagaccccacggcccaccggaggagcctccagttcgtgggggtcaacggcgggtatgagtcgtcatccgaggactccagcacagcagagaacatctcagacaacgacagcacagagaacgaggccccagagccgagggagagggttccgagtgtggccgaagccccccagctcaggcctgcagggacggcagcggccaagaccagccggcaggagtgtcagctgtctcgagaatctcagcacatacccactgctgagggggcatcaggatcaaacacggaggaggagatcaggatggagctaagccctgacctcatctcagcctgcttggccctggaaaagtacctggacaatcccaacgccctcacagagcgggagctgaaagtggcctacaccacagtgctgcaggagtggctgcgcctggcctgccgcagcgacgcacaccccgagctggtgcggcggcacctggtcacgttccgggccatgtctgcgcggctgctggactacgtggtcaacatcgccgacagcaacggcaacacagccctgcactactccgtgtctcatgccaacttccccgtggtgcagcagctgctcgacagcggtgtctgcaaggtggacaaacagaaccgtgctggctacagccctattatgctcaccgccctggccaccctgaagacccaggacgacatcgagactgtccttcagctcttccggcttggcaacatcaatgccaaagccagccaggcaggacagacggccctgatgctggccgtcagccacgggcgggtggacgttgtcaaagccctgctggcctgtgaggcagatgtcaacgtgcaagatgatgacggctccacggccctcatgtgcgcctgtgagcacggccacaaggagatcgcggggctgctgctggccgtgcccagctgtgacatctcactcacagatcgcgatgggagcacagctctgatggtggccttggacgcagggcagagtgagattgcgtccatgctgtattcccgcatgaacatcaagtgctcgtttgccccaatgtcagatgacgagagccctacatcatcctcggcagaagagtagccgtgagggaggcggggaccagccagaccgggagcaaaccgtcccttgtccccgtctcctccctgttcccgttcctccctggcccaccccactcacactccccaaggcccacggctcaaaggcaagcgagctctccctctgcttccctgggggagccccaacggccacaggactccagctccaagtgggttttcttggctcccctgttcaaagtggccacagcgcagaccgaagcaaaattcttgtatacattggcgccagggctgatgctggggtgtgggttttatgaagaacattgagaacaatcagctggtaattatggatggaggaagagggagaggaaaaaaatattgtatttttgaatcattgttgcaggagggggtgggaatcttaggatttgttgccagatttgaaagtcactggaacttgcatattttcattttaatcctaagtgttattacgcaccagttggggttcacccttcatccctcacatttaattgtctgatatagaatagtgttgtgtccactgccccgctagacggctttcttaggggaattttcttctggttgtttcacaagacagattctgtccttgtcacccgggacagaaaactcagtcttttcaccctcattcagatgaagggactcaggacaggctctgtgacttacagggacccaatcaattcacaatgagaaattaccggccaggcgtggtgactcacgtctgtaatcccagcactttgggagggcaaggcaagagcttgagcttgagcctagacgttaaagaccagcctgggcaacacagcaagacccatctctacaagaaatttaaaaactagccaggcgtggtggtgcgcgcctgtagtcccagctacttgggaggctgagccctggaggtcgaggctacagtgagctatgatcacaccattgcacttcagcctgggcgacacagcgagaccctgtctcaagaaagaaaaaaaaaagagacaaattacccagaaacccctcccttccccacatggaggccttggcaaatgttaattttcctagaaaatccttcagacctgaagacgcaggaaaagaatctggctctcagggtggcttctgcgtccccgccgccaggccccagactatggtcacagggccgtcctgttcctccccgggactccagaatttctctcctcaaaggaaagaaaacagggcatgcgcttgttggcaaaacgcagggccggctcccaaaaaccccatgtgtgtacgattaaaagttggccgtccccaggcctcccagcgcaaacttaaagagacagggctttgctgaaaaccaaacatgggccagctgggctttttaacaacctagagactttccggagctgcctggaacagagcctgtgggaaacggggcttgccagagacactcacagtttccttcatggcctgttttggtcccctaagaatctccacatcattgtctttcttgtgccttttccttggtgagcaacagaaagggaagggttccaagcctctaaaaatgtgctttgtgatcaggagtgcgctccaaaccaaatacgcgcgctgccctttcgaggccagtgagctcagcctccaaggctttaaagccacatttcagcaagagaaagcgctgagagctcgcaggttcattaaagaaggcaaagcactggtttctctccttagaaaagtaggtttcttggcttgatgtagactggcttgctttgatttttagtgaagggaatgtacgtaaaacaaaatagggcttggctggtcaaaggagacaagcaggatggatggatggatggatgaatagatagatggtgtttgcatgtaaattgcagagaaaacaaaaccaaagctgattggaaacaattaattgtgggtgtctgagggggaaggtcgcagctttgggcagctttgagaagcggtacaagagttctgtgcctgtgtgtccagccctggagccagccagtgcatttattttaagctcttagaagcaactccttggcccaggaatgcgtgacccctgagatgggtccacgcatctctctacacttccttctctccgtgggatactggactcgtgcctctgcgcccattctcttctcacgcatatccatgagctttaatttcactttctgatcacggtacgtccataaagccagtattacacttaaatgaagtattcttttttgtaatcgttttttttagaaggtaaacaaatttaataaagctaccaataatgttgaaaaaaaaaaa

SEQ ID NO: 445395 - DNA, 2703 bp, Homo sapiens
agcgggatttattactcccctggtgacgggagggttgtttgagattcaggaggagatcagcaagttgagggtacatttcaccatcagagcaggacagacggccctgatgctggccgtcagccacgggcgggtggacgttgtcaaagccctgctggcctgtgaggcagatgtcaacgtgcaagatgatgacggctccacggccctcatgtgcgcctgtgagcacggccacaaggagatcgcggggctgctgctggccgtgcccagctgtgacatctcactcacagatcgcgatgggagcacagctctgatggtggccttggacgcagggcagagtgagattgcgtccatgctgtattcccgcatgaacatcaagtgctcgtttgccccaatgtcagatgacgagagccctacatcatcctcggcagaagagtagccgtgagggaggcggggaccagccagaccgggagcaaaccgtcccttgtccccgtctcctccctgttcccgttcctccctggcccaccccactcacactccccaaggcccacggctcaaaggcaagcgagctctccctctgcttccctgggggagccccaacggccacaggactccagctccaagtgggttttcttggctcccctgttcaaagtggccacagcgcagaccgaagcaaaattcttgtatacattggcgccagggctgatgctggggtgtgggttttatgaagaacattgagaacaatcagctggtaattatggatggaggaagagggagaggaaaaaaatattgtatttttgaatcattgttgcaggagggggtgggaatcttaggatttgttgccagatttgaaagtcactggaacttgcatattttcattttaatcctaagtgttattacgcaccagttggggttcacccttcatccctcacatttaattgtctgatatagaatagtgttgtgtccactgccccgctagacggctttcttaggggaattttcttctggttgtttcacaagacagattctgtccttgtcacccgggacagaaaactcagtcttttcaccctcattcagatgaagggactcaggacaggctctgtgacttacagggacccaatcaattcacaatgagaaattaccggccaggcgtggtgactcacgtctgtaatcccagcactttgggagggcaaggcaagagcttgagcttgagcctagacgttaaagaccagcctgggcaacacagcaagacccatctctacaagaaatttaaaaactagccaggcgtggtggtgcgcgcctgtagtcccagctacttgggaggctgagccctggaggtcgaggctacagtgagctatgatcacaccattgcacttcagcctgggcgacacagcgagaccctgtctcaagaaagaaaaaaaaaagagacaaattacccagaaacccctcccttccccacatggaggccttggcaaatgttaattttcctagaaaatccttcagacctgaagacgcaggaaaagaatctggctctcagggtggcttctgcgtccccgccgccaggccccagactatggtcacagggccgtcctgttcctccccgggactccagaatttctctcctcaaaggaaagaaaacagggcatgcgcttgttggcaaaacgcagggccggctcccaaaaaccccatgtgtgtacgattaaaagttggccgtccccaggcctcccagcgcaaacttaaagagacagggctttgctgaaaaccaaacatgggccagctgggctttttaacaacctagagactttccggagctgcctggaacagagcctgtgggaaacggggcttgccagagacactcacagtttccttcatggcctgttttggtcccctaagaatctccacatcattgtctttcttgtgccttttccttggtgagcaacagaaagggaagggttccaagcctctaaaaatgtgctttgtgatcaggagtgcgctccaaaccaaatacgcgcgctgccctttcgaggccagtgagctcagcctccaaggctttaaagccacatttcagcaagagaaagcgctgagagctcgcaggttcattaaagaaggcaaagcactggtttctctccttagaaaagtaggtttcttggcttgatgtagactggcttgctttgatttttagtgaagggaatgtacgtaaaacaaaatagggcttggctggtcaaaggagacaagcaggatggatggatggatggatgaatagatagatggtgtttgcatgtaaattgcagagaaaacaaaaccaaagctgattggaaacaattaattgtgggtgtctgagggggaaggtcgcagctttgggcagctttgagaagcggtacaagagttctgtgcctgtgtgtccagccctggagccagccagtgcatttattttaagctcttagaagcaactccttggcccaggaatgcgtgacccctgagatgggtccacgcatctctctacacttccttctctccgtgggatactggactcgtgcctctgcgcccattctcttctcacgcatatccatgagctttaatttcactttctgatcacggtacgtccataaagccagtattacacttaaatgaagtattcttttttgtaatcgttttttttagaaggtaaacaaatttaataaagctaccaataatgttgaaaaaaaaaaa

SEQ ID NO: 445396 - DNA, 5595 bp, Homo sapiens
ctttctcttccccttactcgggacgtgctggtcctcatcgagggcggtgagatgactgaggaccctcagacctcagtctccgtatctgggaaacgggtagagatatctgatgtggagtctgagggtggtggcttggtgggcagtggggggatccaccaggcttaggttcatgttcaggcccagccacttccccatggccccagtgaccccgaggaagccactgtacctttctgtaccctctgcatcccctgtctgtgaaacggggcgataagtgcccatctcatagaattgtcatgacaattaaaagagttgatgttaggctgggtgcagtggctcatgcctgtaatcccagcactttgggaggccaaggcgggcggatcacctgaggtcaggagttcgagaccagcctgaccaacatggagaaacaccatctctactaaaaatacagaattagctaggcgtggtggcaggtgcctgtaatcccagctactcaggaggctgaggcaggagaatcgcttgaacctgggaggcagaggttgccgtgagctgagatcgcgccattgcactccagcctgggcgacaagagcaaaactccgtctcagaaaaaaaaaaaaaaaagagttgatgtgttgaaagacagagaagcgaagacagagacgtggaaagacagggagagagacacggagagagacgcagaaggacagagacgtggagagagacgcagagagacagagacgtggagagacacagagagacgtggagagacacagagagacttggagagagacaaagcaagacaggacgggagaacaaggacaagctcaggtaagcctcagccggtgctgcaggcagtctgactcgcagtccctcaagtgacttccaaggagcatctgtagaaaagaagatggcccaggtcctgcacgtgcctgctcccttcccagggacccctggcccagcctccccacctgccttccctgccaaggaccccgatccaccctactccgtggagaccccctatggctaccgcctggacctggacttcctcaagtacgtggatgacatcgagaagggccacacgctgcgacgcgtggcagtgcagcgccgcccccgcctgagctcgctgccccgtggccctggctcctggtggacgtccactgagtcgctgtgctccaatgccagtggggacagccgccactcagcctattcctactgcggccgtggcttctaccctcagtatggtgctctggagacccgcggtggcttcaatccgcgggtggagcgcacgctgctggatgcccgtcgccgtctcgaggaccaggcggccacacccaccggcctgggctccctgacccccagtgcggccggctcgacagcctccctggtgggcgtggggttgccacccccgacaccacggagttcaggactgtccacaccggtgcctcccagtgccgggcacctggcccacgtgcgggagcagatggcgggtgccctgcggaagctgcggcagctggaggagcaggtgaagctgatccctgtgctccaggtgaagctctcggtgctccaggaggaaaagcggcagctcacagtacaacttaagagccagaagttcctgggccaccccacagcgggccggggtcgcagcgagctctgcctggacctccccgatcccccagaggacccagtggcactggagacccggagtgtgggcacctgggttcgagaacgggacttgggcatgcctgatggggaggctgccctcgccgccaaggtcgctgtgctggagacccagctcaagaaggcgctgcaggagctgcaggcagctcaggcccggcaggctgacccccagccccaggcctggccaccgccggacagcccggtccgcgtggatacagtccgggtggtagaagggccacgggaggtggaggtggtggccagcacagccgctggcgcccccgcacagcgggcccagagcctggagccttacggcacagggctgagggccctggcaatgcctggtaggcctgagagcccacctgtgttccgcagccaggaggtggtggagacaatgtgcccagtgcccgctgcagctaccagcaacgtccatatggtgaagaagattagcatcacagagcgaagctgcgatggagcagcaggcctcccagaagttcctgccgaatcgtcttcgtcacccccggggtccgaggtagcctcccttacacagcctgagaagagcacaggccgagtgcccacccaggagcccacccacagggagcccaccaggcaagcagcctcccaagagtccgaggaggccgggggcaccggcgggcccccggcaggcgtgcgatctatcatgaaacggaaagaggaggttgcagaccccacggcccaccggaggagcctccagttcgtgggggtcaacggcgggtatgagtcgtcatccgaggactccagcacagcagagaacatctcagacaacgacagcacagagaacgaggccccagagccgagggagagggttccgagtgtggccgaagccccccagctcaggcctgcagggacggcagcggccaagaccagccggcaggagtgtcagctgtctcgagaatctcagcacatacccactgctgagggggcatcaggatcaaacacggaggaggagatcaggatggagctaagccctgacctcatctcagcctgcttggccctggaaaagtacctggacaatcccaacgccctcacagagcgggagctgaaagtggcctacaccacagtgctgcaggagtggctgcgcctggcctgccgcagcgacgcacaccccgagctggtgcggcggcacctggtcacgttccgggccatgtctgcgcggctgctggactacgtggtcaacatcgccgacagcaacggcaacacagccctgcactactccgtgtctcatgccaacttccccgtggtgcagcagctgctcgacagcggtgtctgcaaggtggacaaacagaaccgtgctggctacagccctattatgctcaccgccctggccaccctgaagacccaggacgacatcgagactgtccttcagctcttccggcttggcaacatcaatgccaaagccagccaggcaggacagacggccctgatgctggccgtcagccacgggcgggtggacgttgtcaaagccctgctggcctgtgaggcagatgtcaacgtgcaagatgatgacggctccacggccctcatgtgcgcctgtgagcacggccacaaggagatcgcggggctgctgctggccgtgcccagctgtgacatctcactcacagatcgcgatgggagcacagctctgatggtggccttggacgcagggcagagtgagattgcgtccatgctgtattcccgcatgaacatcaagtgctcgtttgccccaatgtcagatgacgagagccctacatcatcctcggcagaagagtagccgtgagggaggcggggaccagccagaccgggagcaaaccgtcccttgtccccgtctcctccctgttcccgttcctccctggcccaccccactcacactccccaaggcccacggctcaaaggcaagcgagctctccctctgcttccctgggggagccccaacggccacaggactccagctccaagtgggttttcttggctcccctgttcaaagtggccacagcgcagaccgaagcaaaattcttgtatacattggcgccagggctgatgctggggtgtgggttttatgaagaacattgagaacaatcagctggtaattatggatggaggaagagggagaggaaaaaaatattgtatttttgaatcattgttgcaggagggggtgggaatcttaggatttgttgccagatttgaaagtcactggaacttgcatattttcattttaatcctaagtgttattacgcaccagttggggttcacccttcatccctcacatttaattgtctgatatagaatagtgttgtgtccactgccccgctagacggctttcttaggggaattttcttctggttgtttcacaagacagattctgtccttgtcacccgggacagaaaactcagtcttttcaccctcattcagatgaagggactcaggacaggctctgtgacttacagggacccaatcaattcacaatgagaaattaccggccaggcgtggtgactcacgtctgtagtcccagctacttgggaggctgagccctggaggtcgaggctacagtgagctatgatcacaccattgcacttcagcctgggcgacacagcgagaccctgtctcaagaaagaaaaaaaaaagagacaaattacccagaaacccctcccttccccacatggaggccttggcaaatgttaattttcctagaaaatccttcagacctgaagacgcaggaaaagaatctggctctcagggtggcttctgcgtccccgccgccaggccccagactatggtcacagggccgtcctgttcctccccgggactccagaatttctctcctcaaaggaaagaaaacagggcatgcgcttgttggcaaaacgcagggccggctcccaaaaaccccatgtgtgtacgattaaaagttggccgtccccaggcctcccagcgcaaacttaaagagacagggctttgctgaaaaccaaacatgggccagctgggctttttaacaacctagagactttccggagctgcctggaacagagcctgtgggaaacggggcttgccagagacactcacagtttccttcatggcctgttttggtcccctaagaatctccacatcattgtctttcttgtgccttttccttggtgagcaacagaaagggaagggttccaagcctctaaaaatgtgctttgtgatcaggagtgcgctccaaaccaaatacgcgcgctgccctttcgaggccagtgagctcagcctccaaggctttaaagccacatttcagcaagagaaagcgctgagagctcgcaggttcattaaagaaggcaaagcactggtttctctccttagaaaagtaggtttcttggcttgatgtagactggcttgctttgatttttagtgaagggaatgtacgtaaaacaaaatagggcttggctggtcaaaggagacaagcaggatggatggatggatggatgaatagatagatggtgtttgcatgtaaattgcagagaaaacaaaaccaaagctgattggaaacaattaattgtgggtgtctgagggggaaggtcgcagctttgggcagctttgagaagcggtacaagagttctgtgcctgtgtgtccagccctggagccagccagtgcatttattttaagctcttagaagcaactccttggcccaggaatgcgtgacccctgagatgggtccacgcatctctctacacttccttctctccgtgggatactggactcgtgcctctgcgcccattctcttctcacgcatatccatgagctttaatttcactttctgatcacggtacgtccataaagccagtattacacttaaatgaagtattcttttttgtaatcgttttttttagaaggtaaacaaatttaataaagctaccaataatgttgaaaaaaaaaaa

SEQ ID NO: 445397 - DNA, 1860 bp, Homo sapiens
ctttctcttccccttactcgggacgtgctggtcctcatcgagggcggtgagatgactgaggaccctcagacctcagtctccgtatctgggaaacgggtagagatatctgatgtggagtctgagggtggtggcttggtgggcagtggggggatccaccaggcttaggttcatgttcaggcccagccacttccccatggccccagtgaccccgaggaagccactgtacctttctgtaccctctgcatcccctgtctgtgaaacggggcgataagtgcccatctcatagaattgtcatgacaattaaaagagttgatgttaggctgggtgcagtggctcatgcctgtaatcccagcactttgggaggccaaggcgggcggatcacctgaggtcaggagttcgagaccagcctgaccaacatggagaaacaccatctctactaaaaatacagaattagctaggcgtggtggcaggtgcctgtaatcccagctactcaggaggctgaggcaggagaatcgcttgaacctgggaggcagaggttgccgtgagctgagatcgcgccattgcactccagcctgggcgacaagagcaaaactccgtctcagaaaaaaaaaaaaaaaagagttgatgtgttgaaagacagagaagcgaagacagagacgtggaaagacagggagagagacacggagagagacgcagaaggacagagacgtggagagagacgcagagagacagagacgtggagagacacagagagacgttccagaatttctctcctcaaaggaaagaaaacagggcatgcgcttgttggcaaaacgcagggccggctcccaaaaaccccatgtgtgtacgattaaaagttggccgtccccaggcctcccagcgcaaacttaaagagacagggctttgctgaaaaccaaacatgggccagctgggctttttaacaacctagagactttccggagctgcctggaacagagcctgtgggaaacggggcttgccagagacactcacagtttccttcatggcctgttttggtcccctaagaatctccacatcattgtctttcttgtgccttttccttggtgagcaacagaaagggaagggttccaagcctctaaaaatgtgctttgtgatcaggagtgcgctccaaaccaaatacgcgcgctgccctttcgaggccagtgagctcagcctccaaggctttaaagccacatttcagcaagagaaagcgctgagagctcgcaggttcattaaagaaggcaaagcactggtttctctccttagaaaagtaggtttcttggcttgatgtagactggcttgctttgatttttagtgaagggaatgtacgtaaaacaaaatagggcttggctggtcaaaggagacaagcaggatggatggatggatggatgaatagatagatggtgtttgcatgtaaattgcagagaaaacaaaaccaaagctgattggaaacaattaattgtgggtgtctgagggggaaggtcgcagctttgggcagctttgagaagcggtacaagagttctgtgcctgtgtgtccagccctggagccagccagtgcatttattttaagctcttagaagcaactccttggcccaggaatgcgtgacccctgagatgggtccacgcatctctctacacttccttctctccgtgggatactggactcgtgcctctgcgcccattctcttctcacgcatatccatgagctttaatttcactttctgatcacggtacgtccataaagccagtattacacttaaatgaagtattcttttttgtaatcgttttttttagaaggtaaacaaatttaataaagctaccaataatgttgaaaaaaaaaaa

SEQ ID NO: 445398 - DNA, 1883 bp, Homo sapiens
ctttctcttccccttactcgggacgtgctggtcctcatcgagggcggtgagatgactgaggaccctcagacctcagtctccgtatctgggaaacgggtagagatatctgatgtggagtctgagggtggtggcttggtgggcagtggggggatccaccaggcttaggttcatgttcaggcccagccacttccccatggccccagtgaccccgaggaagccactgtacctttctgtaccctctgcatcccctgtctgtgaaacggggcgataagtgcccatctcatagaattgtcatgacaattaaaagagttgatgttaggctgggtgcagtggctcatgcctgtaatcccagcactttgggaggccaaggcgggcggatcacctgaggtcaggagttcgagaccagcctgaccaacatggagaaacaccatctctactaaaaatacagaattagctaggcgtggtggcaggtgcctgtaatcccagctactcaggaggctgaggcaggagaatcgcttgaacctgggaggcagaggttgccgtgagctgagatcgcgccattgcactccagcctgggcgacaagagcaaaactccgtctcagaaaaaaaaaaaaaaaagagttgatgtgttgaaagacagagaagcgaagacagagacgtggaaagacagggagagagacacggagagagacgcagaaggacagagacgtggagagagacgcagagagacagagacgtggagagacacagagagacgttccagaatttctctcctcaaaggaaagaaaacagggcatgcgcttgttggcaaaacgcagggccggctcccaaaaaccccatgtgtgtacgattaaaagttggccgtccccaggcctcccagcgcaaacttaaagagacagggctttgctgaaaaccaaacatgggccagctgggctttttaacaacctagagactttccggagctgcctggaacagagcctgtgggaaacggggcttgccagagacactcacagtttccttcatggcctgttttggtcccctaagaatctccacatcattgtctttcttgtgccttttccttggtgagcaacagaaagggaagggttccaagcctctaaaaatgtgctttgtgatcaggagtgcgctccaaaccaaatacgcgcgctgccctttcgaggccagtgagctcagcctccaaggctttaaagccacatttcagcaagagaaagcgctgagagctcgcaggttcattaaagaaggcaaagcactggtttctctccttagaaaagtaggtttcttggcttgatgtagactggcttgctttgatttttagtgaagggaatgtacgtaaaacaaaatagggcttggctggtcaaaggagacaagcaaggatggatggatggatggatggggatggatggatggatggatgaatagatagatggtgtttgcatgtaaattgcagagaaaacaaaaccaaagctgattggaaacaattaattgtgggtgtctgagggggaaggtcgcagctttgggcagctttgagaagcggtacaagagttctgtgcctgtgtgtccagccctggagccagccagtgcatttattttaagctcttagaagcaactccttggcccaggaatgcgtgacccctgagatgggtccacgcatctctctacacttccttctctccgtgggatactggactcgtgcctctgcgcccattctcttctcacgcatatccatgagctttaatttcactttctgatcacggtacgtccataaagccagtattacacttaaatgaagtattcttttttgtaatcgttttttttagaaggtaaacaaatttaataaagctaccaataatgttgaaaaaaaaaaa

SEQ ID NO: 445399 - DNA, 1015 bp, Homo sapiens
agacgctcgggcggcgggacccagggaaggcagcggccggagcgcgcaaggtgttgaaagacagagaagcgaagacagagacgtggaaagacagggagagagacacggagagagacgcagaaggacagagacgtggagagagacgcagagagacagagacactcacagtttccttcatggcctgttttggtcccctaagaatctccacatcattgtctttcttgtgccttttccttggtgagcaacagaaagggaagggttccaagcctctaaaaatgtgctttgtgatcaggagtgcgctccaaaccaaatacgcgcgctgccctttcgaggccagtgagctcagcctccaaggctttaaagccacatttcagcaagagaaagcgctgagagctcgcaggttcattaaagaaggcaaagcactggtttctctccttagaaaagtaggtttcttggcttgatgtagactggcttgctttgatttttagtgaagggaatgtacgtaaaacaaaatagggcttggctggtcaaaggagacaagcaggatggatggatggatggatgaatagatagatggtgtttgcatgtaaattgcagagaaaacaaaaccaaagctgattggaaacaattaattgtgggtgtctgagggggaaggtcgcagctttgggcagctttgagaagcggtacaagagttctgtgcctgtgtgtccagccctggagccagccagtgcatttattttaagctcttagaagcaactccttggcccaggaatgcgtgacccctgagatgggtccacgcatctctctacacttccttctctccgtgggatactggactcgtgcctctgcgcccattctcttctcacgcatatccatgagctttaatttcactttctgatcacggtacgtccataaagccagtattacacttaaatgaagtattcttttttgtaatcgttttttttagaaggtaaacaaatttaataaagctaccaataatgttgaaaaaaaaaaa

SEQ ID NO: 445400 - DNA, 501 bp, Homo sapiens
gcacgagctcgtgccgaattcggcacgagggatggatggatggatggatgaatagatagatggtgtttgcatgtaaattgcagagaaaacaaaaccaaagctgattggaaacaattaattgtgggtgtctgagggggaaggtcgcagctttgggcagctttgagaagcggtacaagagttctgtgcctgtgtgtccagccctggagccagccagtgcatttattttaagctcttagaagcaactccttggcccaggaatgcgtgacccctgagatgggtccacgcatctctctacacttccttctctccgtgggatactggactcgtgcctctgcgcccattctcttctcacgcatatccatgagctttaatttcactttctgatcacggtacgtccataaagccagtattacacttaaatgaagtattcttttttgtaatcgttttttttagaaggtaaacaaatttaataaagctaccaataatgttgaaaaaaaaaaa

SEQ ID NO: 445401 - DNA, 4041 bp, Homo sapiens
ctttctcttccccttactcgggacgtgctggtcctcatcgagggcggtgagatgactgaggaccctcagacctcagtctccgtatctgggaaacgggtagagatatctgatgtggagtctgagggtggtggcttggtgggcagtggggggatccaccaggcttaggttcatgttcaggcccagccacttccccatggccccagtgaccccgaggaagccactgtacctttctgtaccctctgcatcccctgtctgtgaaacggggcgataagtgcccatctcatagaattgtcatgacaattaaaagagttgatgttaggctgggtgcagtggctcatgcctgtaatcccagcactttgggaggccaaggcgggcggatcacctgaggtcaggagttcgagaccagcctgaccaacatggagaaacaccatctctactaaaaatacagaattagctaggcgtggtggcaggtgcctgtaatcccagctactcaggaggctgaggcaggagaatcgcttgaacctgggaggcagaggttgccgtgagctgagatcgcgccattgcactccagcctgggcgacaagagcaaaactccgtctcagaaaaaaaaaaaaaaaagagttgatgtgttgaaagacagagaagcgaagacagagacgtggaaagacagggagagagacacggagagagacgcagaaggacagagacgtggagagagacgcagagagacagagacgtggagagacacagagagacgtggagagacacagagagacttggagagagacaaagcaagacaggacgggagaacaaggacaagctcaggtaagcctcagccggtgctgcaggcagtctgactcgcagtccctcaagtgacttccaaggagcatctgtagaaaagaagatggcccaggtcctgcacgtgcctgctcccttcccagggacccctggcccagcctccccacctgccttccctgccaaggaccccgatccaccctactccgtggagaccccctatggctaccgcctggacctggacttcctcaagtacgtggatgacatcgagaagggccacacgctgcgacgcgtggcagtgcagcgccgcccccgcctgagctcgctgccccgtggccctggctcctggtggacgtccactgagtcgctgtgctccaatgccagtggggacagccgccactcagcctattcctactgcggccgtggcttctaccctcagtatggtgctctggagacccgcggtggcttcaatccgcgggtggagcgcacgctgctggatgcccgtcgccgtctcgaggaccaggcggccacacccaccggcctgggctccctgacccccagtgcggccggctcgacagcctccctggtgggcgtggggttgccacccccgacaccacggagttcaggactgtccacaccggtgcctcccagtgccgggcacctggcccacgtgcgggagcagatggcgggtgccctgcggaagctgcggcagctggaggagcaggtgaagctgatccctgtgctccaggtgaagctctcggtgctccaggaggaaaagcggcagctcacagtacaacttaagagccagaagttcctgggccaccccacagcgggccggggtcgcagcgagctctgcctggacctccccgatcccccagaggacccagtggcactggagacccggagtgtgggcacctgggttcgagaacgggacttgggcatgcctgatggggaggctgccctcgccgccaaggtcgctgtgctggagacccagctcaagaaggcgctgcaggagctgcaggcagctcaggcccggcaggctgacccccagccccaggcctggccaccgccggacagcccggtccgcgtggatacagtccgggtggtagaagggccacgggaggtggaggtggtggccagcacagccgctggcgcccccgcacagcgggcccagagcctggagccttacggcacagggctgagggccctggcaatgcctggtaggcctgagagcccacctgtgttccgcagccaggaggtggtggagacaatgtgcccagtgcccgctgcagctaccagcaacgtccatatggtgaagaagattagcatcacagagcgaagctgcgatggagcagcaggcctcccagaagttcctgccgaatcgtcttcgtcacccccggggtccgaggtagcctcccttacacagcctgagaagagcacaggccgagtgcccacccaggagcccacccacagggagcccaccaggcaagcagcctcccaagagtccgaggaggccgggggcaccggcgggcccccggcaggcgtgcgatctatcatgaaacggaaagaggaggttgcagaccccacggcccaccggaggagcctccagttcgtgggggtcaacggcgggtatgagtcgtcatccgaggactccagcacagcagagaacatctcagacaacgacagcacagagaacgaggccccagagccgagggagagggttccgagtgtggccgaagccccccagctcaggcctgcagggacggcagcggccaagaccagccggcaggagtgtcagctgtctcgagaatctcagcacatacccactgctgagggggcatcaggatcaaacacggaggaggagatcaggatggagctaagccctgacctcatctcagcctgcttggccctggaaaagtacctggacaatcccaacgccctcacagagcgggagctgaaagtggcctacaccacagtgctgcaggagtggctgcgcctggcctgccgcagcgacgcacaccccgagctggtgcggcggcacctggtcacgttccgggccatgtctgcgcggctgctggactacgtggtcaacatcgccgacagcaacggcaacacagccctgcactactccgtgtctcatgccaacttccccgtggtgcagcagctgctcgacagcggtgtctgcaaggtggacaaacagaaccgtgctggctacagccctattatgctcaccgccctggccaccctgaagacccaggacgacatcgagactgtccttcagctcttccggcttggcaacatcaatgccaaagccagccaggcaggacagacggccctgatgctggccgtcagccacgggcgggtggacgttgtcaaagccctgctggcctgtgaggcagatgtcaacgtgcaagatgatgacggctccacggccctcatgtgcgcctgtgagcacggccacaaggagatcgcggggctgctgctggccgtgcccagctgtgacatctcactcacagatcgcgatgggagcacagctctgatggtggccttggacgcagggcagagtgagattgcgtccatgctgtattcccgcatgaacatcaagtgctcgtttgccccaatgtcagatgacgagagccctacatcatcctcggcagaagagtagccgtgagggaggcggggaccagccagaccgggagcaaaccgtcccttgtccccgtctcctccctgttcccgttcctccctggcccaccccactcacactccccaaggcccacggctcaaaggcaagcgagctctccctctgcttccctgggggagccccaacggccacaggactccagctccaagtgggttttcttggctcccctgttcaaagtggccacagcgcagctttgggcagctttgagaagcggtacaagagttctgtgcctgtgtgtccagccctggagccagccagtgcatttattttaagctcttagaagcaactccttggcccaggaatgcgtgacccctgagatgggtccacgcatctctctacacttccttctctccgtgggatactggactcgtgcctctgcgcccattctcttctcacgcatatccatgagctttaatttcactttctgatcacggtacgtccataaagccagtattacacttaaatgaagtattcttttttgtaatcgttttttttagaaggtaaacaaatttaataaagctaccaataatgttgaaaaaaaaaaa

SEQ ID NO: 445402 - DNA, 5378 bp, Homo sapiens
agacgctcgggcggcgggacccagggaaggcagcggccggagcgcgcaagagaattagctaggcgtggtggcaggtgcctgtaatcccagctactcaggaggctgaggcaggagaatcgcttgaacctgggaggcagaggttgccgtgagctgagatcgcgccattgcactccagcctgggcgacaagagcaaaactccgtctcagaaaaaaaaaaaaaaaagagttgatgtgttgaaagacagagaagcgaagacagagacgtggaaagacagggagagagacacggagagagacgcagaaggacagagacgtggagagagacgcagagagacagagacggagagacacagagagacttggagagagacaaagcaagacaggacgggagaacaaggacaagctcaggtgcccctggagccccagccctgccttcatgcccagcaggtgccctacctggcccatcctcccaaggtaagcctcagccggtgctgcaggcagtctgactcgcagtccctcaagtgacttccaaggagcatctgtagaaaagaagatggcccaggtcctgcacgtgcctgctcccttcccagggacccctggcccagcctccccacctgccttccctgccaaggaccccgatccaccctactccgtggagaccccctatggctaccgcctggacctggacttcctcaagtacgtggatgacatcgagaagggccacacgctgcgacgcgtggcagtgcagcgccgcccccgcctgagctcgctgccccgtggccctggctcctggtggacgtccactgagtcgctgtgctccaatgccagtggggacagccgccactcagcctattcctactgcggccgtggcttctaccctcagtatggtgctctggagacccgcggtggcttcaatccgcgggtggagcgcacgctgctggatgcccgtcgccgtctcgaggaccaggcggccacacccaccggcctgggctccctgacccccagtgcggccggctcgacagcctccctggtgggcgtggggttgccacccccgacaccacggagttcaggactgtccacaccggtgcctcccagtgccgggcacctggcccacgtgcgggagcagatggcgggtgccctgcggaagctgcggcagctggaggagcaggtgaagctgatccctgtgctccaggtgaagctctcggtgctccaggaggaaaagcggcagctcacagtacaacttaagagccagaagttcctgggccaccccacagcgggccggggtcgcagcgagctctgcctggacctccccgatcccccagaggacccagtggcactggagacccggagtgtgggcacctgggttcgagaacgggacttgggcatgcctgatggggaggctgccctcgccgccaaggtcgctgtgctggagacccagctcaagaaggcgctgcaggagctgcaggcagctcaggcccggcaggctgacccccagccccaggcctggccaccgccggacagcccggtccgcgtggatacagtccgggtggtagaagggccacgggaggtggaggtggtggccagcacagccgctggcgcccccgcacagcgggcccagagcctggagccttacggcacagggctgagggccctggcaatgcctggtaggcctgagagcccacctgtgttccgcagccaggaggtggtggagacaatgtgcccagtgcccgctgcagctaccagcaacgtccatatggtgaagaagattagcatcacagagcgaagctgcgatggagcagcaggcctcccagaagttcctgccgaatcgtcttcgtcacccccggggtccgaggtagcctcccttacacagcctgagaagagcacaggccgagtgcccacccaggagcccacccacagggagcccaccaggcaagcagcctcccaagagtccgaggaggccgggggcaccggcgggcccccggcaggcgtgcgatctatcatgaaacggaaagaggaggttgcagaccccacggcccaccggaggagcctccagttcgtgggggtcaacggcgggtatgagtcgtcatccgaggactccagcacagcagagaacatctcagacaacgacagcacagagaacgaggccccagagccgagggagagggttccgagtgtggccgaagccccccagctcaggcctgcagggacggcagcggccaagaccagccggcaggagtgtcagctgtctcgagaatctcagcacatacccactgctgagggggcatcaggatcaaacacggaggaggagatcaggatggagctaagccctgacctcatctcagcctgcttggccctggaaaagtacctggacaatcccaacgccctcacagagcgggagctgaaagtggcctacaccacagtgctgcaggagtggctgcgcctggcctgccgcagcgacgcacaccccgagctggtgcggcggcacctggtcacgttccgggccatgtctgcgcggctgctggactacgtggtcaacatcgccgacagcaacggcaacacagccctgcactactccgtgtctcatgccaacttccccgtggtgcagcagctgctcgacagcggtgtctgcaaggtggacaaacagaaccgtgctggctacagccctattatgctcaccgccctggccaccctgaagacccaggacgacatcgagactgtccttcagctcttccggcttggcaacatcaatgccaaagccagccaggcaggacagacggccctgatgctggccgtcagccacgggcgggtggacgttgtcaaagccctgctggcctgtgaggcagatgtcaacgtgcaagatgatgacggctccacggccctcatgtgcgcctgtgagcacggccacaaggagatcgcggggctgctgctggccgtgcccagctgtgacatctcactcacagatcgcgatgggagcacagctctgatggtggccttggacgcagggcagagtgagattgcgtccatgctgtattcccgcatgaacatcaagtgctcgtttgccccaatgtcagatgacgagagccctacatcatcctcggcagaagagtagccgtgagggaggcggggaccagccagaccgggagcaaaccgtcccttgtccccgtctcctccctgttcccgttcctccctggcccaccccactcacactccccaaggcccacggctcaaaggcaagcgagctctccctctgcttccctgggggagccccaacggccacaggactccagctccaagtgggttttcttggctcccctgttcaaagtggccacagcgcagaccgaagcaaaattcttgtatacattggcgccagggctgatgctggggtgtgggttttatgaagaacattgagaacaatcagctggtaattatggatggaggaagagggagaggaaaaaaatattgtatttttgaatcattgttgcaggagggggtgggaatcttaggatttgttgccagatttgaaagtcactggaacttgcatattttcattttaatcctaagtgttattacgcaccagttggggttcacccttcatccctcacatttaattgtctgatatagaatagtgttgtgtccactgccccgctagacggctttcttaggggaattttcttctggttgtttcacaagacagattctgtccttgtcacccgggacagaaaactcagtcttttcaccctcattcagatgaagggactcaggacaggctctgtgacttacagggacccaatcaattcacaatgagaaattaccggccaggcgtggtgactcacgtctgtaatcccagcactttgggagggcaaggcaagagcttgagcttgagcctagacgttaaagaccagcctgggcaacacagcaagacccatctctacaagaaatttaaaaactagccaggcgtggtggtgcgcgcctgtagtcccagctacttgggaggctgagccctggaggtcgaggctacagtgagctatgatcacaccattgcacttcagcctgggcgacacagcgagaccctgtctcaagaaagaaaaaaaaaagagacaaattacccagaaacccctcccttccccacatggaggccttggcaaatgttaattttcctagaaaatccttcagacctgaagacgcaggaaaagaatctggctctcagggtggcttctgcgtccccgccgccaggccccagactatggtcacagggccgtcctgttcctccccgggactccagaatttctctcctcaaaggaaagaaaacagggcatgcgcttgttggcaaaacgcagggccggctcccaaaaaccccatgtgtgtacgattaaaagttggccgtccccaggcctcccagcgcaaacttaaagagacagggctttgctgaaaaccaaacatgggccagctgggctttttaacaacctagagactttccggagctgcctggaacagagcctgtgggaaacggggcttgccagagacactcacagtttccttcatggcctgttttggtcccctaagaatctccacatcattgtctttcttgtgccttttccttggtgagcaacagaaagggaagggttccaagcctctaaaaatgtgctttgtgatcaggagtgcgctccaaaccaaatacgcgcgctgccctttcgaggccagtgagctcagcctccaaggctttaaagccacatttcagcaagagaaagcgctgagagctcgcaggttcattaaagaaggcaaagcactggtttctctccttagaaaagtaggtttcttggcttgatgtagactggcttgctttgatttttagtgaagggaatgtacgtaaaacaaaatagggcttggctggtcaaaggagacaagcaggatggatggatggatggatgaatagatagatggtgtttgcatgtaaattgcagagaaaacaaaaccaaagctgattggaaacaattaattgtgggtgtctgagggggaaggtcgcagctttgggcagctttgagaagcggtacaagagttctgtgcctgtgtgtccagccctggagccagccagtgcatttattttaagctcttagaagcaactccttggcccaggaatgcgtgacccctgagatgggtccacgcatctctctacacttccttctctccgtgggatactggactcgtgcctctgcgcccattctcttctcacgcatatccatgagctttaatttcactttctgatcacggtacgtccataaagccagtattacacttaaatgaagtattcttttttgtaatcgttttttttagaaggtaaacaaatttaataaagctaccaataatgttgaaaaaaaaaaa

SEQ ID NO: 445403 - DNA, 5368 bp, Homo sapiens
cacgagggcggccggagcgcgcaagaattagctaggcgtggtggcaggtgcctgtaatcccagctactcaggaggctgaggcaggagaatcgcttgaacctgggaggcagaggttgccgtgagctgagatcgcgccattgcactccagcctgggcgacaagagcaaaactccgtctcagaaaaaaaaaaaaaaaagagttgatgggtgagcctccaggcaaatggaaaacggaatttcctgcaattggtgaccatgtgttccaggtgttgaaagacagagaagcgaagacagagacgtggaaagacagggagagagacacggagagagacgcagaaggacagagacgtggagagagacgcagagagacagagacgtggagagacacagagagacgtggagagacacagagagacttggagagagacaaagcaagacaggacgggagaacaaggacaagctcaggtaagcctcagccggtgctgcaggcagtctgactcgcagtccctcaagtgacttccaaggagcatctgtagaaaagaagatggcccaggtcctgcacgtgcctgctcccttcccagggacccctggcccagcctccccacctgccttccctgccaaggaccccgatccaccctactccgtggagaccccctatggctaccgcctggacctggacttcctcaagtacgtggatgacatcgagaagggccacacgctgcgacgcgtggcagtgcagcgccgcccccgcctgagctcgctgccccgtggccctggctcctggtggacgtccactgagtcgctgtgctccaatgccagtggggacagccgccactcagcctattcctactgcggccgtggcttctaccctcagtatggtgctctggagacccgcggtggcttcaatccgcgggtggagcgcacgctgctggatgcccgtcgccgtctcgaggaccaggcggccacacccaccggcctgggctccctgacccccagtgcggccggctcgacagcctccctggtgggcgtggggttgccacccccgacaccacggagttcaggactgtccacaccggtgcctcccagtgccgggcacctggcccacgtgcgggagcagatggcgggtgccctgcggaagctgcggcagctggaggagcaggtgaagctgatccctgtgctccaggtgaagctctcggtgctccaggaggaaaagcggcagctcacagtacaacttaagagccagaagttcctgggccaccccacagcgggccggggtcgcagcgagctctgcctggacctccccgatcccccagaggacccagtggcactggagacccggagtgtgggcacctgggttcgagaacgggacttgggcatgcctgatggggaggctgccctcgccgccaaggtcgctgtgctggagacccagctcaagaaggcgctgcaggagctgcaggcagctcaggcccggcaggctgacccccagccccaggcctggccaccgccggacagcccggtccgcgtggatacagtccgggtggtagaagggccacgggaggtggaggtggtggccagcacagccgctggcgcccccgcacagcgggcccagagcctggagccttacggcacagggctgagggccctggcaatgcctggtaggcctgagagcccacctgtgttccgcagccaggaggtggtggagacaatgtgcccagtgcccgctgcagctaccagcaacgtccatatggtgaagaagattagcatcacagagcgaagctgcgatggagcagcaggcctcccagaagttcctgccgaatcgtcttcgtcacccccggggtccgaggtagcctcccttacacagcctgagaagagcacaggccgagtgcccacccaggagcccacccacagggagcccaccaggcaagcagcctcccaagagtccgaggaggccgggggcaccggcgggcccccggcaggcgtgcgatctatcatgaaacggaaagaggaggttgcagaccccacggcccaccggaggagcctccagttcgtgggggtcaacggcgggtatgagtcgtcatccgaggactccagcacagcagagaacatctcagacaacgacagcacagagaacgaggccccagagccgagggagagggttccgagtgtggccgaagccccccagctcaggcctgcagggacggcagcggccaagaccagccggcaggagtgtcagctgtctcgagaatctcagcacatacccactgctgagggggcatcaggatcaaacacggaggaggagatcaggatggagctaagccctgacctcatctcagcctgcttggccctggaaaagtacctggacaatcccaacgccctcacagagcgggagctgaaagtggcctacaccacagtgctgcaggagtggctgcgcctggcctgccgcagcgacgcacaccccgagctggtgcggcggcacctggtcacgttccgggccatgtctgcgcggctgctggactacgtggtcaacatcgccgacagcaacggcaacacagccctgcactactccgtgtctcatgccaacttccccgtggtgcagcagctgctcgacagcggtgtctgcaaggtggacaaacagaaccgtgctggctacagccctattatgctcaccgccctggccaccctgaagacccaggacgacatcgagactgtccttcagctcttccggcttggcaacatcaatgccaaagccagccaggcaggacagacggccctgatgctggccgtcagccacgggcgggtggacgttgtcaaagccctgctggcctgtgaggcagatgtcaacgtgcaagatgatgacggctccacggccctcatgtgcgcctgtgagcacggccacaaggagatcgcggggctgctgctggccgtgcccagctgtgacatctcactcacagatcgcgatgggagcacagctctgatggtggccttggacgcagggcagagtgagattgcgtccatgctgtattcccgcatgaacatcaagtgctcgtttgccccaatgtcagatgacgagagccctacatcatcctcggcagaagagtagccgtgagggaggcggggaccagccagaccgggagcaaaccgtcccttgtccccgtctcctccctgttcccgttcctccctggcccaccccactcacactccccaaggcccacggctcaaaggcaagcgagctctccctctgcttccctgggggagccccaacggccacaggactccagctccaagtgggttttcttggctcccctgttcaaagtggccacagcgcagaccgaagcaaaattcttgtatacattggcgccagggctgatgctggggtgtgggttttatgaagaacattgagaacaatcagctggtaattatggatggaggaagagggagaggaaaaaaatattgtatttttgaatcattgttgcaggagggggtgggaatcttaggatttgttgccagatttgaaagtcactggaacttgcatattttcattttaatcctaagtgttattacgcaccagttggggttcacccttcatccctcacatttaattgtctgatatagaatagtgttgtgtccactgccccgctagacggctttcttaggggaattttcttctggttgtttcacaagacagattctgtccttgtcacccgggacagaaaactcagtcttttcaccctcattcagatgaagggactcaggacaggctctgtgacttacagggacccaatcaattcacaatgagaaattaccggccaggcgtggtgactcacgtctgtaatcccagcactttgggagggcaaggcaagagcttgagcttgagcctagacgttaaagaccagcctgggcaacacagcaagacccatctctacaagaaatttaaaaactagccaggcgtggtggtgcgcgcctgtagtcccagctacttgggaggctgagccctggaggtcgaggctacagtgagctatgatcacaccattgcacttcagcctgggcgacacagcgagaccctgtctcaagaaagaaaaaaaaaagagacaaattacccagaaacccctcccttccccacatggaggccttggcaaatgttaattttcctagaaaatccttcagacctgaagacgcaggaaaagaatctggctctcagggtggcttctgcgtccccgccgccaggccccagactatggtcacagggccgtcctgttcctccccgggactccagaatttctctcctcaaaggaaagaaaacagggcatgcgcttgttggcaaaacgcagggccggctcccaaaaaccccatgtgtgtacgattaaaagttggccgtccccaggcctcccagcgcaaacttaaagagacagggctttgctgaaaaccaaacatgggccagctgggctttttaacaacctagagactttccggagctgcctggaacagagcctgtgggaaacggggcttgccagagacactcacagtttccttcatggcctgttttggtcccctaagaatctccacatcattgtctttcttgtgccttttccttggtgagcaacagaaagggaagggttccaagcctctaaaaatgtgctttgtgatcaggagtgcgctccaaaccaaatacgcgcgctgccctttcgaggccagtgagctcagcctccaaggctttaaagccacatttcagcaagagaaagcgctgagagctcgcaggttcattaaagaaggcaaagcactggtttctctccttagaaaagtaggtttcttggcttgatgtagactggcttgctttgatttttagtgaagggaatgtacgtaaaacaaaatagggcttggctggtcaaaggagacaagcaggatggatggatggatggatgaatagatagatggtgtttgcatgtaaattgcagagaaaacaaaaccaaagctgattggaaacaattaattgtgggtgtctgagggggaaggtcgcagctttgggcagctttgagaagcggtacaagagttctgtgcctgtgtgtccagccctggagccagccagtgcatttattttaagctcttagaagcaactccttggcccaggaatgcgtgacccctgagatgggtccacgcatctctctacacttccttctctccgtgggatactggactcgtgcctctgcgcccattctcttctcacgcatatccatgagctttaatttcactttctgatcacggtacgtccataaagccagtattacacttaaatgaagtattcttttttgtaatcgttttttttagaaggtaaacaaatttaataaagctaccaataatgttgaaaaaaaaaaa

SEQ ID NO: 445404 - DNA, 3433 bp, Homo sapiens
cacctccgctgtcctcccctccaggcgggcccccggcaggcgtgcgatctatcatgaaacggaaagaggaggttgcagaccccacggcccaccggaggagcctccagttcgtgggggtcaacggcgggtatgagtcgtcatccgaggactccagcacagcagagaacatctcagacaacgacagcacagagaacgaggccccagagccgagggagagggttccgagtgtggccgaagccccccagctcaggcctgcagggacggcagcggccaagaccagccggcaggagtgtcagctgtctcgagaatctcagcacatacccactgctgagggggcatcaggatcaaacacggaggaggagatcaggatggagctaagccctgacctcatctcagcctgcttggccctggaaaagtacctggacaatcccaacgccctcacagagcgggagctgaaagtggcctacaccacagtgctgcaggagtggctgcgcctggcctgccgcagcgacgcacaccccgagctggtgcggcggcacctggtcacgttccgggccatgtctgcgcggctgctggactacgtggtcaacatcgccgacagcaacggcaacacagccctgcactactccgtgtctcatgccaacttccccgtggtgcagcagctgctcgacagcggtgtctgcaaggtggacaaacagaaccgtgctggctacagccctattatgctcaccgccctggccaccctgaagacccaggacgacatcgagactgtccttcagctcttccggcttggcaacatcaatgccaaagccagccaggcaggacagacggccctgatgctggccgtcagccacgggcgggtggacgttgtcaaagccctgctggcctgtgaggcagatgtcaacgtgcaagatgatgacggctccacggccctcatgtgcgcctgtgagcacggccacaaggagatcgcggggctgctgctggccgtgcccagctgtgacatctcactcacagatcgcgatgggagcacagctctgatggtggccttggacgcagggcagagtgagattgcgtccatgctgtattcccgcatgaacatcaagtgctcgtttgccccaatgtcagatgacgagagccctacatcatcctcggcagaagagtagccgtgagggaggcggggaccagccagaccgggagcaaaccgtcccttgtccccgtctcctccctgttcccgttcctccctggcccaccccactcacactccccaaggcccacggctcaaaggcaagcgagctctccctctgcttccctgggggagccccaacggccacaggactccagctccaagtgggttttcttggctcccctgttcaaagtggccacagcgcagaccgaagcaaaattcttgtatacattggcgccagggctgatgctggggtgtgggttttatgaagaacattgagaacaatcagctggtaattatggatggaggaagagggagaggaaaaaaatattgtatttttgaatcattgttgcaggagggggtgggaatcttaggatttgttgccagatttgaaagtcactggaacttgcatattttcattttaatcctaagtgttattacgcaccagttggggttcacccttcatccctcacatttaattgtctgatatagaatagtgttgtgtccactgccccgctagacggctttcttaggggaattttcttctggttgtttcacaagacagattctgtccttgtcacccgggacagaaaactcagtcttttcaccctcattcagatgaagggactcaggacaggctctgtgacttacagggacccaatcaattcacaatgagaaattaccggccaggcgtggtgactcacgtctgtaatcccagcactttgggagggcaaggcaagagcttgagcttgagcctagacgttaaagaccagcctgggcaacacagcaagacccatctctacaagaaatttaaaaactagccaggcgtggtggtgcgcgcctgtagtcccagctacttgggaggctgagccctggaggtcgaggctacagtgagctatgatcacaccattgcacttcagcctgggcgacacagcgagaccctgtctcaagaaagaaaaaaaaaagagacaaattacccagaaacccctcccttccccacatggaggccttggcaaatgttaattttcctagaaaatccttcagacctgaagacgcaggaaaagaatctggctctcagggtggcttctgcgtccccgccgccaggccccagactatggtcacagggccgtcctgttcctccccgggactccagaatttctctcctcaaaggaaagaaaacagggcatgcgcttgttggcaaaacgcagggccggctcccaaaaaccccatgtgtgtacgattaaaagttggccgtccccaggcctcccagcgcaaacttaaagagacagggctttgctgaaaaccaaacatgggccagctgggctttttaacaacctagagactttccggagctgcctggaacagagcctgtgggaaacggggcttgccagagacactcacagtttccttcatggcctgttttggtcccctaagaatctccacatcattgtctttcttgtgccttttccttggtgagcaacagaaagggaagggttccaagcctctaaaaatgtgctttgtgatcaggagtgcgctccaaaccaaatacgcgcgctgccctttcgaggccagtgagctcagcctccaaggctttaaagccacatttcagcaagagaaagcgctgagagctcgcaggttcattaaagaaggcaaagcactggtttctctccttagaaaagtaggtttcttggcttgatgtagactggcttgctttgatttttagtgaagggaatgtacgtaaaacaaaatagggcttggctggtcaaaggagacaagcaggatggatggatggatggatgaatagatagatggtgtttgcatgtaaattgcagagaaaacaaaaccaaagctgattggaaacaattaattgtgggtgtctgagggggaaggtcgcagctttgggcagctttgagaagcggtacaagagttctgtgcctgtgtgtccagccctggagccagccagtgcatttattttaagctcttagaagcaactccttggcccaggaatgcgtgacccctgagatgggtccacgcatctctctacacttccttctctccgtgggatactggactcgtgcctctgcgcccattctcttctcacgcatatccatgagctttaatttcactttctgatcacggtacgtccataaagccagtattacacttaaatgaagtattcttttttgtaatcgttttttttagaaggtaaacaaatttaataaagctaccaataatgttgaaaaaaaaaaa

SEQ ID NO: 445405 - DNA, 5753 bp, Homo sapiens
ctttctcttccccttactcgggacgtgctggtcctcatcgagggcggtgagatgactgaggaccctcagacctcagtctccgtatctgggaaacgggtagagatatctgatgtggagtctgagggtggtggcttggtgggcagtggggggatccaccaggcttaggttcatgttcaggcccagccacttccccatggccccagtgaccccgaggaagccactgtacctttctgtaccctctgcatcccctgtctgtgaaacggggcgataagtgcccatctcatagaattgtcatgacaattaaaagagttgatgttaggctgggtgcagtggctcatgcctgtaatcccagcactttgggaggccaaggcgggcggatcacctgaggtcaggagttcgagaccagcctgaccaacatggagaaacaccatctctactaaaaatacagaattagctaggcgtggtggcaggtgcctgtaatcccagctactcaggaggctgaggcaggagaatcgcttgaacctgggaggcagaggttgccgtgagctgagatcgcgccattgcactccagcctgggcgacaagagcaaaactccgtctcagaaaaaaaaaaaaaaaagagttgatgtgttgaaagacagagaagcgaagacagagacgtggaaagacagggagagagacacggagagagacgcagaaggacagagacgtggagagagacgcagagagacagagacgtggagagacacagagagacgtggagagacacagagagacttggagagagacaaagcaagacaggacgggagaacaaggacaagctcaggtaagcctcagccggtgctgcaggcagtctgactcgcagtccctcaagtgacttccaaggagcatctgtagaaaagaagatggcccaggtcctgcacgtgcctgctcccttcccagggacccctggcccagcctccccacctgccttccctgccaaggaccccgatccaccctactccgtggagaccccctatggctaccgcctggacctggacttcctcaagtacgtggatgacatcgagaagggccacacgctgcgacgcgtggcagtgcagcgccgcccccgcctgagctcgctgccccgtggccctggctcctggtggacgtccactgagtcgctgtgctccaatgccagtggggacagccgccactcagcctattcctactgcggccgtggcttctaccctcagtatggtgctctggagacccgcggtggcttcaatccgcgggtggagcgcacgctgctggatgcccgtcgccgtctcgaggaccaggcggccacacccaccggcctgggctccctgacccccagtgcggccggctcgacagcctccctggtgggcgtggggttgccacccccgacaccacggagttcaggactgtccacaccggtgcctcccagtgccgggcacctggcccacgtgcgggagcagatggcgggtgccctgcggaagctgcggcagctggaggagcaggtgaagctgatccctgtgctccaggtgaagctctcggtgctccaggaggaaaagcggcagctcacagtacaacttaagagccagaagttcctgggccaccccacagcgggccggggtcgcagcgagctctgcctggacctccccgatcccccagaggacccagtggcactggagacccggagtgtgggcacctgggttcgagaacgggacttgggcatgcctgatggggaggctgccctcgccgccaaggtcgctgtgctggagacccagctcaagaaggcgctgcaggagctgcaggcagctcaggcccggcaggctgacccccagccccaggcctggccaccgccggacagcccggtccgcgtggatacagtccgggtggtagaagggccacgggaggtggaggtggtggccagcacagccgctggcgcccccgcacagcgggcccagagcctggagccttacggcacagggctgagggccctggcaatgcctggtaggcctgagagcccacctgtgttccgcagccaggaggtggtggagacaatgtgcccagtgcccgctgcagctaccagcaacgtccatatggtgaagaagattagcatcacagagcgaagctgcgatggagcagcaggcctcccagaagttcctgccgaatcgtcttcgtcacccccggggtccgaggtagcctcccttacacagcctgagaagagcacaggccgagtgcccacccaggagcccacccacagggagcccaccaggcaagcagcctcccaagagtccgaggaggccgggggcaccggcgggcccccggcaggcgtgcgatctatcatgaaacggaaagaggaggttgcagaccccacggcccaccggaggagcctccagttcgtgggggtcaacggcgggtatgagtcgtcatccgaggactccagcacagcagagaacatctcagacaacgacagcacagagaacgaggccccagagccgagggagagggttccgagtgtggccgaagccccccagctcaggcctgcagggacggcagcggccaagaccagccggcaggagtgtcagctgtctcgagaatctcagcacatacccactgctgagggggcatcaggatcaaacacggaggaggagatcaggatggagctaagccctgacctcatctcagcctgcttggccctggaaaagtacctggacaatcccaacgccctcacagagcgggagctgaaagtggcctacaccacagtgctgcaggagtggctgcgcctggcctgccgcagcgacgcacaccccgagctggtgcggcggcacctggtcacgttccgggccatgtctgcgcggctgctggactacgtggtcaacatcgccgacagcaacggcaacacagccctgcactactccgtgtctcatgccaacttccccgtggtgcagcagctgctcgacagcggtgtctgcaaggtggacaaacagaaccgtgctggctacagccctattatgctcaccgccctggccaccctgaagacccaggacgacatcgagactgtccttcagctcttccggcttggcaacatcaatgccaaagccagccaggcaggacagacggccctgatgctggccgtcagccacgggcgggtggacgttgtcaaagccctgctggcctgtgaggcagatgtcaacgtgcaagatgatgacggctccacggccctcatgtgcgcctgtgagcacggccacaaggagatcgcggggctgctgctggccgtgcccagctgtgacatctcactcacagatcgcgatgggagcacagctctgatggtggccttggacgcagggcagagtgagattgcgtccatgctgtattcccgcatgaacatcaagtgctcgtttgccccaatgtcagatgacgagagccctacatcatcctcggcagaagagtagccgtgagggaggcggggaccagccagaccgggagcaaaccgtcccttgtccccgtctcctccctgttcccgttcctccctggcccaccccactcacactccccaaggcccacggctcaaaggcaagcgagctctccctctgcttccctgggggagccccaacggccacaggactccagctccaagtgggttttcttggctcccctgttcaaagtggccacagcgcagaccgaagcaaaattcttgtatacattggcgccagggctgatgctggggtgtgggttttatgaagaacattgagaacaatcagctggtaattatggatggaggaagagggagaggaaaaaaatattgtatttttgaatcattgttgcaggagggggtgggaatcttaggatttgttgccagatttgaaagtcactggaacttgcatattttcattttaatcctaagtgttattacgcaccagttggggttcacccttcatccctcacatttaattgtctgatatagaatagtgttgtgtccactgccccgctagacggctttcttaggggaattttcttctggttgtttcacaagacagattctgtccttgtcacccgggacagaaaactcagtcttttcaccctcattcagatgaagggactcaggacaggctctgtgacttacagggacccaatcaattcacaatgagaaattaccggccaggcgtggtgactcacgtctgtaatcccagcactttgggagggcaaggcaagagcttgagcttgagcctagacgttaaagaccagcctgggcaacacagcaagacccatctctacaagaaatttaaaaactagccaggcgtggtggtgcgcgcctgtagtcccagctacttgggaggctgagccctggaggtcgaggctacagtgagctatgatcacaccattgcacttcagcctgggcgacacagcgagaccctgtctcaagaaagaaaaaaaaaagagacaaattacccagaaacccctcccttccccacatggaggccttggcaaatgttaattttcctagaaaatccttcagacctgaagacgcaggaaaagaatctggctctcagggtggcttctgcgtccccgccgccaggccccagactatggtcacagggccgtcctgttcctccccgggactccagaatttctctcctcaaaggaaagaaaacagggcatgcgcttgttggcaaaacgcagggccggctcccaaaaaccccatgtgtgtacgattaaaagttggccgtccccaggcctcccagcgcaaacttaaagagacagggctttgctgaaaaccaaacatgggccagctgggctttttaacaacctagagactttccggagctgcctggaacagagcctgtgggaaacggggcttgccagagacactcacagtttccttcatggcctgttttggtcccctaagaatctccacatcattgtctttcttgtgccttttccttggtgagcaacagaaagggaagggttccaagcctctaaaaatgtgctttgtgatcaggagtgcgctccaaaccaaatacgcgcgctgccctttcgaggccagtgagctcagcctccaaggctttaaagccacatttcagcaagagaaagcgctgagagctcgcaggttcattaaagaaggcaaagcactggtttctctccttagaaaagtaggtttcttggcttgatgtagactggcttgctttgatttttagtgaagggaatgtacgtaaaacaaaatagggcttggctggtcaaaggagacaagcaaggatggatggatggatggatggggatggatggatggatggatgaatagatagatggtgtttgcatgtaaattgcagagaaaacaaaaccaaagctgattggaaacaattaattgtgggtgtctgagggggaaggtcgcagctttgggcagctttgagaagcggtacaagagttctgtgcctgtgtgtccagccctggagccagccagtgcatttattttaagctcttagaagcaactccttggcccaggaatgcgtgacccctgagatgggtccacgcatctctctacacttccttctctccgtgggatactggactcgtgcctctgcgcccattctcttctcacgcatatccatgagctttaatttcactttctgatcacggtacgtccataaagccagtattacacttaaatgaagtattcttttttgtaatcgttttttttagaaggtaaacaaatttaataaagctaccaataatgttgaaaaaaaaaaa

SEQ ID NO: 445406 - DNA, 4686 bp, Homo sapiens
  misc_feature (3604)..(3604): n is a, c, g, or t
  misc_feature (4611)..(4611): n is a, c, g, or t
ctttctcttccccttactcgggacgtgctggtcctcatcgagggcggtgagatgactgaggaccctcagacctcagtctccgtatctgggaaacgggtagagatatctgatgtggagtctgagggtggtggcttggtgggcagtggggggatccaccaggcttaggttcatgttcaggcccagccacttccccatggccccagtgaccccgaggaagccactgtacctttctgtaccctctgcatcccctgtctgtgaaacggggcgataagtgcccatctcatagaattgtcatgacaattaaaagagttgatgttaggctgggtgcagtggctcatgcctgtaatcccagcactttgggaggccaaggcgggcggatcacctgaggtcaggagttcgagaccagcctgaccaacatggagaaacaccatctctactaaaaatacagaattagctaggcgtggtggcaggtgcctgtaatcccagctactcaggaggctgaggcaggagaatcgcttgaacctgggaggcagaggttgccgtgagctgagatcgcgccattgcactccagcctgggcgacaagagcaaaactccgtctcagaaaaaaaaaaaaaaaagagttgatgtgttgaaagacagagaagcgaagacagagacgtggaaagacagggagagagacacggagagagacgcagaaggacagagacgtggagagagacgcagagagacagagacgtggagagacacagagagacgtggagagacacagagagacttggagagagacaaagcaagacaggacgggagaacaaggacaagctcaggtaagcctcagccggtgctgcaggcagtctgactcgcagtccctcaagtgacttccaaggagcatctgtagaaaagaagatggcccaggtcctgcacgtgcctgctcccttcccagggacccctggcccagcctccccacctgccttccctgccaaggaccccgatccaccctactccgtggagaccccctatggctaccgcctggacctggacttcctcaagtacgtggatgacatcgagaagggccacacgctgcgacgcgtggcagtgcagcgccgcccccgcctgagctcgctgccccgtggccctggctcctggtggacgtccactgagtcgctgtgctccaatgccagtggggacagccgccactcagcctattcctactgcggccgtggcttctaccctcagtatggtgctctggagacccgcggtggcttcaatccgcgggtggagcgcacgctgctggatgcccgtcgccgtctcgaggaccaggcggccacacccaccggcctgggctccctgacccccagtgcggccggctcgacagcctccctggtgggcgtggggttgccacccccgacaccacggagttcaggactgtccacaccggtgcctcccagtgccgggcacctggcccacgtgcgggagcagatggcgggtgccctgcggaagctgcggcagctggaggagcaggtgaagctgatccctgtgctccaggtgaagctctcggtgctccaggaggaaaagcggcagctcacagtacaacttaagagccagaagttcctgggccaccccacagcgggccggggtcgcagcgagctctgcctggacctccccgatcccccagaggacccagtggcactggagacccggagtgtgggcacctgggttcgagaacgggacttgggcatgcctgatggggaggctgccctcgccgccaaggtcgctgtgctggagacccagctcaagaaggcgctgcaggagctgcaggcagctcaggcccggcaggctgacccccagccccaggcctggccaccgccggacagcccggtccgcgtggatacagtccgggtggtagaagggccacgggaggtggaggtggtggccagcacagccgctggcgcccccgcacagcgggcccagagcctggagccttacggcacagggctgagggccctggcaatgcctggtaggcctgagagcccacctgtgttccgcagccaggaggtggtggagacaatgtgcccagtgcccgctgcagctaccagcaacgtccatatggtgaagaagattagcatcacagagcgaagctgcgatggagcagcaggcctcccagaagttcctgccgaatcgtcttcgtcacccccggggtccgaggtagcctcccttacacagcctgagaagagcacaggccgagtgcccacccaggagcccacccacagggagcccaccaggcaagcagcctcccaagagtccgaggaggccgggggcaccggcgggcccccggcaggcgtgcgatctatcatgaaacggaaagaggaggttgcagaccccacggcccaccggaggagcctccagttcgtgggggtcaacggcgggtatgagtcgtcatccgaggactccagcacagcagagaacatctcagacaacgacagcacagagaacgaggccccagagccgagggagagggttccgagtgtggccgaagccccccagctcaggcctgcagggacggcagcggccaagaccagccggcaggagtgtcagctgtctcgagaatctcagcacatacccactgctgagggggcatcaggatcaaacacggaggaggagatcaggatggagctaagccctgacctcatctcagcctgcttggccctggaaaagtacctggacaatcccaacgccctcacagagcgggagctgaaagtggcctacaccacagtgctgcaggagtggctgcgcctggcctgccgcagcgacgcacaccccgagctggtgcggcggcacctggtcacgttccgggccatgtctgcgcggctgctggactacgtggtcaacatcgccgacagcaacggcaacacagccctgcactactccgtgtctcatgccaacttccccgtggtgcagcagctgctcgacagcggtgtctgcaaggtggacaaacagaaccgtgctggctacagccctattatgctcaccgccctggccaccctgaagacccaggacgacatcgagactgtccttcagctcttccggcttggcaacatcaatgccaaagccagccaggcaggacagacggccctgatgctggccgtcagccacgggcgggtggacgttgtcaaagccctgctggcctgtgaggcagatgtcaacgtgcaagatgatgacggctccacggccctcatgtgcgcctgtgagcacggccacaaggagatcgcggggctgctgctggccgtgcccagctgtgacatctcactcacagatcgcgatgggagcacagctctgatggtggccttggacgcagggcagagtgagattgcgtccatgctgtattcccgcatgaacatcaagtgctcggtgagtctcaatccggccgggtaggcacgggatgggtgggtctctgaaaggacagagatttgttgtttttgtttttgaggcagagtctcactctgtcgcccagggtggagtgcggtggcacgatctgggctcattgcaacctccgcctcccggcttcaagccattctgctgcctcagcctcctgagtagctgggatancaggtgtggtggcgcatgcctttaatctcagctattctggaggcttaggcgggagaatcacttgaacccaggaggtggaggttgcagtgagccagagatcatgacattgggcaacaagagcaaaactctgtctcaaagaaaaaaaaaaaaaaaaaaaaacaaggacgtgggatggcgagtgatggggaagctattggagtccctcagagaagagatgacatttgagtcaacacctggagaagttagggagtgaatcacatggtcttccgggcagcaggaacaagcagtgcaaaggccctgaggcaggggtgtgtctgacgtgtttaaggagcattcaggccagactcactggttcacgcctgtaatcccagcactttgggatgccatggcgggcagatcacctgaggtcaggagttcgagaccagcctggccaacatggtgaagccctgtctctactaaaaatacaaaaattagctgggtgtggtggtgggcacctgtaatcccagatactcgggaggctgaggcatgagaattgcttgaacctgggaggcagaggttgcagtgagctgagatcgcgccactgcactccagcctgggtgacagagtgagattccgcctcaaaaaaaaaaaaaaattagctgggcctggtggtgcatgcctatagtcccagctactcgggaggctaaggcaggaggattgcttgagcccagatagtcaaggctactgtgagctatgattggaccactatactccagcctggcaacagagcaagaccctgtctttaagcaaaaaaaaatctaggccgggcacggtggctcacgcctgtaatctcaacactttgggaggccaagatgggcggatcacctgaggtcaggagtttgagaccagactgaccaacatggagaaaccccatctctactaaaaacgcaaaattagccgggcgtggtggcgcctgcctgtaatcccagctactaaggaggctgaggcaggagaatcacttgaacccnggaggcagaggttgcagtgagctgagatcatgccattgcactccagcctaggcaacaagagtgaaactctgtctc

SEQ ID NO: 445407 - DNA, 4502 bp, Homo sapiens
ctttctcttccccttactcgggacgtgctggtcctcatcgagggcggtgagatgactgaggaccctcagacctcagtctccgtatctgggaaacgggtagagatatctgatgtggagtctgagggtggtggcttggtgggcagtggggggatccaccaggcttaggttcatgttcaggcccagccacttccccatggccccagtgaccccgaggaagccactgtacctttctgtaccctctgcatcccctgtctgtgaaacggggcgataagtgcccatctcatagaattgtcatgacaattaaaagagttgatgttaggctgggtgcagtggctcatgcctgtaatcccagcactttgggaggccaaggcgggcggatcacctgaggtcaggagttcgagaccagcctgaccaacatggagaaacaccatctctactaaaaatacagaattagctaggcgtggtggcaggtgcctgtaatcccagctactcaggaggctgaggcaggagaatcgcttgaacctgggaggcagaggttgccgtgagctgagatcgcgccattgcactccagcctgggcgacaagagcaaaactccgtctcagaaaaaaaaaaaaaaaagagttgatgtgttgaaagacagagaagcgaagacagagacgtggaaagacagggagagagacacggagagagacgcagaaggacagagacgtggagagagacgcagagagacagagacgtggagagacacagagagacgtggagagacacagagagacttggagagagacaaagcaagacaggacgggagaacaaggacaagctcaggtaagcctcagccggtgctgcaggcagtctgactcgcagtccctcaagtgacttccaaggagcatctgtagaaaagaagatggcccaggtcctgcacgtgcctgctcccttcccagggacccctggcccagcctccccacctgccttccctgccaaggaccccgatccaccctactccgtggagaccccctatggctaccgcctggacctggacttcctcaagtacgtggatgacatcgagaagggccacacgctgcgacgcgtggcagtgcagcgccgcccccgcctgagctcgctgccccgtggccctggctcctggtggacgtccactgagtcgctgtgctccaatgccagtggggacagccgccactcagcctattcctactgcggccgtggcttctaccctcagtatggtgctctggagacccgcggtggcttcaatccgcgggtggagcgcacgctgctggatgcccgtcgccgtctcgaggaccaggcggccacacccaccggcctgggctccctgacccccagtgcggccggctcgacagcctccctggtgggcgtggggttgccacccccgacaccacggagttcaggactgtccacaccggtgcctcccagtgccgggcacctggcccacgtgcgggagcagatggcgggtgccctgcggaagctgcggcagctggaggagcaggtgaagctgatccctgtgctccaggtgaagctctcggtgctccaggaggaaaagcggcagctcacagtacaacttaagagccagaagttcctgggccaccccacagcgggccggggtcgcagcgagctctgcctggacctccccgatcccccagaggacccagtggcactggagacccggagtgtgggcacctgggttcgagaacgggacttgggcatgcctgatggggaggctgccctcgccgccaaggtcgctgtgctggagacccagctcaagaaggcgctgcaggagctgcaggcagctcaggcccggcaggctgacccccagccccaggcctggccaccgccggacagcccggtccgcgtggatacagtccgggtggtagaagggccacgggaggtggaggtggtggccagcacagccgctggcgcccccgcacagcgggcccagagcctggagccttacggcacagggctgagggccctggcaatgcctggtaggcctgagagcccacctgtgttccgcagccaggaggtggtggagacaatgtgcccagtgcccgctgcagctaccagcaacgtccatatggtgaagaagattagcatcacagagcgaagctgcgatggagcagcaggcctcccagaagttcctgccgaatcgtcttcgtcacccccggggtccgaggtagcctcccttacacagcctgagaagagcacaggccgagtgcccacccaggagcccacccacagggagcccaccaggcaagcagcctcccaagagtccgaggaggccgggggcaccggcgggcccccggcaggcgtgcgatctatcatgaaacggaaagaggaggttgcagaccccacggcccaccggaggagcctccagttcgtgggggtcaacggcgggtatgagtcgtcatccgaggactccagcacagcagagaacatctcagacaacgacagcacagagaacgaggccccagagccgagggagagggttccgagtgtggccgaagccccccagctcaggcctgcagggacggcagcggccaagaccagccggcaggagtgtcagctgtctcgagaatctcagcacatacccactgctgagggggcatcaggatcaaacacggaggaggagatcaggatggagctaagccctgacctcatctcagcctgcttggccctggaaaagtacctggacaatcccaacgccctcacagagcgggagctgaaagtggcctacaccacagtgctgcaggagtggctgcgcctggcctgccgcagcgacgcacaccccgagctggtgcggcggcacctggtcacgttccgggccatgtctgcgcggctgctggactacgtggtcaacatcgccgacagcaacggcaacacagccctgcactactccgtgtctcatgccaacttccccgtggtgcagcagctgctcgacagcggtgtctgcaaggtggacaaacagaaccgtgctggctacagccctattatgctcaccgccctggccaccctgaagacccaggacgacatcgagactgtccttcagctcttccggcttggcaacatcaatgccaaagccagccaggcaggacagacggccctgatgctggccgtcagccacgggcgggtggacgttgtcaaagccctgctggcctgtgaggcagatgtcaacgtgcaagatgatgacggctccacggccctcatgtgcgcctgtgagcacggccacaaggagatcgcggggctgctgctggccgtgcccagctgtgacatctcactcacagatcgcgatgggagcacagctctgatggtggccttggacgcagggcagagtgagattgcgtccatgctgtattcccgcatgaacatcaagtgctcgtttgccccaatgtcagatgacgagagccctacatcatcctcggcagaagagtagccgtgagggaggcggggaccagccagaccgggagcaaaccgtcccttgtccccgtctcctccctgttcccgttcctccctggcccaccccactcacactccccaaggcccacggctcaaaggcaagcgagctctccctctgcttccctgggggagccccaacggccacaggactccagctccaagtgggttttcttggctcccctgttcaaagtggccacagcgcagaccgaagcaaaattcttgtatacattggcgccagggctgatgctggggtgtgggttttatgaagaacattgagaacaatcagctggtaattatggatggaggaagagggagaggaaaaaaatattgtatttttgaatcattgttgcaggagggggtgggaatcttaggatttgttgccagatttgaaagtcactggaacttgcatattttcattttaatcctaagtgttattacgcaccagttggggttcacccttcatccctcacatttaattgtctgatatagaatagtgttgtgtccactgccccgctagacggctttcttaggggaattttcttctggttgtttcacaagacagattctgtccttgtcacccgggacagaaaactcagtcttttcaccctcattcagatgaagggactcaggacaggctctgtgacttacagggacccaatcaattcacaatgagaaattaccggccaggcgtggtgactcacgtctgtaatcccagcactttgggagggcaaggcaagagcttgagcttgagcctagacgttaaagaccagcctgggcaatatgatgaaaccctgtctctactaaaaaatacaaaaattagtcacacgtggtgccatacacatgtagttacagctactggggaggctaaagtggaaggatcatttgagcccgggaggtcaaagctgcagtgacccagtatcgcaccactggactccagcctgggtgatacctgtctcaaaaaacaaacaaaaaaactgtgtggtactgggcccagaataaacaactgaaaagaacagaaa

SEQ ID NO: 445408 - DNA, 2170 bp, Homo sapiens
gaactaaatatctttgaccatcccgcccgcggggtctgcctacttaacctgaggcaggtgaaagagcctcacgcagggttaggaacctccgggggcgtggcgtagcgtaacgcagtgttggggaaacttgcggctgtggattgggggaccggaaagggaggggtgggccgcaggcgccggacgtgacgtaagccggaagcgactttccgccgagaaatagggggcgcgtgtttggaaattgatagaaaagataaagggaccgagctgctgtcagcctggcttactgatctgcgtccgtttcaccacggattcagttactaagcatttttttctttttttggttctttgcaacgtgagtggcattggctcagtgatttccatgagcatctctaccagaaaacattgcctcgatgaggtgtggtggaagcccggcagccccttctaatcggctaggcttgagaaagcgtgtacctctgcatttccgaaattaactcagcgtgatcggcaagattttcctcagcatctggtgtcaagacactcgtcactattaattcggaaagaaaaaaaaaaacaaaacaccgttttccagcatttctcttggtggagaactaaacaacaggaaaaatgtctattttccctaagatatctttgagacctgaggttgaaaactatcttaaggaaggctttatgaataaggagattgtgactgctttaggtaaacaagaagcagaaaggaagtttgaaactttgttaaagcacctgtcacatcctccatcatttacaactgtcagagtgaatacacatttagcctcagtacaacatgtgaaaaatctgttacttgatgaacttcagaagcagtttaatggattaagtgttcctattcttcaacatccagaccttcaagatgtgttacttattcctgttattggacccagaaagaatattaaaaaacaacagtgtgaagccattgttggagcccagtgtggcaatgcagttttaagaggagcccatgtctatgccccaggaattgtgtcagcatcacaatttatgaaagctggagatgttatttctgtatactctgatattaaaggaaaatgtaagaaaggagccaaagaatttgatggaacaaaagtatttcttggaaatgggatttctgaactaagccgcaaagaaatcttcagtggattacctgaactgaaaggcatgggcataagaatgacagaaccagtatatctcagcccttcatttgacagtgtactgccccgttacttatttttacaaaatttgccatctgccttagtaagtcatgtactaaatcctcaacctggagagaagattctagacttgtgtgcagcacctggagggaaaacaacacacattgcagcactaatgcatgatcaggtctgctgcggtttgctggaggtccaccccagaccctgtttgaccgggtatcaccagtggaggctgcagaacagcaaaaattgctgcctgttccttcctctggaagcttcatctgaaagggcactggcccgatgctagctggaactctcctgcatgaggtgtctgtcgacccctgttgggtggtctctcctagtcaggaggcacggagatcagggacccacttgaggcaatctgtcccttagcagagctggtacactgtgctgggagaatcccccttgtcaggatcagcttctctcttcagagcccgcaggctggaaagattaagtctgcccaagctgtgcccacagccacccctccccccaggtgctctgtccaagggaaatgagagttttatctgtaagcccctgagtgggcctgctgcctgtccttcagagatgccctgcccagtgaggaggaatctagagaagcagtctggccacaactgctttgctgtgctgcggtcaattcttcccagtccaaacctcccagtctccttagcactgtcaaggtacaacagcctcctgaagactcagtaatggcggatgcccaccaagctcggtcatcccacgttgactccagactgctgtgctggctgtgagaatttcaagccagtggttcttagcttgctgggctccgtgacagtgggacctactgagtgagaccacttggctccctggcattagccccctttccaggggagtaaacggttctgtcttactggggttccagg

SEQ ID NO: 445409 - DNA, 2088 bp, Homo sapiens
gaactaaatatctttgaccatcccgcccgcggggtctgcctacttaacctgaggcaggtgaaagagcctcacgcagggttaggaacctccgggggcgtggcgtagcgtaacgcagtgttggggaaacttgcggctgtggattgggggaccggaaagggaggggtgggccgcaggcgccggacgtgacgtaagccggaagcgactttccgccgagaaatagggggcgcgtgtttggaaattgatagaaaagataaagggaccgagctgctgtcagcctggcttactgatctgcgtccgtttcaccacggattcagttactaagcatttttttctttttttggttctttgcaacgtgagtggcattggctcagtgatttccatgagcatctctaccagaaaacattgcctcgatgaggtgtggtggaagcccggcagccccttctaatcggctaggcttgagaaagcgtgtacctctgcatttccgaaattaactcagcgtgatcggcaagattttcctcagcatctggtgtcaagacactcgtcactattaattcggaaagaaaaaaaaaaacaaaacaccgttttccagcatttctcttggtggagaactaaacaacaggaaaaatgtctattttccctaagatatctttgagacctgaggttgaaaactatcttaaggaaggctttatgaataaggagattgtgactgctttaggtaaacaagaagcagaaaggaagtttgaaactttgttaaagcacctgtcacatcctccatcatttacaactgtcagagtgaatacacatttagcctcagtacaacatgtgaaaaatctgttacttgatgaacttcagaagcagtttaatggattaagtgttcctattcttcaacatccagaccttcaagatgtgttacttattcctgttattggacccagaaagaatattaaaaaacaacagtgtgaagccattgttggagcccagtgtggcaatgcagttttaagaggagcccatgtctatgccccaggaattgtgtcagcatcacaatttatgaaagctggagatgttatttctgtatactctgatattaaaggaaaatgtaagaaaggagccaaagaatttgatggaacaaaagtatttcttggaaatgggatttctgaactaagccgcaaagaaatcttcagtggattacctgaactgaaaatttgccatctgccttagtaagtcatgtactaaatcctcaacctggagagaagattctagacttgtgtgcagcacctggagggaaaacaacacacattgcagcactaatgcatgatcaggtctgctgcggtttgctggaggtccaccccagaccctgtttgaccgggtatcaccagtggaggctgcagaacagcaaaaattgctgcctgttccttcctctggaagcttcatctgaaagggcactggcccgatgctagctggaactctcctgcatgaggtgtctgtcgacccctgttgggtggtctctcctagtcaggaggcacggagatcagggacccacttgaggcaatctgtcccttagcagagctggtacactgtgctgggagaatcccccttgtcaggatcagcttctctcttcagagcccgcaggctggaaagattaagtctgcccaagctgtgcccacagccacccctccccccaggtgctctgtccaagggaaatgagagttttatctgtaagcccctgagtgggcctgctgcctgtccttcagagatgccctgcccagtgaggaggaatctagagaagcagtctggccacaactgctttgctgtgctgcggtcaattcttcccagtccaaacctcccagtctccttagcactgtcaaggtacaacagcctcctgaagactcagtaatggcggatgcccaccaagctcggtcatcccacgttgactccagactgctgtgctggctgtgagaatttcaagccagtggttcttagcttgctgggctccgtgacagtgggacctactgagtgagaccacttggctccctggcattagccccctttccaggggagtaaacggttctgtcttactggggttccagg

SEQ ID NO: 445410 - DNA, 1983 bp, Homo sapiens
aaggcaggctggtacggcccgagtggtaagatgggggcgcgtgtttggaaattgatagaaaagataaagggaccgagctgctgtcagcctggcttactgatctgcgtccgtttcaccacggattcagttactaagcatttttttctttttttggttctttgcaacgtgagtggcattggctcagtgatttccatgagcatctctaccagaaaacattgcctcgatgaggtgtggtggaagcccggcagccccttctaatcggctaggcttgagaaagcgtgtacctctgcatttccgaaattaactcagcgtgatcggcaagattttcctcagcatctggtgtcaagacactcgtcactattaattcggaaagaaaaaaaaaaacaaaacaccgttttccagcatttctcttggtggagaactaaacaacaggaaaaatgtctattttccctaagatatctttgagacctgaggttgaaaactatcttaaggaaggctttatgaataaggagattgtgactgctttaggtaaacaagaagcagaaaggaagtttgaaactttgttaaagcacctgtcacatcctccatcatttacaactgtcagagtgaatacacatttagcctcagtacaacatgtgaaaaatctgttacttgatgaacttcagaagcagtttaatggattaagtgttcctattcttcaacatccagaccttcaagatgtgttacttattcctgttattggacccagaaagaatattaaaaaacaacagtgtgaagccattgttggagcccagtgtggcaatgcagttttaagaggagcccatgtctatgccccaggaattgtgtcagcatcacaatttatgaaagctggagatgttatttctgtatactctgatattaaaggaaaatgtaagaaaggagccaaagaatttgatggaacaaaagtatttcttggaaatgggatttctgaactaagccgcaaagaaatcttcagtggattacctgaactgaaaggcatgggcataagaatgacagaaccagtatatctcagcccttcatttgacagtgtactgccccgttacttatttttacaaaatttgccatctgccttagtaagtcatgtactaaatcctcaacctggagagaagattctagacttgtgtgcagcacctggagggaaaacaacacacattgcagcactaatgcatgatcaggtctgctgcggtttgctggaggtccaccccagaccctgtttgaccgggtatcaccagtggaggctgcagaacagcaaaaattgctgcctgttccttcctctggaagcttcatctgaaagggcactggcccgatgctagctggaactctcctgcatgaggtgtctgtcgacccctgttgggtggtctctcctagtcaggaggcacggagatcagggacccacttgaggcaatctgtcccttagcagagctggtacactgtgctgggagaatcccccttgtcaggatcagcttctctcttcagagcccgcaggctggaaagattaagtctgcccaagctgtgcccacagccacccctccccccaggtgctctgtccaagggaaatgagagttttatctgtaagcccctgagtgggcctgctgcctgtccttcagagatgccctgcccagtgaggaggaatctagagaagcagtctggccacaactgctttgctgtgctgcggtcaattcttcccagtccaaacctcccagtctccttagcactgtcaaggtacaacagcctcctgaagactcagtaatggcggatgcccaccaagctcggtcatcccacgttgactccagactgctgtgctggctgtgagaatttcaagccagtggttcttagcttgctgggctccgtgacagtgggacctactgagtgagaccacttggctccctggcattagccccctttccaggggagtaaacggttctgtcttactggggttccagg

SEQ ID NO: 445411 - DNA, 1535 bp, Homo sapiens
gaactaaatatctttgaccatcccgcccgcggggtctgcctacttaacctgaggcaggtgaaagagcctcacgcagggttaggaacctccgggggcgtggcgtagcgtaacgcagtgttggggaaacttgcggctgtggattgggggaccggaaagggaggggtgggccgcaggcgccggacgtgacgtaagccggaagcgactttccgccgagaaatagggggcgcgtgtttggaaattgatagaaaagataaagggaccgagctgctgtcagcctggcttactgatctgcgtccgtttcaccacggattcagttactaagcatttttttctttttttggttctttgcaacgtgagtggcattggctcagtgatttccatgagcatctctaccagaaaacattgcctcgatgaggtgtggtggaagcccggcagccccttctaatcggctaggcttgagaaagcgtgtacctctgcatttccgaaattaactcagcgtgatcggcaagattttcctcagcatctggtgtcaagacactcgtcactattaattcggaaagaaaaaaaaaaacaaaacaccgttttccagcatttctcttggtggagaactaaacaacaggaaaaatgtctattttccctaagatatctttgagacctgaggttgaaaactatcttaaggaaggctttatgaataaggagattgtgactgctttaggtaaacaagaagcagaaaggaagtttgaaactttgttaaagcacctgtcacatcctccatcatttacaactgtcagagtgaatacacatttagcctcagtacaacatgtgaaaaatctgttacttgatgaacttcagaagcagtttaatggattaagtgttcctattcttcaacatccagaccttcaagatgtgttacttattcctgttattggacccagaaagaatattaaaaaacaacagtgtgaagccattgttggagcccagtgtggcaatgcagttttaagaggagcccatgtctatgccccaggaattgtgtcagcatcacaatttatgaaagctggagatgttatttctgtatactctgatattaaaggaaaatgtaagaaaggagccaaagaatttgatggaacaaaagtatttcttggaaatgggatttctgaactaagccgcaaagaaatcttcagtggattacctgaactgaaaggcatgggcataagaatgacagaaccagtatatctcagcccttcatttgacagtgtactgccccgttacttatttttacaaaatttgccatctgccttagtaagtcatgtactaaatcctcaacctggagagaagattctagacttgtgtgcagcacctggagggaaaacaacacacattgcagcactaatgcatgatcaggcggttcagctgctgaagccagagggtgtgcctggtttatagcacgtgcactataacactggccgaaaatgtagaacaggttgtcctgggcctgaccaaaatttccttgtcctttcagcttcagccccaggaac

SEQ ID NO: 445412 - DNA, 606 bp, Homo sapiens
gggtatagttgggccccatgatcctgaccttcaggccagtggagaccagccccgagaagactcgtccaaaggcgtagaaccgacctttgtcggaggttggcaccattttggaaatatacatcataagagggcctttggcttcaccgctgacctgaggtccaacacgggcggccaggcgttcccccagtgtgtgtttgaccactggcagatcctgcccggagaccccttcgacaacagcagccgccccagccaggtggtggcggagacccgcaagcgcaagggcctgaaagaaggcatccctgccctggacaacttcctggacaaattgtaggcggcccttcctgcagcgcctgccgccccggggactcgcagcacccacagcaccacgtcctcgaattctcagacgacacctggagactgtcccgacacagcgacgctcccctgagaggtttctggggcccgctgcgcagtggcttttgccccagaaaggggaaaggaacacgcgggtagatgatttctagcaggcaggaagtcctgtgcggtgtcaccatgagcacctccagctgtactagtgccattggaataataaatttgataaggtggtga

SEQ ID NO: 445413 - DNA, 304 bp, Homo sapiens
gagagagagagagagagagagagagagagagagagagagagagagagagagagagagagagagagagggacacccaacactttttccatttcttcagagggaaactcagatgtccaaactaattttaacaaacgcattaagaggtttatttgggtacatggcccgcagtggcttttgccccagaaaggggaaaggaacacgcgggtagatgatttctagcaggcaggaagtcctgtgcggtgtcaccatgagcacctccagctgtactagtgccattggaataataaatttgataaggtggtga

SEQ ID NO: 445414 - DNA, 469 bp, Homo sapiens
ctgatgctgcggtcattctagaggatccctcgaagactggcggttggtgatcactgcaacaaggcgttccggcagacagcagctgatcctggacccatcttcaaggtgtttgatgcgatcatgaatttcaagaaagaggagacagcaaaactgatagagaaactggacatcaaactggacagcgaggacaaggacaaagaaggcaaacccctgctgaaggctgtgatgcgccgctggctgcctgccggagacgccttgttgcagatgatcaccatccacctgccctcccctgtgacggcccagaagtaccgctgcgagctcctgtacgaggggcccccggacgacgaggctgccatgggcattaaaagctgtacctcacccgtagctgtacctcacccgtagctgtacctcacccgtagctgtacctcacccgtagctgtacctcacccgtagctgtacctcacccgta

SEQ ID NO: 445415 - DNA, 1037 bp, Homo sapiens
  misc_feature (802)..(802): n is a, c, g, or t
tacgtcggtaccgtgatggctcacaggtggtggcggcaccccatgtggtggtcaggctatctgcccgtcaacgagtcctttggcttcagcgctgaccgtgaggtccaacacgggcgtgcaggcgttcccccagtgtgtgtttgaccactggcagatcctgcccggagaccccttcgacaacagcagccgccccagccaggtggtggcggagacccgcaagcgcaagggcctgaaagaaggcatccctgccctggacaacttcctggacaaattgtaggcggcccttcctgcagcgcctgccgccccggggactcgcagcacccaccggccccaacatcctcaccgacatcaccaagggtgtgcagtacctcaacgagatcaaggacagtgtggtggccggcttccagtgggccaccaaggagggcgcactgtgtgaggagaacatgcggggtgtgcgcttcgacgtccacgacgtcaccctgcacgccgacgccatccaccgcggagggggccagatcatccccacagcacggcgctgcctctacgccagtgtgctgaccgcccagccacgcctcatggagcccatctaccttgtggagatccagtgtccagagcaggtggtcggtggcatctacggggttttgaacaggaagcggggcccgagctgcacctggagatctgcctgaaggacctggaggaggaccacgcctgcatccccatcaagaaatctgacccggtcgtctcgtaccgcgagacggtcagtgaagagtcgaacgtgctctgcctctccaagtcccccaanaagcacaaccggctgtacatgaggcgcggccttccccgacggcctggccgaggacatcgataaaggcgaggtgtccgcccgtcaggagctcaagcagcgggcgcgctacctggccgagaagtacgagtgggacgtggctgaggcccgcaagatctggtgctttgggcccgacggcaccggcccaacatcctcaccgacatcaccaagggatgtactgacgatgtaccagcatgat

SEQ ID NO: 445416 - DNA, 1770 bp, Homo sapiens
ggacgcgtgggtcgaccacgcgtcaacaatcttgatgatgggccgctacgtggagcccatcgaggatgtgccttgtgggaacattgtgggcctcgtgggcgtggaccagttcctggtgaagacgggcaccatcaccaccttcgagcacgcgcacaacatgcgggtgatgaagttcagcgtcagccctgttgtcagagtggccgtggaggccaagaacccggctgacctgcccaagctggtggaggggctgaagcggctggccaagtccgaccccatggtgcagtgcatcatcgaggagtcgggagagcacatcatcgcgggcgccggcgagctgcacctggagatctgcctgaaggacctggaggaggaccacgcctgcatccccatcaagcctgcatccccatcaagaaatctgacccggtcgtctcgtaccgcgagacggtcagtgaagagtcgaacgtgctctgcctctccaagtcccccaacaagcacaaccggctgtacatgaaggcgcggcccttccccgacggcctggccgaggacatcgataaaggcgaggtgtccgcccgtcaggagctcaagcagcgggcgcgctacctggccgagaagtacgagtgggacgtggctgaggcccgcaagatctggtgctttgggcccgacggcaccggccccaacatcctcaccgacatcaccaagggtgtgcagtacctcaacgagatcaaggacagtgtggtggccggcttccagtgggccaccaaggagggcgcactgtgtgaggagaacatgcggggtgtgcgcttcgacgtccacgacgtcaccctgcacgccgacgccatccaccgcggagggggccagatcatccccacagcacggcgctgcctctacgccagtgtgctgaccgcccagccacgcctcatggagcccatctaccttgtggagatccagtgtccagagcaggtggtcggtggcatctacggggttttgaacaggaagcggggccacgtgttcgaggagtcccaggtggccggcacccccatgtttgtggtcaaggcctatctgcccgtcaacgagtcctttggcttcaccgctgacctgaggtccaacacgggcggccaggcgttcccccagtgtgtgtttgaccactggcagatcctgcccggagaccccttcgacaacagcagccgccccagccaggtggtggcggagacccgcaagcgcaagggcctgaaagaaggcatccctgccctggacaacttcctggacaaattgtaggcggcccttcctgcagcgcctgccgccccggggactcgcagcacccacagcaccacgtcctcgaattctcagacgacacctggagactgtcccgacacagcgacgctcccctgagaggtttctggggcccgctgcgtgccatcactcaaccataacacttgatgccgtttctttcaatatttatttccagagtccggaggcagcagacacgccctcttagtagggacttaatgggccggtcggggagggggaggcgggatgggacacccaacactttttccatttcttcagagggaaactcagatgtccaaactaattttaacaaacgcattaagaggtttatttgggtacatggcccgcagtggcttttgccccagaaaggggaaaggaacacgcgggtagatgatttctagcaggcaggaagtcctgtgcggtgtcaccatgagcacctccagctgtactagtgccattggaataataaatttgataaggtggtga

SEQ ID NO: 445417 - DNA, 1781 bp, Homo sapiens
  misc_feature (1756)..(1756): n is a, c, g, or t
ggacgcgtgggtcgaccacgcgtcaacaatcttgatgatgggccgctacgtggagcccatcgaggatgtgccttgtgggaacattgtgggcctcgtgggcgtggaccagttcctggtgaagacgggcaccatcaccaccttcgagcacgcgcacaacatgcgggtgatgaagttcagcgtcagccctgttgtcagagtggccgtggaggccaagaacccggctgacctgcccaagctggtggaggggctgaagcggctggccaagtccgaccccatggtgcagtgcatcatcgaggagtcgggagagcacatcatcgcgggcgccggcgagctgcacctggagatctgcctgaaggacctggaggaggaccacgcctgcatccccatcaagaaatctgacccggtcgtctcgtaccgcgagacggtcagtgaagagtcgaacgtgctctgcctctccaagtcccccaacaagcacaaccggctgtacatgaaggcgcggcccttccccgacggcctggccgaggacatcgataaaggcgaggtgtccgcccgtcaggagctcaagcagcgggcgcgctacctggccgagaagtacgagtgggacgtggctgaggcccgcaagatctggtgctttgggcccgacggcaccggccccaacatcctcaccgacatcaccaagggtgtgcagtacctcaacgagatcaaggacagtgtggtggccggcttccagtgggccaccaaggagggcgcactgtgtgaggagaacatgcggggtgtgcgcttcgacgtccacgacgtcaccctgcacgccgacgccatccaccgcggagggggccagatcatccccacagcacggcgctgcctctacgccagtgtgctgaccgcccagccacgcctcatggagcccatctaccttgtggagatccagtgtccagagcaggtggtcggtggcatctacggggttttgaacaggaagcggggccacgtgttcgaggagtcccaggtggccggcacccccatgtttgtggtcaaggcctatctgcccgtcaacgagtcctttggcttcaccgctgacctgaggtccaacacgggcggccaggcgttcccccagtgtgtgtttgaccactggcagatcctgcccggagaccccttcgacaacagcagccgccccagccaggtggtggcggagacccgcaagcgcaagggcctgaaagaaggcatccctgccctggacaacttcctggacaaattgtaggcggcccttcctgcagcgcctgccgccccggggactcgcagcacccacagcaccacgtcctcgaattctcagacgacacctggagactgtcccgacacagcgacgctcccctgagaggtttctggggcccgctgcgtgccatcactcaaccataacacttgatgccgtttctttcaatatttatttccagagtccggaggcagcagacacgccctcttagtagggacttaatgggccggtcggggagggggaggcgggatgggacacccaacactttttccatttcttcagagggaaactcagatgtccaaactaattttaacaaacgcattaagaggtttatttgggtacatggcccgcagtggcttttgccccagaaaggggaaaggaacacgcgggtagatgatttctagcaggcaggaagtcctgtgcggtgtcaccatgagcacctccagctgtactagtgccattggaataataaatttgataaggtggtgaacnacaacccccccgccaaaaggggggc

SEQ ID NO: 445418 - DNA, 2114 bp, Homo sapiens
ggacgcgtgggtcgaccacgcgtcaacaatcttgatgatgggccgctacgtggagcccatcgaggatgtgccttgtgggaacattgtgggcctcgtgggcgtggaccagttcctggtgaagacgggcaccatcaccaccttcgagcacgcgcacaacatgcgggtgatgaagttcagcgtcagccctgttgtcagagtggccgtggaggccaagaacccggctgacctgcccaagctggtggaggggctgaagcggctggccaagtccgaccccatggtgcagtgcatcatcgaggagtcgggagagcacatcatcgcgggcgccggcgagctgcacctggagatctgcctgaaggacctggaggaggaccacgcctgcatccccatcaagaaatctgacccggtcgtctcgtaccgcgagacggtcagtgaagagtcgaacgtgctctgcctctccaagtcccccaacaagcacaaccggctgtacatgaaggcgcggcccttccccgacggcctggccgaggacatcgataaaggcgaggtgtccgcccgtcaggagctcaagcagcgggcgcgctacctggccgagaagtacgagtgggacgtggctgaggcccgcaagatctggtgctttgggcccgacggcaccggccccaacatcctcaccgacatcaccaagggtgtgcagtacctcaacgagatcaaggacagtgtggtggccggcttccagtgggccaccaaggagggcgcactgtgtgaggagaacatgcggggtgtgcgcttcgacgtccacgacgtcaccctgcacgccgacgccatccaccgcggagggggccagatcatccccacagcacggcgctgcctctacgccagtgtgctgaccgcccagccacgcctcatggagcccatctaccttgtggagatccagtgtccagagcaggtggtcggtggcatctacggggttttgaacaggaagcggggccacgtgttcgaggagtcccaggtggccggcacccccatgtttgtggtcaaggcctatctgcccgtcaacgagtcctttggcttcaccgctgacctgaggtccaacacgggcggccaggcgttcccccagtgtgtgtttgaccactggcagatcctgcccggagaccccttcgacaacagcagccgccccagccaggtggtggcggagacccgcaagcgcaagggcctgaaagaaggcatccctgccctggacaacttcctggacaaattgtaggcggcccttcctgcagcgcctgccgccccggggactcgcagcacccacagcaccacgtcctcgaattctcagacgacacctggagactgtcccgacacagcgacgctcccctgagaggtttctggggcccgctgcgtgccatcactcaaccataacacttgatgccgtttctttcaatatttatttccagagtccggaggcagcagacacgccctcttagtagggacttaatgggccggtcggggagggggaggcgggatgggacacccaacactttttccatttcttcagagggaaactcagatgtccaaactaattttaacaaacgcattaagaggtttatttgggtacatggcccgcagtggcttttgccccagaaaggggaaaggaacacgcgggtagatgatttctagcaggcaggaagtcctgtgcggtgtcaccatgagcacctccagctgtactagtgccattggaataataaatttgataaggtggtgaaaaaacaagccccagcaagccaaagacagtgaacggcacacaagcagcgaaccaccagggggggcggccgcgcgcaccaaaagataacccccggcgggagaggccaaccaagcaagacaggggacccaagccacgatgttttggatgcaaaaagaggacagcacccccaacatacgaggaagggtaatcataccaagcgcaacacccgcgcgccggcataagaaaaaaaaagacgcgggagcgagcggaacaccctcgacagcaggaaagactatggaggcgacaccacacactttccggggggggagacaaaccgaggcaaagacgcccccagcggaagatcaacagcggggaagcagac

SEQ ID NO: 445419 - DNA, 2429 bp, Homo sapiens
  misc_feature (1794)..(1794): n is a, c, g, or t
ggacgcgtgggtcgaccacgcgtcaacaatcttgatgatgggccgctacgtggagcccatcgaggatgtgccttgtgggaacattgtgggcctcgtgggcgtggaccagttcctggtgaagacgggcaccatcaccaccttcgagcacgcgcacaacatgcgggtgatgaagttcagcgtcagccctgttgtcagagtggccgtggaggccaagaacccggctgacctgcccaagctggtggaggggctgaagcggctggccaagtccgaccccatggtgcagtgcatcatcgaggagtcgggagagcacatcatcgcgggcgccggcgagctgcacctggagatctgcctgaaggacctggaggaggaccacgcctgcatccccatcaagaaatctgacccggtcgtctcgtaccgcgagacggtcagtgaagagtcgaacgtgctctgcctctccaagtcccccaacaagcacaaccggctgtacatgaaggcgcggcccttccccgacggcctggccgaggacatcgataaaggcgaggtgtccgcccgtcaggagctcaagcagcgggcgcgctacctggccgagaagtacgagtgggacgtggctgaggcccgcaagatctggtgctttgggcccgacggcaccggccccaacatcctcaccgacatcaccaagggtgtgcagtacctcaacgagatcaaggacagtgtggtggccggcttccagtgggccaccaaggagggcgcactgtgtgaggagaacatgcggggtgtgcgcttcgacgtccacgacgtcaccctgcacgccgacgccatccaccgcggagggggccagatcatccccacagcacggcgctgcctctacgccagtgtgctgaccgcccagccacgcctcatggagcccatctaccttgtggagatccagtgtccagagcaggtggtcggtggcatctacggggttttgaacaggaagcggggccacgtgttcgaggagtcccaggtggccggcacccccatgtttgtggtcaaggcctatctgcccgtcaacgagtcctttggcttcaccgctgacctgaggtccaacacgggcggccaggcgttcccccagtgtgtgtttgaccactggcagatcctgcccggagaccccttcgacaacagcagccgccccagccaggtggtggcggagacccgcaagcgcaagggcctgaaagaaggcatccctgccctggacaacttcctggacaaattgtaggcggcccttcctgcagcgcctgccgccccggggactcgcagcacccacagcaccacgtcctcgaattctcagacgacacctggagactgtcccgacacagcgacgctcccctgagaggtttctggggcccgctgcgtgccatcactcaaccataacacttgatgccgtttctttcaatatttatttccagagtccggaggcagcagacacgccctcttagtagggacttaatgggccggtcggggagggggaggcgggatgggacacccaacactttttccatttcttcagagggaaactcagatgtccaaactaattttaacaaacgcattaagaggtttatttgggtacatggcccgcagtggcttttgccccagaaaggggaaaggaacacgcgggtagatgatttctagcaggcaggaagtcctgtgcggtgtcaccatgagcacctccagctgtactagtgccattggaataataaatttgataaggtggtgaaaaaaacatcaacacaaacaaaacaaaaacacaaaaaaaanaaaaaaaaaaaaacaaaaaaaacaaaagaaaacaaagaagaaaaataaaaacaaaatctaatgaaaaaagttacacatagtacccttagaaaaccagagccatcgtacccatagaggccccacacaaccggcagagcaaggctaaggccctacagctacttgtcatccgggaccaaatagctactcttagctgcaattctttgaacacctaacgttaaactttggaaaggcactgaattaaccaaattgaatgtgttgccgacttcaggcgcccatgcggcagaggatttcacggatatgccacgccctcatgattcgtttatgctaggatccttgtgttctcacttgagtgaacctgtggcttcagttgtatcaactacactaatctttcacagctcgcttggataacccttgctatggtgtctaagttacctcgaagcaatgttgcaatcgccatttatcaatttgctggtcctccttgaaacaatctctcaaggtttctagggctattggtaaatgtgccttccactctcctcaaagtgtttttcctccattatgtcagctttaaattgctaaccgtcacaagccccagtgaacactggcaactcggtcaaaccttgcactgcttggaaccc

SEQ ID NO: 445420 - DNA, 2465 bp, Homo sapiens
  misc_feature (1766)..(1766): n is a, c, g, or t
ggacgcgtgggtcgaccacgcgtcaacaatcttgatgatgggccgctacgtggagcccatcgaggatgtgccttgtgggaacattgtgggcctcgtgggcgtggaccagttcctggtgaagacgggcaccatcaccaccttcgagcacgcgcacaacatgcgggtgatgaagttcagcgtcagccctgttgtcagagtggccgtggaggccaagaacccggctgacctgcccaagctggtggaggggctgaagcggctggccaagtccgaccccatggtgcagtgcatcatcgaggagtcgggagagcacatcatcgcgggcgccggcgagctgcacctggagatctgcctgaaggacctggaggaggaccacgcctgcatccccatcaagaaatctgacccggtcgtctcgtaccgcgagacggtcagtgaagagtcgaacgtgctctgcctctccaagtcccccaacaagcacaaccggctgtacatgaaggcgcggcccttccccgacggcctggccgaggacatcgataaaggcgaggtgtccgcccgtcaggagctcaagcagcgggcgcgctacctggccgagaagtacgagtgggacgtggctgaggcccgcaagatctggtgctttgggcccgacggcaccggccccaacatcctcaccgacatcaccaagggtgtgcagtacctcaacgagatcaaggacagtgtggtggccggcttccagtgggccaccaaggagggcgcactgtgtgaggagaacatgcggggtgtgcgcttcgacgtccacgacgtcaccctgcacgccgacgccatccaccgcggagggggccagatcatccccacagcacggcgctgcctctacgccagtgtgctgaccgcccagccacgcctcatggagcccatctaccttgtggagatccagtgtccagagcaggtggtcggtggcatctacggggttttgaacaggaagcggggccacgtgttcgaggagtcccaggtggccggcacccccatgtttgtggtcaaggcctatctgcccgtcaacgagtcctttggcttcaccgctgacctgaggtccaacacgggcggccaggcgttcccccagtgtgtgtttgaccactggcagatcctgcccggagaccccttcgacaacagcagccgccccagccaggtggtggcggagacccgcaagcgcaagggcctgaaagaaggcatccctgccctggacaacttcctggacaaattgtaggcggcccttcctgcagcgcctgccgccccggggactcgcagcacccacagcaccacgtcctcgaattctcagacgacacctggagactgtcccgacacagcgacgctcccctgagaggtttctggggcccgctgcgtgccatcactcaaccataacacttgatgccgtttctttcaatatttatttccagagtccggaggcagcagacacgccctcttagtagggacttaatgggccggtcggggagggggaggcgggatgggacacccaacactttttccatttcttcagagggaaactcagatgtccaaactaattttaacaaacgcattaagaggtttatttgggtacatggcccgcagtggcttttgccccagaaaggggaaaggaacacgcgggtagatgatttctagcaggcaggaagtcctgtgcggtgtcaccatgagcacctccagctgtactagtgccattggaataataaatttgataaggtggtgaaaaaaaaaaaaanaaaaaaaaaaaaaaaaaaaaaaaaaaaaaactttttggggcccatatgggcccctagagaaaacgctttacgaaaacacaactaggaatggggacggcgcgggcccccaagataagtgaacagtgaacccgtgggccacaacagcgggttccaaactgggggaaacaccggggcacacgacacaagagggcaggaggaaaatacaccaccacatcataaagaaagaccaccggggaggggcaccacacaaggacagaggtcatgggacagacaaacacccccaagacgggagagcatctcggggagcggccaacaaaacaggggaggctcctctcaccaacaagagggagacccaaacagccagagagacccgcgagaatatataaagaataacaagcacccaggagcaggggaggacaacacagcagcggagaagaaagacaaagaagcagccgcgcagagcacaggaggcagaggagcgggagacgcacgcgacagaccagagagcaggggcgaacgggagaaggggaagcagggagagcagaggaagagaacgagggccaacggcgagggagccaagacggcagaaagagagcgacggagggcacgcagaaagcacgcagagaagaagcacgaagcagagaggagagaaccccaaacaggaaggaagaacagagcagaaggaaacgtaggagaagg

SEQ ID NO: 445421 - DNA, 2404 bp, Homo sapiens
  misc_feature (1766)..(1766): n is a, c, g, or t
ggacgcgtgggtcgaccacgcgtcaacaatcttgatgatgggccgctacgtggagcccatcgaggatgtgccttgtgggaacattgtgggcctcgtgggcgtggaccagttcctggtgaagacgggcaccatcaccaccttcgagcacgcgcacaacatgcgggtgatgaagttcagcgtcagccctgttgtcagagtggccgtggaggccaagaacccggctgacctgcccaagctggtggaggggctgaagcggctggccaagtccgaccccatggtgcagtgcatcatcgaggagtcgggagagcacatcatcgcgggcgccggcgagctgcacctggagatctgcctgaaggacctggaggaggaccacgcctgcatccccatcaagaaatctgacccggtcgtctcgtaccgcgagacggtcagtgaagagtcgaacgtgctctgcctctccaagtcccccaacaagcacaaccggctgtacatgaaggcgcggcccttccccgacggcctggccgaggacatcgataaaggcgaggtgtccgcccgtcaggagctcaagcagcgggcgcgctacctggccgagaagtacgagtgggacgtggctgaggcccgcaagatctggtgctttgggcccgacggcaccggccccaacatcctcaccgacatcaccaagggtgtgcagtacctcaacgagatcaaggacagtgtggtggccggcttccagtgggccaccaaggagggcgcactgtgtgaggagaacatgcggggtgtgcgcttcgacgtccacgacgtcaccctgcacgccgacgccatccaccgcggagggggccagatcatccccacagcacggcgctgcctctacgccagtgtgctgaccgcccagccacgcctcatggagcccatctaccttgtggagatccagtgtccagagcaggtggtcggtggcatctacggggttttgaacaggaagcggggccacgtgttcgaggagtcccaggtggccggcacccccatgtttgtggtcaaggcctatctgcccgtcaacgagtcctttggcttcaccgctgacctgaggtccaacacgggcggccaggcgttcccccagtgtgtgtttgaccactggcagatcctgcccggagaccccttcgacaacagcagccgccccagccaggtggtggcggagacccgcaagcgcaagggcctgaaagaaggcatccctgccctggacaacttcctggacaaattgtaggcggcccttcctgcagcgcctgccgccccggggactcgcagcacccacagcaccacgtcctcgaattctcagacgacacctggagactgtcccgacacagcgacgctcccctgagaggtttctggggcccgctgcgtgccatcactcaaccataacacttgatgccgtttctttcaatatttatttccagagtccggaggcagcagacacgccctcttagtagggacttaatgggccggtcggggagggggaggcgggatgggacacccaacactttttccatttcttcagagggaaactcagatgtccaaactaattttaacaaacgcattaagaggtttatttgggtacatggcccgcagtggcttttgccccagaaaggggaaaggaacacgcgggtagatgatttctagcaggcaggaagtcctgtgcggtgtcaccatgagcacctccagctgtactagtgccattggaataataaatttgataaggtggtgaaaaaaaaaaaaanaaaaaaaaaaaaaaaaaaaaaaaaaaaaaaaaaaaaaaaaaaaacacgggggcttttttgggggggggggaacaacagcggagacagagaagtgggcgacgacggacaaaacacagaagaacagaaaggacgcaaccagaatataggataacaaaagggggagaagacatagagacgggccaccaacaaataagagcagagagaaaatcataaagagagaaagacagaggagataacacaaggaaacaaaaagagacacgacaagaagacacaagatacagaagaagagaagaagagaagaggagggaaaaaaagagagagaagaaggaggaagaaagacgagaagagagaacaagacgagaggaggagagaagaagacgagagagtcaggaaagaacgacaaaaacagcgaaaagaaagggggaaaggaaaagccgagagaaagaagaaaagaacaaaaagacgcaaaggaggaagagggtaagtagacaggggagcagaacagagcagcaagacacacgagaacagaggaagcagaggaagcaacagaccagaacatgacacaaagatgaaaagacgaggaggaacaaaaacagacacaagatacaacagaaaagagacacgatggacgcaggagc

SEQ ID NO: 445422 - DNA, 2346 bp, Homo sapiens
ggacgcgtgggtcgaccacgcgtcaacaatcttgatgatgggccgctacgtggagcccatcgaggatgtgccttgtgggaacattgtgggcctcgtgggcgtggaccagttcctggtgaagacgggcaccatcaccaccttcgagcacgcgcacaacatgcgggtgatgaagttcagcgtcagccctgttgtcagagtggccgtggaggccaagaacccggctgacctgcccaagctggtggaggggctgaagcggctggccaagtccgaccccatggtgcagtgcatcatcgaggagtcgggagagcacatcatcgcgggcgccggcgagctgcacctggagatctgcctgaaggacctggaggaggaccacgcctgcatccccatcaagaaatctgacccggtcgtctcgtaccgcgagacggtcagtgaagagtcgaacgtgctctgcctctccaagtcccccaacaagcacaaccggctgtacatgaaggcgcggcccttccccgacggcctggccgaggacatcgataaaggcgaggtgtccgcccgtcaggagctcaagcagcgggcgcgctacctggccgagaagtacgagtgggacgtggctgaggcccgcaagatctggtgctttgggcccgacggcaccggccccaacatcctcaccgacatcaccaagggtgtgcagtacctcaacgagatcaaggacagtgtggtggccggcttccagtgggccaccaaggagggcgcactgtgtgaggagaacatgcggggtgtgcgcttcgacgtccacgacgtcaccctgcacgccgacgccatccaccgcggagggggccagatcatccccacagcacggcgctgcctctacgccagtgtgctgaccgcccagccacgcctcatggagcccatctaccttgtggagatccagtgtccagagcaggtggtcggtggcatctacggggttttgaacaggaagcggggccacgtgttcgaggagtcccaggtggccggcacccccatgtttgtggtcaaggcctatctgcccgtcaacgagtcctttggcttcaccgctgacctgaggtccaacacgggcggccaggcgttcccccagtgtgtgtttgaccactggcagatcctgcccggagaccccttcgacaacagcagccgccccagccaggtggtggcggagacccgcaagcgcaagggcctgaaagaaggcatccctgccctggacaacttcctggacaaattgtaggcggcccttcctgcagcgcctgccgccccggggactcgcagcacccacagcaccacgtcctcgaattctcagacgacacctggagactgtcccgacacagcgacgctcccctgagaggtttctggggcccgctgcgtgccatcactcaaccataacacttgatgccgtttctttcaatatttatttccagagtccggaggcagcagacacgccctcttagtagggacttaatgggccggtcggggagggggaggcgggatgggacacccaacactttttccatttcttcagagggaaactcagatgtccaaactaattttaacaaacgcattaagaggtttatttgggtacatggcccgcagtggcttttgccccagaaaggggaaaggaacacgcgggtagatgatttctagcaggcaggaagtcctgtgcggtgtcaccatgagcacctccagctgtactagtgccattggaataataaatttgataaggtggtgaaaaaaaaaaaaaaaaaaaaaaaaaaaaaaaaaaaaaaaaaaaaaaggggggggggcgccaaagaaatcctcccagagaggggggcccacaaccgatacgcgcggccaccacaggtttcgtggtggcacaaagggggcgccccaataaagggagggcgccgaattataaaaccccaagagagcgagagggggcgggagtatcacacacacgcgcagccacacggggagcacaacagggagaaaaggcgggggcgacctctgcggcgggaaggagagacccccctactaagatgagagaggggagggggacaccaacacggtggggaacaaccaaccaccacaggcgaaatacttaacgaaccgccctacgagggcgaaaaatatccacaactccctccaagccgggccccaacgggggggtgcacaacccccacaacgcgggccctcctagagagcggagccgcgccccgcgaaacaactcctgagcgaaccaaacgagggcccgaactcacaacatacccacgaccaacaacctttcactacacccccgggcaggaaccaccccagaaaaccaacaaacaccaccatcccccc

SEQ ID NO: 445423 - DNA, 2388 bp, Homo sapiens
ggacgcgtgggtcgaccacgcgtcaacaatcttgatgatgggccgctacgtggagcccatcgaggatgtgccttgtgggaacattgtgggcctcgtgggcgtggaccagttcctggtgaagacgggcaccatcaccaccttcgagcacgcgcacaacatgcgggtgatgaagttcagcgtcagccctgttgtcagagtggccgtggaggccaagaacccggctgacctgcccaagctggtggaggggctgaagcggctggccaagtccgaccccatggtgcagtgcatcatcgaggagtcgggagagcacatcatcgcgggcgccggcgagctgcacctggagatctgcctgaaggacctggaggaggaccacgcctgcatccccatcaagaaatctgacccggtcgtctcgtaccgcgagacggtcagtgaagagtcgaacgtgctctgcctctccaagtcccccaacaagcacaaccggctgtacatgaaggcgcggcccttccccgacggcctggccgaggacatcgataaaggcgaggtgtccgcccgtcaggagctcaagcagcgggcgcgctacctggccgagaagtacgagtgggacgtggctgaggcccgcaagatctggtgctttgggcccgacggcaccggccccaacatcctcaccgacatcaccaagggtgtgcagtacctcaacgagatcaaggacagtgtggtggccggcttccagtgggccaccaaggagggcgcactgtgtgaggagaacatgcggggtgtgcgcttcgacgtccacgacgtcaccctgcacgccgacgccatccaccgcggagggggccagatcatccccacagcacggcgctgcctctacgccagtgtgctgaccgcccagccacgcctcatggagcccatctaccttgtggagatccagtgtccagagcaggtggtcggtggcatctacggggttttgaacaggaagcggggccacgtgttcgaggagtcccaggtggccggcacccccatgtttgtggtcaaggcctatctgcccgtcaacgagtcctttggcttcaccgctgacctgaggtccaacacgggcggccaggcgttcccccagtgtgtgtttgaccactggcagatcctgcccggagaccccttcgacaacagcagccgccccagccaggtggtggcggagacccgcaagcgcaagggcctgaaagaaggcatccctgccctggacaacttcctggacaaattgtaggcggcccttcctgcagcgcctgccgccccggggactcgcagcacccacagcaccacgtcctcgaattctcagacgacacctggagactgtcccgacacagcgacgctcccctgagaggtttctggggcccgctgcgtgccatcactcaaccataacacttgatgccgtttctttcaatatttatttccagagtccggaggcagcagacacgccctcttagtagggacttaatgggccggtcggggagggggaggcgggatgggacacccaacactttttccatttcttcagagggaaactcagatgtccaaactaattttaacaaacgcattaagaggtttatttgggtacatggcccgcagtggcttttgccccagaaaggggaaaggaacacgcgggtagatgatttctagcaggcaggaagtcctgtgcggtgtcaccatgagcacctccagctgtactagtgccattggaataataaatttgataaggtggtgaaaaaaaaaaaaaacaaaaaaaacaaaagaaaacaaagaagaaaaataaaaacaaaatctaatgaaaaaagttacacatagtacccttagaaaaccagagccatcgtacccatagaggccccacacaaccggcagagcaaggctaaggccctacagctacttgtcatccgggaccaaatagctactcttagctgcaattctttgaacacctaacgttaaactttggaaaggcactgaattaaccaaattgaatgtgttgccgacttcaggcgcccatgcggcagaggatttcacggatatgccacgccctcatgattcgtttatgctaggatccttgtgttctcacttgagtgaacctgtggcttcagttgtatcaactacactaatctttcacagctcgcttggataacccttgctatggtgtctaagttacctcgaagcaatgttgcaatcgccatttatcaatttgctggtcctccttgaaacaatctctcaaggtttctagggctattggtaaatgtgccttccactctcctcaaagtgtttttcctccattatgtcagctttaaattgctaaccgtcacaagccccagtgaacactggcaactcggtcaaaccttgcactgcttggaaccc

SEQ ID NO: 445424 - DNA, 1818 bp, Homo sapiens
ggacgcgtgggtcgaccacgcgtcaacaatcttgatgatgggccgctacgtggagcccatcgaggatgtgccttgtgggaacattgtgggcctcgtgggcgtggaccagttcctggtgaagacgggcaccatcaccaccttcgagcacgcgcacaacatgcgggtgatgaagttcagcgtcagccctgttgtcagagtggccgtggaggccaagaacccggctgacctgcccaagctggtggaggggctgaagcggctggccaagtccgaccccatggtgcagtgcatcatcgaggagtcgggagagcacatcatcgcgggcgccggcgagctgcacctggagatctgcctgaaggacctggaggaggaccacgcctgcatccccatcaagaaatctgacccggtcgtctcgtaccgcgagacggtcagtgaagagtcgaacgtgctctgcctctccaagtcccccaacaagcacaaccggctgtacatgaaggcgcggcccttccccgacggcctggccgaggacatcgataaaggcgaggtgtccgcccgtcaggagctcaagcagcgggcgcgctacctggccgagaagtacgagtgggacgtggctgaggcccgcaagatctggtgctttgggcccgacggcaccggccccaacatcctcaccgacatcaccaagggtgtgcagtacctcaacgagatcaaggacagtgtggtggccggcttccagtgggccaccaaggagggcgcactgtgtgaggagaacatgcggggtgtgcgcttcgacgtccacgacgtcaccctgcacgccgacgccatccaccgcggagggggccagatcatccccacagcacggcgctgcctctacgccagtgtgctgaccgcccagccacgcctcatggagcccatctaccttgtggagatccagtgtccagagcaggtggtcggtggcatctacggggttttgaacaggaagcggggccacgtgttcgaggagtcccaggtggccggcacccccatgtttgtggtcaaggcctatctgcccgtcaacgagtcctttggcttcaccgctgacctgaggtccaacacgggcggccaggcgttcccccagtgtgtgtttgaccactggcagatcctgcccggagaccccttcgacaacagcagccgccccagccaggtggtggcggagacccgcaagcgcaagggcctgaaagaaggcatccctgccctggacaacttcctggacaaattgtaggcggcccttcctgcagcgcctgccgccccggggactcgcagcacccacagcaccacgtcctcgaattctcagacgacacctggagactgtcccgacacagcgacgctcccctgagaggtttctggggcccgctgcgtgccatcactcaaccataacacttgatgccgtttctttcaatatttatttccagagtccggaggcagcagacacgccctcttagtagggacttaatgggccggtcggggagggggaggcgggatgggacacccaacactttttccatttcttcagagggaaactcagatgtccaaactaattttaacaaacgcattaagaggtttatttgggtacatggcccgcagtggcttttgccccagaaaggggaaaggaacacgcgggtagatgatttctagcaggcaggaagtcctgtgcggtgtcaccatgagcacctccagctgtactagtgccattggaataataaatttgataaggtggtgaatcagagctataccaccagttgtagattggtttttttacacagttgtatatatgtgacacccaag

SEQ ID NO: 445425 - DNA, 2442 bp, Homo sapiens
  misc_feature (1849)..(1849): n is a, c, g, or t
  misc_feature (2181)..(2181): n is a, c, g, or t
ggacgcgtgggtcgaccacgcgtcaacaatcttgatgatgggccgctacgtggagcccatcgaggatgtgccttgtgggaacattgtgggcctcgtgggcgtggaccagttcctggtgaagacgggcaccatcaccaccttcgagcacgcgcacaacatgcgggtgatgaagttcagcgtcagccctgttgtcagagtggccgtggaggccaagaacccggctgacctgcccaagctggtggaggggctgaagcggctggccaagtccgaccccatggtgcagtgcatcatcgaggagtcgggagagcacatcatcgcgggcgccggcgagctgcacctggagatctgcctgaaggacctggaggaggaccacgcctgcatccccatcaagaaatctgacccggtcgtctcgtaccgcgagacggtcagtgaagagtcgaacgtgctctgcctctccaagtcccccaacaagcacaaccggctgtacatgaaggcgcggcccttccccgacggcctggccgaggacatcgataaaggcgaggtgtccgcccgtcaggagctcaagcagcgggcgcgctacctggccgagaagtacgagtgggacgtggctgaggcccgcaagatctggtgctttgggcccgacggcaccggccccaacatcctcaccgacatcaccaagggtgtgcagtacctcaacgagatcaaggacagtgtggtggccggcttccagtgggccaccaaggagggcgcactgtgtgaggagaacatgcggggtgtgcgcttcgacgtccacgacgtcaccctgcacgccgacgccatccaccgcggagggggccagatcatccccacagcacggcgctgcctctacgccagtgtgctgaccgcccagccacgcctcatggagcccatctaccttgtggagatccagtgtccagagcaggtggtcggtggcatctacggggttttgaacaggaagcggggccacgtgttcgaggagtcccaggtggccggcacccccatgtttgtggtcaaggcctatctgcccgtcaacgagtcctttggcttcaccgctgacctgaggtccaacacgggcggccaggcgttcccccagtgtgtgtttgaccactggcagatcctgcccggagaccccttcgacaacagcagccgccccagccaggtggtggcggagacccgcaagcgcaagggcctgaaagaaggcatccctgccctggacaacttcctggacaaattgtaggcggcccttcctgcagcgcctgccgccccggggactcgcagcacccacagcaccacgtcctcgaattctcagacgacacctggagactgtcccgacacagcgacgctcccctgagaggtttctggggcccgctgcgtgccatcactcaaccataacacttgatgccgtttctttcaatatttatttccagagtccggaggcagcagacacgccccctgtgacggcccagaagtaccgctgcgagctcctgtacgaggggcccccggacgacgaggctgccatgggcattaaaagctgtgaccccaaaggccctcttatgatgtatatttccaaaatggtgccaacctccgacaaaggtcggttctacgcctttggacgagtcttctcggggctggtctccactggcctgaaggtcaggatcatggggcccaactatacccctgggaagaaggaggacctctacctgaagccaatccagagaacaatcttgatgatgggccgctacgtggagcccatcgaggatgtgccttgtgggaacattgtgggcctcgtgggcgtggaccagttcctggtgaagacgggcaccatcaccanccttcgagcacgcgcacaacatgcgggtgatgaagttcagcgtcagccctgttgtcagagtggccgtggaggccaagaacccggctgacctgcccaagctggtggaggggctgaagcggctggccaagtccgaccccatggttgcagtgcatcatcgaggagtcgggagagcacatcatcgcggcgccggcgagctgcacctggagatctgcctgaaggacctggaggaggaccacgcctgcatccccatcaagaaatctgacccggtcgtctcgtaccgcgagacggtcagtgaagagtcgaacgtgctctgcctctccaagtcccccaanaagcacaaccggctgtacatgaggggacacccaacactttttccatttcttcagagggaaactcagatgtccaaactaattttaacaaacgcattaagaggtttatttgggtacatggcccgcagtggcttttgccccagaaaggggaaaggaacacgcgggtagatgatttctagcaggcaggaagtcctgtgcggtgtcaccatgagcacctccagctgtactagtgccattggaataataaatttgataaggtggtga

SEQ ID NO: 445426 - DNA, 1702 bp, Homo sapiens
ggacgcgtgggtcgaccacgcgtcaacaatcttgatgatgggccgctacgtggagcccatcgaggatgtgccttgtgggaacattgtgggcctcgtgggcgtggaccagttcctggtgaagacgggcaccatcaccaccttcgagcacgcgcacaacatgcgggtgatgaagttcagcgtcagccctgttgtcagagtggccgtggaggccaagaacccggctgacctgcccaagctggtggaggggctgaagcggctggccaagtccgaccccatggtgcagtgcatcatcgaggagtcgggagagcacatcatcgcgggcgccggcgagctgcacctggagatctgcctgaaggacctggaggaggaccacgcctgcatccccatcaagaaatctgacccggtcgtctcgtaccgcgagacggtcagtgaagagtcgaacgtgctctgcctctccaagtcccccaacaagcacaaccggctgtacatgaaggcgcggcccttccccgacggcctggccgaggacatcgataaaggcgaggtgtccgcccgtcaggagctcaagcagcgggcgcgctacctggccgagaagtacgagtgggacgtggctgaggcccgcaagatctggtgctttgggcccgacggcaccggccccaacatcctcaccgacatcaccaagggtgtgcagtacctcaacgagatcaaggacagtgtggtggccggcttccagtgggccaccaaggagggcgcactgtgtgaggagaacatgcggggtgtgcgcttcgacgtccacgacgtcaccctgcacgccgacgccatccaccgcggagggggccagatcatccccacagcacggcgctgcctctacgccagtgtgctgaccgcccagccacgcctcatggagcccatctaccttgtggagatccagtgtccagagcaggtggtcggtggcatctacggggttttgaacaggaagcggggccacgtgttcgaggagtcccaggtggccggcacccccatgtttgtggtcaaggcctatctgcccgtcaacgagtcctttggcttcaccgctgacctgaggtccaacacgggcggccaggcgttcccccagtgtgtgtttgaccactggcagatcctgcccggagaccccttcgacaacagcagccgccccagccaggtggtggcggagacccgcaagcgcaagggcctgaaagaaggcatccctgccctggacaacttcctggacaaattgtaggcggcccttcctgcagcgcctgccgccccggggactcgcagcacccacagcaccacgtcctcgaattctcagacgacacctggagactgtcccgacacagcgacgctcccctgagaggtttctggggcccgctgcgtgccatcactcaaccataacacttgatgccgtttctttcaatatttatttccagagtccggaggcagcagacacgccttcactgatacccggaaggacgagcaggagcgttgcatcaccatcaagtcaactgccatctccctcttctacgagctctcggagaatgacttgaacttcatcaagcagagcaaggacggtgccggcttccctcactcaacctcattgactcccccgggcatgtcgacttctcctcggaggtgactgctgccctccgagtcaccgatgcgcattggtggtggtgacctgctaccc

SEQ ID NO: 445427 - DNA, 1629 bp, Homo sapiens
ggacgcgtgggtcgaccacgcgtcaacaatcttgatgatgggccgctacgtggagcccatcgaggatgtgccttgtgggaacattgtgggcctcgtgggcgtggaccagttcctggtgaagacgggcaccatcaccaccttcgagcacgcgcacaacatgcgggtgatgaagttcagcgtcagccctgttgtcagagtggccgtggaggccaagaacccggctgacctgcccaagctggtggaggggctgaagcggctggccaagtccgaccccatggtgcagtgcatcatcgaggagtcgggagagcacatcatcgcgggcgccggcgagctgcacctggagatctgcctgaaggacctggaggaggaccacgcctgcatccccatcaagaaatctgacccggtcgtctcgtaccgcgagacggtcagtgaagagtcgaacgtgctctgcctctccaagtcccccaacaagcacaaccggctgtacatgaaggcgcggcccttccccgacggcctggccgaggacatcgataaaggcgaggtgtccgcccgtcaggagctcaagcagcgggcgcgctacctggccgagaagtacgagtgggacgtggctgaggcccgcaagatctggtgctttgggcccgacggcaccggccccaacatcctcaccgacatcaccaagggtgtgcagtacctcaacgagatcaaggacagtgtggtggccggcttccagtgggccaccaaggagggcgcactgtgtgaggagaacatgcggggtgtgcgcttcgacgtccacgacgtcaccctgcacgccgacgccatccaccgcggagggggccagatcatccccacagcacggcgctgcctctacgccagtgtgctgaccgcccagccacgcctcatggagcccatctaccttgtggagatccagtgtccagagcaggtggtcggtggcatctacggggttttgaacaggaagcggggccacgtgttcgaggagtcccaggtggccggcacccccatgtttgtggtcaaggcctatctgcccgtcaacgagtcctttggcttcaccgctgacctgaggtccaacacgggcggccaggcgttcccccagtgtgtgtttgaccactggcagatcctgcccggagaccccttcgacaacagcagccgccccagccaggtggtggcggagacccgcaagcgcaagggcctgaaagaaggcatccctgccctggacaacttcctggacaaattgtaggcggcccttcctgcagcgcctgccgccccggggactcgcagcacccacagcaccacgtcctcgaattctcagacgacacctggagactgtcccgacacagcgacgctcccctgagaggtttctggggcccgctgcggggacacccaacactttttccatttcttcagagggaaactcagatgtccaaactaattttaacaaacgcattaagaggtttatttgggtacatggcccgcagtggcttttgccccagaaaggggaaaggaacacgcgggtagatgatttctagcaggcaggaagtcctgtgcggtgtcaccatgagcacctccagctgtactagtgccattggaataataaatttgataaggtggtga

SEQ ID NO: 445428 - DNA, 2330 bp, Homo sapiens
  misc_feature (1695)..(1695): n is a, c, g, or t
ggacgcgtgggtcgaccacgcgtcaacaatcttgatgatgggccgctacgtggagcccatcgaggatgtgccttgtgggaacattgtgggcctcgtgggcgtggaccagttcctggtgaagacgggcaccatcaccaccttcgagcacgcgcacaacatgcgggtgatgaagttcagcgtcagccctgttgtcagagtggccgtggaggccaagaacccggctgacctgcccaagctggtggaggggctgaagcggctggccaagtccgaccccatggtgcagtgcatcatcgaggagtcgggagagcacatcatcgcgggcgccggcgagctgcacctggagatctgcctgaaggacctggaggaggaccacgcctgcatccccatcaagaaatctgacccggtcgtctcgtaccgcgagacggtcagtgaagagtcgaacgtgctctgcctctccaagtcccccaacaagcacaaccggctgtacatgaaggcgcggcccttccccgacggcctggccgaggacatcgataaaggcgaggtgtccgcccgtcaggagctcaagcagcgggcgcgctacctggccgagaagtacgagtgggacgtggctgaggcccgcaagatctggtgctttgggcccgacggcaccggccccaacatcctcaccgacatcaccaagggtgtgcagtacctcaacgagatcaaggacagtgtggtggccggcttccagtgggccaccaaggagggcgcactgtgtgaggagaacatgcggggtgtgcgcttcgacgtccacgacgtcaccctgcacgccgacgccatccaccgcggagggggccagatcatccccacagcacggcgctgcctctacgccagtgtgctgaccgcccagccacgcctcatggagcccatctaccttgtggagatccagtgtccagagcaggtggtcggtggcatctacggggttttgaacaggaagcggggccacgtgttcgaggagtcccaggtggccggcacccccatgtttgtggtcaaggcctatctgcccgtcaacgagtcctttggcttcaccgctgacctgaggtccaacacgggcggccaggcgttcccccagtgtgtgtttgaccactggcagatcctgcccggagaccccttcgacaacagcagccgccccagccaggtggtggcggagacccgcaagcgcaagggcctgaaagaaggcatccctgccctggacaacttcctggacaaattgtaggcggcccttcctgcagcgcctgccgccccggggactcgcagcacccacagcaccacgtcctcgaattctcagacgacacctggagactgtcccgacacagcgacgctcccctgagaggtttctggggcccgctgcggggacacccaacactttttccatttcttcagagggaaactcagatgtccaaactaattttaacaaacgcattaagaggtttatttgggtacatggcccgcagtggcttttgccccagaaaggggaaaggaacacgcgggtagatgatttctagcaggcaggaagtcctgtgcggtgtcaccatgagcacctccagctgtactagtgccattggaataataaatttgataaggtggtgaaaaaaaaaaaaaaaaaaacaaaaaaaaaaaacatcaacacaaacaaaacaaaaacacaaaaaaaanaaaaaaaaaaaaacaaaaaaaacaaaagaaaacaaagaagaaaaataaaaacaaaatctaatgaaaaaagttacacatagtacccttagaaaaccagagccatcgtacccatagaggccccacacaaccggcagagcaaggctaaggccctacagctacttgtcatccgggaccaaatagctactcttagctgcaattctttgaacacctaacgttaaactttggaaaggcactgaattaaccaaattgaatgtgttgccgacttcaggcgcccatgcggcagaggatttcacggatatgccacgccctcatgattcgtttatgctaggatccttgtgttctcacttgagtgaacctgtggcttcagttgtatcaactacactaatctttcacagctcgcttggataacccttgctatggtgtctaagttacctcgaagcaatgttgcaatcgccatttatcaatttgctggtcctccttgaaacaatctctcaaggtttctagggctattggtaaatgtgccttccactctcctcaaagtgtttttcctccattatgtcagctttaaattgctaaccgtcacaagccccagtgaacactggcaactcggtcaaaccttgcactgcttggaaccc

SEQ ID NO: 445429 - DNA, 1569 bp, Homo sapiens
ggacgcgtgggtcgaccacgcgtcaacaatcttgatgatgggccgctacgtggagcccatcgaggatgtgccttgtgggaacattgtgggcctcgtgggcgtggaccagttcctggtgaagacgggcaccatcaccaccttcgagcacgcgcacaacatgcgggtgatgaagttcagcgtcagccctgttgtcagagtggccgtggaggccaagaacccggctgacctgcccaagctggtggaggggctgaagcggctggccaagtccgaccccatggtgcagtgcatcatcgaggagtcgggagagcacatcatcgcgggcgccggcgagctgcacctggagatctgcctgaaggacctggaggaggaccacgcctgcatccccatcaagaaatctgacccggtcgtctcgtaccgcgagacggtcagtgaagagtcgaacgtgctctgcctctccaagtcccccaacaagcacaaccggctgtacatgaaggcgcggcccttccccgacggcctggccgaggacatcgataaaggcgaggtgtccgcccgtcaggagctcaagcagcgggcgcgctacctggccgagaagtacgagtgggacgtggctgaggcccgcaagatctggtgctttgggcccgacggcaccggccccaacatcctcaccgacatcaccaagggtgtgcagtacctcaacgagatcaaggacagtgtggtggccggcttccagtgggccaccaaggagggcgcactgtgtgaggagaacatgcggggtgtgcgcttcgacgtccacgacgtcaccctgcacgccgacgccatccaccgcggagggggccagatcatccccacagcacggcgctgcctctacgccagtgtgctgaccgcccagccacgcctcatggagcccatctaccttgtggagatccagtgtccagagcaggtggtcggtggcatctacggggttttgaacaggaagcggggccacgtgttcgaggagtcccaggtggccggcacccccatgtttgtggtcaaggcctatctgcccgtcaacgagtcctttggcttcaccgctgacctgaggtccaacacgggcggccaggcgttcccccagtgtgtgtttgaccactggcagatcctgcccggagaccccttcgacaacagcagccgccccagccaggtggtggcggagacccgcaagcgcaagggcctgaaagaaggcatccctgccctggacaacttcctggacaaattgtaggcggcccttcctgcagcgcctgccgccccggggactcgcagcacccacagcaccacgtcctcgaattctcagacgagggacacccaacactttttccatttcttcagagggaaactcagatgtccaaactaattttaacaaacgcattaagaggtttatttgggtacatggcccgcagtggcttttgccccagaaaggggaaaggaacacgcgggtagatgatttctagcaggcaggaagtcctgtgcggtgtcaccatgagcacctccagctgtactagtgccattggaataataaatttgataaggtggtga

SEQ ID NO: 445430 - DNA, 2346 bp, Homo sapiens
  misc_feature (1565)..(1565): n is a, c, g, or t
ggacgcgtgggtcgaccacgcgtcaacaatcttgatgatgggccgctacgtggagcccatcgaggatgtgccttgtgggaacattgtgggcctcgtgggcgtggaccagttcctggtgaagacgggcaccatcaccaccttcgagcacgcgcacaacatgcgggtgatgaagttcagcgtcagccctgttgtcagagtggccgtggaggccaagaacccggctgacctgcccaagctggtggaggggctgaagcggctggccaagtccgaccccatggtgcagtgcatcatcgaggagtcgggagagcacatcatcgcgggcgccggcgagctgcacctggagatctgcctgaaggacctggaggaggaccacgcctgcatccccatcaagaaatctgacccggtcgtctcgtaccgcgagacggtcagtgaagagtcgaacgtgctctgcctctccaagtcccccaacaagcacaaccggctgtacatgaaggcgcggcccttccccgacggcctggccgaggacatcgataaaggcgaggtgtccgcccgtcaggagctcaagcagcgggcgcgctacctggccgagaagtacgagtgggacgtggctgaggcccgcaagatctggtgctttgggcccgacggcaccggccccaacatcctcaccgacatcaccaagggtgtgcagtacctcaacgagatcaaggacagtgtggtggccggcttccagtgggccaccaaggagggcgcactgtgtgaggagaacatgcggggtgtgcgcttcgacgtccacgacgtcaccctgcacgccgacgccatccaccgcggagggggccagatcatccccacagcacggcgctgcctctacgccagtgtgctgaccgcccagccacgcctcatggagcccatctaccttgtggagatccagtgtccagagcaggtggtcggtggcatctacggggttttgaacaggaagcggggccacgtgttcgaggagtcccaggtggccggcacccccatgtttgtggtcaaggcctatctgcccgtcaacgagtcctttggcttcaccgctgacctgaggtccaacacgggcggccaggcgttcccccagtgtgtgtttgaccactggcagatcctgcccggagaccccttcgacaacagcagccgccccagccaggtggtggcggagacccgcaagcgcaagggcctgaaagaaggcatccctgccctggacaacttcctggacaaattgtaggcggcccttcctgcagcgcctgccgccccggggactcgcagcacccacagcaccacgtcctcgaattctcagacgacacctggagactgtcccgacacagcgacgctcccctgagaggtttctggggcccgctgcggtttatttgggtacatggcccgcagtggcttttgccccagaaaggggaaaggaacacgcgggtagatgatttctagcaggcaggaagtcctgtgcggtgtcaccatgagcacctccagctgtactagtgccattggaataataaatttgataaggtggtgaaaaaaaaaaaaanaaaaaaaaaaaaaaaaaaaaaaaaaaaaaaaaaaaaaaaaaaaaaaaaaaaaaaaaaaaaaaaaaaaaaaaaacaaacaaaaacaaaaacaaagaaggcggacgcccccacaaaaaagaacccgcgaggaggacgcacaaaagaaagaccacaccagcagcctcttgacgagagacaacgggacaccacaaaagaatgcgccaaataaaaacaaacagcacgcagcgacgaacgaataacaaagacgcgaaacagagaaaaaaacgaacagcgagacacacatgcgggaagagcaaccactcactcagcgaggggagacgcacacaagcgagagacacaacacacaccacagacagactcaacgccacgccagcgacgaacaaaacacacaccgcaagaagcaacaggcgcacaccacacaccacaacacacacacccagcaaaactgaaccgcacgagagcagacagaacaacaaatacgagcggaagctgatacagaagacgaacgagcggagcagcgacgacgaagcagggagcgacgacgcggagaggcgacggaggacaagacgacgagagaccggagacgcggagagcgagcccggccggcgacagccgccgcgaaggaacgacaaccacgcaccgacggagcgcgcggcccacgaggcggcggacagccagagacgcccgaagagagagagcagatagcggccggagcagggagggcggaggaaagggacgagaagcacagacagccaacgcacgagagggaagcaagcaagac

SEQ ID NO: 445431 - DNA, 1776 bp, Homo sapiens
ggacgcgtgggtcgaccacgcgtcaacaatcttgatgatgggccgctacgtggagcccatcgaggatgtgccttgtgggaacattgtgggcctcgtgggcgtggaccagttcctggtgaagacgggcaccatcaccaccttcgagcacgcgcacaacatgcgggtgatgaagttcagcgtcagccctgttgtcagagtggccgtggaggccaagaacccggctgacctgcccaagctggtggaggggctgaagcggctggccaagtccgaccccatggtgcagtgcatcatcgaggagtcgggagagcacatcatcgcgggcgccggcgagctgcacctggagatctgcctgaaggacctggaggaggaccacgcctgcatccccatcaagaaatctgacccggtcgtctcgtaccgcgagacggtcagtgaagagtcgaacgtgctctgcctctccaagtcccccaacaagcacaaccggctgtacatgaaggcgcggcccttccccgacggcctggccgaggacatcgataaaggcgaggtgtccgcccgtcaggagctcaagcagcgggcgcgctacctggccgagaagtacgagtgggacgtggctgaggcccgcaagatctggtgctttgggcccgacggcaccggccccaacatcctcaccgacatcaccaagggtgtgcagtacctcaacgagatcaaggacagtgtggtggccggcttccagtgggccaccaaggagggcgcactgtgtgaggagaacatgcggggtgtgcgcttcgacgtccacgacgtcaccctgcacgccgacgccatccaccgcggagggggccagatcatccccacagcacggcgctgcctctacgccagtgtgctgaccgcccagccacgcctcatggagcccatctaccttgtggagatccagtgtccagagcaggtggtcggtggcatctacggggttttgaacaggaagcggggccacgtgttcgaggagtcccaggtggccggcacccccatgtttgtggtcaaggcctatctgcccgtcaacgagtcctttggcttcaccgctgacctgaggtccaacacgggcggccaggcgttcccccagtgtgtgtttgaccactggcagatcctgcccggagaccccttcgacaacagcagccgccccagccaggtggtggcggagacccgcaagcgcaagggcctgaaagaaggcatccctgccctggacaacttcctggacaaattgtaggcggcccttcctgcagcgcctgccgccccggggactcgcagcacccacagcaccacgtcctcgaattctcagacgacacctggagactgtcccgacacagcgacgctcccctgagaggtttctggggcccgctgcgccctgtgacggcccagaagtaccgctgcgagctcctgtacgaggggcccccggacgacgaggctgccatgggcattaaaagctgtgaccccaaaggccctcttatgatgtatatttccaaaatggtgccaacctccgacaaaggtcggttctacgcctttggacgagtcttctcggggctggtctccactggcctggccgaggacatcgataaaggcgaggtgtccgcccgtcaggagctcaagcagcgggcgcgctacctggccgagaagtacgagtgggacgtggctgaggcccgcaagatctggtgctttgggcccgacggcaccggcccaacatcctcaccgacatcaccaagggatgtactgacgatgtaccagcatgat

SEQ ID NO: 445432 - DNA, 2294 bp, Homo sapiens
  misc_feature (1659)..(1659): n is a, c, g, or t
ggacgcgtgggtcgaccacgcgtcaacaatcttgatgatgggccgctacgtggagcccatcgaggatgtgccttgtgggaacattgtgggcctcgtgggcgtggaccagttcctggtgaagacgggcaccatcaccaccttcgagcacgcgcacaacatgcgggtgatgaagttcagcgtcagccctgttgtcagagtggccgtggaggccaagaacccggctgacctgcccaagctggtggaggggctgaagcggctggccaagtccgaccccatggtgcagtgcatcatcgaggagtcgggagagcacatcatcgcgggcgccggcgagctgcacctggagatctgcctgaaggacctggaggaggaccacgcctgcatccccatcaagaaatctgacccggtcgtctcgtaccgcgagacggtcagtgaagagtcgaacgtgctctgcctctccaagtcccccaacaagcacaaccggctgtacatgaaggcgcggcccttccccgacggcctggccgaggacatcgataaaggcgaggtgtccgcccgtcaggagctcaagcagcgggcgcgctacctggccgagaagtacgagtgggacgtggctgaggcccgcaagatctggtgctttgggcccgacggcaccggccccaacatcctcaccgacatcaccaagggtgtgcagtacctcaacgagatcaaggacagtgtggtggccggcttccagtgggccaccaaggagggcgcactgtgtgaggagaacatgcggggtgtgcgcttcgacgtccacgacgtcaccctgcacgccgacgccatccaccgcggagggggccagatcatccccacagcacggcgctgcctctacgccagtgtgctgaccgcccagccacgcctcatggagcccatctaccttgtggagatccagtgtccagagcaggtggtcggtggcatctacggggttttgaacaggaagcggggccacgtgttcgaggagtcccaggtggccggcacccccatgtttgtggtcaaggcctatctgcccgtcaacgagtcctttggcttcaccgctgacctgaggtccaacacgggcggccaggcgttcccccagtgtgtgtttgaccactggcagatcctgcccggagaccccttcgacaacagcagccgccccagccaggtggtggcggagacccgcaagcgcaagggcctgaaagaaggcatccctgccctggacaacttcctggacaaattgtaggcggcccttcctgcagcgcctgccgccccggggactcgcagcacccacagcaccacgtcctcgaattctcagacgacacctggagactgtcccgacacagcgacgctcccctgagaggtttctggggcccgctgcgaactcagatgtccaaactaattttaacaaacgcattaagaggtttatttgggtacatggcccgcagtggcttttgccccagaaaggggaaaggaacacgcgggtagatgatttctagcaggcaggaagtcctgtgcggtgtcaccatgagcacctccagctgtactagtgccattggaataataaatttgataaggtggtgaaaaaaaaaaaaaaaaaaacaaaaaaaaaaaacatcaacacaaacaaaacaaaaacacaaaaaaaanaaaaaaaaaaaaacaaaaaaaacaaaagaaaacaaagaagaaaaataaaaacaaaatctaatgaaaaaagttacacatagtacccttagaaaaccagagccatcgtacccatagaggccccacacaaccggcagagcaaggctaaggccctacagctacttgtcatccgggaccaaatagctactcttagctgcaattctttgaacacctaacgttaaactttggaaaggcactgaattaaccaaattgaatgtgttgccgacttcaggcgcccatgcggcagaggatttcacggatatgccacgccctcatgattcgtttatgctaggatccttgtgttctcacttgagtgaacctgtggcttcagttgtatcaactacactaatctttcacagctcgcttggataacccttgctatggtgtctaagttacctcgaagcaatgttgcaatcgccatttatcaatttgctggtcctccttgaaacaatctctcaaggtttctagggctattggtaaatgtgccttccactctcctcaaagtgtttttcctccattatgtcagctttaaattgctaaccgtcacaagccccagtgaacactggcaactcggtcaaaccttgcactgcttggaaccc

SEQ ID NO: 445433 - DNA, 1276 bp, Homo sapiens
ggacgcgtgggtcgaccacgcgtcaacaatcttgatgatgggccgctacgtggagcccatcgaggatgtgccttgtgggaacattgtgggcctcgtgggcgtggaccagttcctggtgaagacgggcaccatcaccaccttcgagcacgcgcacaacatgcgggtgatgaagttcagcgtcagccctgttgtcagagtggccgtggaggccaagaacccggctgacctgcccaagctggtggaggggctgaagcggctggccaagtccgaccccatggtgcagtgcatcatcgaggagtcgggagagcacatcatcgcgggcgccggcgagctgcacctggagatctgcctgaaggacctggaggaggaccacgcctgcatccccatcaaggccagtgtgctgaccgcccagccacgcctcatggagcccatctaccttgtggagatccagtgtccagagcaggtggtcggtggcatctacggggttttgaacaggaagcggggccacgtgttcgaggagtcccaggtggccggcacccccatgtttgtggtcaaggcctatctgcccgtcaacgagtcctttggcttcaccgctgacctgaggtccaacacgggcggccaggcgttcccccagtgtgtgtttgaccactggcagatcctgcccggagaccccttcgacaacagcagccgccccagccaggtggtggcggagacccgcaagcgcaagggcctgaaagaaggcatccctgccctggacaacttcctggacaaattgtaggcggcccttcctgcagcgcctgccgccccggggactcgcagcacccacagcaccacgtcctcgaattctcagacgacacctggagactgtcccgacacagcgacgctcccctgagaggtttctggggcccgctgcgtgccatcactcaaccataacacttgatgccgtttctttcaatatttatttccagagtccggaggcagcagacacgccctcttagtagggacttaatgggccggtcggggagggggaggcgggatgggacacccaacactttttccatttcttcagagggaaactcagatgtccaaactaattttaacaaacgcattaagaggtttatttgggtacatggcccgcagtggcttttgccccagaaaggggaaaggaacacgcgggtagatgatttctagcaggcaggaagtcctgtgcggtgtcaccatgagcacctccagctgtactagtgccattggaataataaatttgataaggtggtga

SEQ ID NO: 445434 - DNA, 1574 bp, Homo sapiens
ggacgcgtgggtcgaccacgcgtcaacaatcttgatgatgggccgctacgtggagcccatcgaggatgtgccttgtgggaacattgtgggcctcgtgggcgtggaccagttcctggtgaagacgggcaccatcaccaccttcgagcacgcgcacaacatgcgggtgatgaagttcagcgtcagccctgttgtcagagtggccgtggaggccaagaacccggctgacctgcccaagctggtggaggggctgaagcggctggccaagtccgaccccatggtgcagtgcatcatcgaggagtcgggagagcacatcatcgcgggcgccggcgagctgcacctggagatctgcctgaaggacctggaggaggaccacgcctgcatccccatcaagaaatctgacccggtcgtctcgtaccgcgagacggtcagtgaagagtcgaacgtgctctgcctctccaagtcccccaacaagcacaaccggctgtacatgaaggcgcggcccttccccgacggcctggccgaggacatcgataaaggcgaggtgtccgcccgtcaggagctcaagcagcgggcgcgctacctggccgagaagtacgagtgggacgtggctgaggcccgcaagatctggtgctttgggcccgacggcaccggccccaacatcctcaccgacatcaccaagggtgtgcagtacctcaacgagatcaaggacagtgtggtggccggcttccagtgggccaccaaggagggcgcactgtgtgaggagaacatgcggggtgtgcgcttcgacgtccacgacgtcaccctgcacgccgacgccatccaccgcggagggggccagatcatccccacagcacggcgctgcctctacgccagtgtgctgaccgcccagccacgcctcatggagcccatctaccttgtggagatccagtgtccagagcaggtggtcggtggcatctacggggttttgaacaggaagcggggccacgtgttcgaggagtcccaggtggccggcacccccatgtttgtggtcaaggcctatctgcccgtcaacgagtcctttggcttcaccgctgacctgaggtccaacacgggcggccaggcgttcccccagtgtgtgtttgaccactggcagatcctgcccggagaccccttcgacaacagcagccgccccagccaggtggtggcggagacccgcaagcgcaagggcctgaaagaaggcatccctgccctggacaacttcctggacaaattgtaggcggcccttcctgcagcgcctgccgccccggggactcttagtagggacttaatgggccggtcggggagggggaggcgggatgggacacccaacactttttccatttcttcagagggaaactcagatgtccaaactaattttaacaaacgcattaagaggtttatttgggtacatggcccgcagtggcttttgccccagaaaggggaaaggaacacgcgggtagatgatttctagcaggcaggaagtcctgtgcggtgtcaccatgagcacctccagctgtactagtgccattggaataataaatttgataaggtggtga

SEQ ID NO: 445435 - DNA, 1527 bp, Homo sapiens
ggacgcgtgggtcgaccacgcgtcaacaatcttgatgatgggccgctacgtggagcccatcgaggatgtgccttgtgggaacattgtgggcctcgtgggcgtggaccagttcctggtgaagacgggcaccatcaccaccttcgagcacgcgcacaacatgcgggtgatgaagttcagcgtcagccctgttgtcagagtggccgtggaggccaagaacccggctgacctgcccaagctggtggaggggctgaagcggctggccaagtccgaccccatggtgcagtgcatcatcgaggagtcgggagagcacatcatcgcgggcgccggcgagctgcacctggagatctgcctgaaggacctggaggaggaccacgcctgcatccccatcaagaaatctgacccggtcgtctcgtaccgcgagacggtcagtgaagagtcgaacgtgctctgcctctccaagtcccccaacaagcacaaccggctgtacatgaaggcgcggcccttccccgacggcctggccgaggacatcgataaaggcgaggtgtccgcccgtcaggagctcaagcagcgggcgcgctacctggccgagaagtacgagtgggacgtggctgaggcccgcaagatctggtgctttgggcccgacggcaccggccccaacatcctcaccgacatcaccaagggtgtgcagtacctcaacgagatcaaggacagtgtggtggccggcttccagtgggccaccaaggagggcgcactgtgtgaggagaacatgcggggtgtgcgcttcgacgtccacgacgtcaccctgcacgccgacgccatccaccgcggagggggccagatcatccccacagcacggcgctgcctctacgccagtgtgctgaccgcccagccacgcctcatggagcccatctaccttgtggagatccagtgtccagagcaggtggtcggtggcatctacggggttttgaacaggaagcggggccacgtgttcgaggagtcccaggtggccggcacccccatgtttgtggtcaaggcctatctgcccgtcaacgagtcctttggcttcaccgctgacctgaggtccaacacgggcggccaggcgttcccccagtgtgtgtttgaccactggcagatcctgcccggagaccccttcgacaacagcagccgccccagccaggtggtggcggagacccgcaagcgcaagggcctgaaagaaggcatccctgccctggacaacttcctggacaaattgtaggcggcccttcctgcagcgcctgccgccccggggagggacacccaacactttttccatttcttcagagggaaactcagatgtccaaactaattttaacaaacgcattaagaggtttatttgggtacatggcccgcagtggcttttgccccagaaaggggaaaggaacacgcgggtagatgatttctagcaggcaggaagtcctgtgcggtgtcaccatgagcacctccagctgtactagtgccattggaataataaatttgataaggtggtga

SEQ ID NO: 445436 - DNA, 1447 bp, Homo sapiens
ggacgcgtgggtcgaccacgcgtcaacaatcttgatgatgggccgctacgtggagcccatcgaggatgtgccttgtgggaacattgtgggcctcgtgggcgtggaccagttcctggtgaagacgggcaccatcaccaccttcgagcacgcgcacaacatgcgggtgatgaagttcagcgtcagccctgttgtcagagtggccgtggaggccaagaacccggctgacctgcccaagctggtggaggggctgaagcggctggccaagtccgaccccatggtgcagtgcatcatcgaggagtcgggagagcacatcatcgcgggcgccggcgagctgcacctggagatctgcctgaaggacctggaggaggaccacgcctgcatccccatcaagaaatctgacccggtcgtctcgtaccgcgagacggtcagtgaagagtcgaacgtgctctgcctctccaagtcccccaacaagcacaaccggctgtacatgaaggcgcggcccttccccgacggcctggccgaggacatcgataaaggcgaggtgtccgcccgtcaggagctcaagcagcgggcgcgctacctggccgagaagtacgagtgggacgtggctgaggcccgcaagatctggtgctttgggcccgacggcaccggccccaacatcctcaccgacatcaccaagggtgtgcagtacctcaacgagatcaaggacagtgtggtggccggcttccagtgggccaccaaggagggcgcactgtgtgaggagaacatgcggggtgtgcgcttcgacgtccacgacgtcaccctgcacgccgacgccatccaccgcggagggggccagatcatccccacagcacggcgctgcctctacgccagtgtgctgaccgcccagccacgcctcatggagcccatctaccttgtggagatccagtgtccagagcaggtggtcggtggcatctacggggttttgaacaggaagcggggccctcgcagcacccacagcaccacgtcctcgaattctcagacgacacctggagactgtcccgacacagcgacgctcccctgagaggtttctggggcccgctgcgtgccatcactcaaccataacacttgatgccgtttctttcaatatttatttccagagtccggaggcagcagacacgccctcttagtagggacttaatgggccggtcggggagggggaggcgggatgggacacccaacactttttccatttcttcagagggaaactcagatgtccaaactaattttaacaaacgcattaagaggtttatttgggtacatggcccgcagtggcttttgccccagaaaggggaaaggaacacgcgggtagatgatttctagcaggcaggaagtcctgtgcggtgtcaccatgagcacctccagctgtactagtgccattggaataataaatttgataaggtggtga

SEQ ID NO: 445437 - DNA, 640 bp, Homo sapiens
ggacgcgtgggtcgaccacgcgtcaacaatcttgatgatgggccgctacgtggagcccatcgaggatgtgccttgtgggaacattgtgggcctcgtgggcgtggaccagttcctggtgaagacgggcaccatcaccaccttcgagcacgcgcacaacatgcgggtgatgaagttcactcgcagcacccacagcaccacgtcctcgaattctcagacgacacctggagactgtcccgacacagcgacgctcccctgagaggtttctggggcccgctgcgtgccatcactcaaccataacacttgatgccgtttctttcaatatttatttccagagtccggaggcagcagacacgccctcttagtagggacttaatgggccggtcggggagggggaggcgggatgggacacccaacactttttccatttcttcagagggaaactcagatgtccaaactaattttaacaaacgcattaagaggtttatttgggtacatggcccgcagtggcttttgccccagaaaggggaaaggaacacgcgggtagatgatttctagcaggcaggaagtcctgtgcggtgtcaccatgagcacctccagctgtactagtgccattggaataataaatttgataaggtggtga

SEQ ID NO: 445438 - DNA, 1278 bp, Homo sapiens
ggacgcgtgggtcgaccacgcgtcaacaatcttgatgatgggccgctacgtggagcccatcgaggatgtgccttgtgggaacattgtgggcctcgtgggcgtggaccagttcctggtgaagacgggcaccatcaccaccttcgagcacgcgcacaacatgcgggtgatgaagttcagcgtcagccctgttgtcagagtggccgtggaggccaagaacccggctgacctgcccaagctggtggaggggctgaagcggctggccaagtccgaccccatggtgcagtgcatcatcgaggagtcgggagagcacatcatcgcgggcgccggcgagctgcacctggagatctgcctgaaggacctggaggaggaccacgcctgcatccccatcaagaaatctgacccggtcgtctcgtaccgcgagacggtcagtgaagagtcgaacgtgctctgcctctccaagtcccccaacaagcacaaccggctgtacatgaaggcgcggcccttccccgacggcctggccgaggacatcgataaaggcgaggtgtccgcccgtcaggagctcaagcagcgggcgcgctacctggccgagaagtacgagtgggacgtggctgaggcccgcaagatctggtgctttgggcccgacggcaccggccccaacatcctcaccgacatcaccaagggtgtgcagtacctcaacgagatcaaggacagtgtggtggccggcttccagtgggccaccaaggagggcgcactgtgtgaggagaacatgcggggtgtgcgcttcgacgtccacgacgtcaccctgcacgccgacgccatccaccgcggagggggccagatcatccccacagcacggcgctgcctctacgccagtgtgctgaccgcccagccacgcctcatggagcccatctaccttgtggagatccagtgtccagagcaggtggtcggtggcatctacggggttttgaacaggaagcggggccacgtgttcgaggagtcccaggtggccggcacccccatgtttgtggtcaaggcctatctgcccgtcaacgagtcctttggcttcaccgctgacctgaggtccaacacgggcggccaggcgttcccccagtgtccacctcctctgtgctgtccggacagcacagaggagggcactgcaggcgaagcagttgtgcttgctcattgcctcagcccaagtgtactcaaagaaaagaggcagccagctgtgcgtgctgtacggaaagcctccctgtgctgtccagctgtccacctcctctg

SEQ ID NO: 445439 - DNA, 1094 bp, Homo sapiens
ggacgcgtgggtcgaccacgcgtcaacaatcttgatgatgggccgctacgtggagcccatcgaggatgtgccttgtgggaacattgtgggcctcgtgggcgtggaccagttcctggtgaagacgggcaccatcaccaccttcgagcacgcgcacaacatgcgggtgatgaagttcagcgtcagccctgttgtcagagtggccgtggaggccaagaacccggctgacctgcccaagctggtggaggggctgaagcggctggccaagtccgaccccatggtgcagtgcatcatcgaggagtcgggagagcacatcatcgcgggcgccggcgagctgcacctggagatctgcctgaaggacctggaggaggaccacgcctgcatccccatcaagaaatctgacccggtcgtctcgtaccgcgagacggtcagtgaagagtcgaacgtgctctgcctctccaagtcccccaacaagcacaaccggctgtacatgaaggcgcggcccttccccgacggcctggccgaggacatcgataaaggcgaggtgtccgcccgtcaggagctcaagcagcgggcgcgctacctggccgagaagtacgagtgggacgtggctgaggcccgcaagatctggtgctttgggcccgacggcaccggccccaacatcctcaccgacatcaccaagggtgtgcagtacctcaacgagatcaaggacagtgtggtggccggcttccagtgggccaccaaggagggcgcactgtgtgaggagaacatgcggggtgtgcgcttcgacgtccacgacgtcaccctgcacgccgacgccatccaccgcggagggggccagatcatccccacagcacggcgctgcctctacgccagtgtgctgaccgcccagccacgcctcatggagcccatctaccttgtggagatccagtgtccagagcaggtggtcggtggcatctacggggttttgaacaggaagcggggccggaacacgcgggtagatgatttctagcaggcaggaagtcctgtgcggtgtcaccatgagcacctccagctgtactagtgccattggaataataaatttgataaggtggtga

SEQ ID NO: 445440 - DNA, 748 bp, Homo sapiens
  misc_feature (21)..(21): n is a, c, g, or t
ccagtgtaccggccgcgttantatatcgtgaaccggcgtcgcggagcgtgggcactataccccttggaagaaggaggagcagctgtccagagcaggtggtcggtggcatctacggggttttgaacaggaagcggggccacgtgttcgaggagtcccaggtggccggcacccccatgtttgtggtcaaggcctatctgcccgtcaacgagtcctttggcttcaccgctgacctgaggtccaacacgggcggccaggcgttcccccagtgtgtgtttgaccactggcagatcctgcccggagaccccttcgacaacagcagccgccccagccaggtggtggcggagacccgcaagcgcaagggcctgaaagaaggcatccctgccctggacaacttcctggacaaattgtaggcggcccttcctgcagcgcctgccgccccggggactcgcagcacccacagcaccacgtcctcgaattctcagacgacacctggagactgtcccgacacagcgacgctcccctgagaggtttctggggcccgctgcgaactcagatgtccaaactaattttaacaaacgcattaagaggtttatttgggtacatggcccgcagtggcttttgccccagaaaggggaaaggaacacgcgggtagatgatttctagcaggcaggaagtcctgtgcggtgtcaccatgagcacctccagctgtactagtgccattggaataataaatttgataaggtggtga

SEQ ID NO: 445441 - DNA, 675 bp, Homo sapiens
ggacgcgtgggtcgaccacgcgtcaacaatcttgatgatgggccgctacgtggagcccatcgaggatgtgccttgtgggaacattgtgggcctcgtgggcgtggaccagttcctggtgaagacgggcaccatcaccaccttcgagcacgcgcacaacatgcgggtgatgaagttcagcgtcagccctgttgtcagagtggccgtggaggccaagaacccggctgacctgcccaagctggtggaggggctgaagcggctggccaagtccgaccccatggtgcagtgcatcatcgaggagtcgggagagcacatcatcgcgggcgccggcgagctgcacctggagatctgcctgaaggacctggaggaggaccacgcctgcatccccatcaagcctgcatccccatcaaggtgaggcgccagtgaccagccttccccacgccccaccccggacacctgccctctgctttaaagctgagctgagctaggctctgcagacgcctagacttgatctcggtcttggtctcagcttcttaagttcctcaagtttcttctttgcagtcttccacaggcatgtggggctgtttttgttgttgttgttgttttttttgagatagtctcgctgtgtcatccaggctggagtgcagtggcgtgatcttggctcgctagaacctccac

SEQ ID NO: 445442 - DNA, 126 bp, Homo sapiens
gccctgtcccccgtgtccccaggcgtgtgcgtgcagacggagacagtgctgcggcaggccattgccgagcgcatcaagcctgtgctgatgatgaacaagatggaccgcgccctgctggagctgcag

SEQ ID NO: 445443 - DNA, 437 bp, Homo sapiens
ccgtgtgaggccggaccgctacgatgcccacggctatcgagaatgtgatgaagaagctgtggggtgagtactttgacccagccaacggcaagttcagcaagtcagccaccagccccgaagggaagaagctgccacgcaccttctgccagctgatcctggaccccatcttcaaggtgtttgatgcgatcatgaatttcaagaaagaggagacagcaaaactgatagagaaactggacatcaaaacctggcatgaaggcactggacatgaattcatgtccagggccttcatgcctagaaaaagaatcccaggattttccctcctgtgtgttttcgtcttgcttcttcatggtccatgatgccagctgaggttgtcagtacaatgaaaccatactggcggatgaaagcactcgacatgaagggatcctctagatccacca

SEQ ID NO: 445444 - DNA, 1753 bp, Homo sapiens
ggacgcgtgggtcgaccacgcgtcaacaatcttgatgatgggccgctacgtggagcccatcgaggatgtgccttgtgggaacattgtgggcctcgtgggcgtggaccagttcctggtgaagacgggcaccatcaccaccttcgagcacgcgcacaacatgcgggtgatgaagttcagcgtcagccctgttgtcagagtggccgtggaggccaagaacccggctgacctgcccaagctggtggaggggctgaagcggctggccaagtccgaccccatggtgcagtgcatcatcgaggagtcgggagagcacatcatcgcgggcgccggcgagctgcacctggagatctgcctgaaggacctggaggaggaccacgcctgcatccccatcaagaaatctgacccggtcgtctcgtaccgcgagacggtcagtgaagagtcgaacgtgctctgcctctccaagtcccccaacaagcacaaccggctgtacatgaaggcgcggcccttccccgacggcctggccgaggacatcgataaaggcgaggtgtccgcccgtcaggagctcaagcagcgggcgcgctacctggccgagaagtacgagtgggacgtggctgaggcccgcaagatctggtgctttgggcccgacggcaccggccccaacatcctcaccgacatcaccaagggtgtgcagtacctcaacgagatcaaggacagtgtggtggccggcttccagtgggccaccaaggagggcgcactgtgtgaggagaacatgcggggtgtgcgcttcgacgtccacgacgtcaccctgcacgccgacgccatccaccgcggagggggccagatcatccccacagcacggcgctgcctctacgccagtgtgctgaccgcccagccacgcctcatggagcccatctaccttgtggagatccagtgtccagagcaggtggtcggtggcatctacggggttttgaacaggaagcggggccacgtgttcgaggagtcccaggtggccggcacccccatgtttgtggtcaaggcctatctgcccgtcaacgagtcctttggcttcaccgctgacctgaggtccaacacgggcggccaggcgttcccccagtgtgtgtttgaccactggcagatcctgcccggagaccccttcgacaacagcagccgccccagccaggtggtggcggagacccgcaagcgcaagggcctgaaagaaggcatccctgccctggacaacttcctggacaaattgtaggcggcccttcctgcagcgcctgccgccccggggactcgcagcacccacagcaccacgtcctcgaattctcagacgacacctggagactgtcccgacacagcgacgctcccctgagaggtttctggggcccgctgcgtgccatcactcaaccataacacttgatgccgtttctttcaatatttatttccagagtccggaggcagcagacacgccctcttagtagggacttaatgggccggtcggggagggggaggcgggatgggacacccaacactttttccatttcttcagagggaaactcagatgtccaaactaattttaacaaacgcattaagaggtttatttgggtacatggcccgcagtggcttttgccccagaaaggggaaaggaacacgcgggtagatgatttctagcaggcaggaagtcctgtgcggtgtcaccatgagcacctccagctgtactagtgccattggaataataaatttgataaggtggtga

SEQ ID NO: 445445 - DNA, 1543 bp, Homo sapiens
ggacgcgtgggtcgaccacgcgtcgcggtgtggccaagtccgaccccatggtgctgtgcatcatcgaggagtcgggagagcacatcatcgcgggcgccggcgagctgcacctggagatctgcctgaaggacctggaggaggaccacgcctgcatccccatcaagcctgcatccccatcaagaaatctgacccggtcgtctcgtaccgcgagacggtcagtgaagagtcgaacgtgctctgcctctccaagtcccccaacaagcacaaccggctgtacatgaaggcgcggcccttccccgacggcctggccgaggacatcgataaaggcgaggtgtccgcccgtcaggagctcaagcagcgggcgcgctacctggccgagaagtacgagtgggacgtggctgaggcccgcaagatctggtgctttgggcccgacggcaccggccccaacatcctcaccgacatcaccaagggtgtgcagtacctcaacgagatcaaggacagtgtggtggccggcttccagtgggccaccaaggagggcgcactgtgtgaggagaacatgcggggtgtgcgcttcgacgtccacgacgtcaccctgcacgccgacgccatccaccgcggagggggccagatcatccccacagcacggcgctgcctctacgccagtgtgctgaccgcccagccacgcctcatggagcccatctaccttgtggagatccagtgtccagagcaggtggtcggtggcatctacggggttttgaacaggaagcggggccacgtgttcgaggagtcccaggtggccggcacccccatgtttgtggtcaaggcctatctgcccgtcaacgagtcctttggcttcaccgctgacctgaggtccaacacgggcggccaggcgttcccccagtgtgtgtttgaccactggcagatcctgcccggagaccccttcgacaacagcagccgccccagccaggtggtggcggagacccgcaagcgcaagggcctgaaagaaggcatccctgccctggacaacttcctggacaaattgtaggcggcccttcctgcagcgcctgccgccccggggactcgcagcacccacagcaccacgtcctcgaattctcagacgacacctggagactgtcccgacacagcgacgctcccctgagaggtttctggggcccgctgcgtgccatcactcaaccataacacttgatgccgtttctttcaatatttatttccagagtccggaggcagcagacacgccctcttagtagggacttaatgggccggtcggggagggggaggcgggatgggacacccaacactttttccatttcttcagagggaaactcagatgtccaaactaattttaacaaacgcattaagaggtttatttgggtacatggcccgcagtggcttttgccccagaaaggggaaaggaacacgcgggtagatgatttctagcaggcaggaagtcctgtgcggtgtcaccatgagcacctccagctgtactagtgccattggaataataaatttgataaggtggtga

SEQ ID NO: 445446 - DNA, 2504 bp, Homo sapiens
ggacgcgtgggtcgaccacgcgtcaacaatcttgatgatgggccgctacgtggagcccatcgaggatgtgccttgtgggaacattgtgggcctcgtgggcgtggaccagttcctggtgaagacgggcaccatcaccaccttcgagcacgcgcacaacatgcgggtgatgaagttcagcgtcagccctgttgtcagagtggccgtggaggccaagaacccggctgacctgcccaagctggtggaggggctgaagcggctggccaagtccgaccccatggtgcagtgcatcatcgaggagtcgggagagcacatcatcgcgggcgccggcgagctgcacctggagatctgcctgaaggacctggaggaggaccacgcctgcatccccatcaagaaatctgacccggtcgtctcgtaccgcgagacggtcagtgaagagtcgaacgtgctctgcctctccaagtcccccaacaagcacaaccggctgtacatgaaggcgcggcccttccccgacggcctggccgaggacatcgataaaggcgaggtgtccgcccgtcaggagctcaagcagcgggcgcgctacctggccgagaagtacgagtgggacgtggctgaggcccgcaagatctggtgctttgggcccgacggcaccggccccaacatcctcaccgacatcaccaagggtgtgcagtacctcaacgagatcaaggacagtgtggtggccggcttccagtgggccaccaaggagggcgcactgtgtgaggagaacatgcggggtgtgcgcttcgacgtccacgacgtcaccctgcacgccgacgccatccaccgcggagggggccagatcatccccacagcacggcgctgcctctacgccagtgtgctgaccgcccagccacgcctcatggagcccatctaccttgtggagatccagtgtccagagcaggtggtcggtggcatctacggggttttgaacaggaagcggggccacgtgttcgaggagtcccaggtggccggcacccccatgtttgtggtcaaggcctatctgcccgtcaacgagtcctttggcttcaccgctgacctgaggtccaacacgggcggccaggcgttcccccagtgtgtgtttgaccactggcagatcctgcccggagaccccttcgacaacagcagccgccccagccaggtggtggcggagacccgcaagcgcaagggcctgaaagaaggcatccctgccctggacaacttcctggacaaattgtaggcggcccttcctgcagcgcctgccgccccggggactcgcagcacccacagcaccacgtcctcgaattctcagacgacacctggagactgtcccgacacagcgacgctcccctgagaggtttctggggcccgctgcgtgccatcactcaaccataacacttgatgccgtttctttcaatatttatttccagagtccggaggcagcagacacgccctcttagtagggacttaatgggccggtcggggagggggaggcgggatgggacacccaacactttttccatttcttcagagggaaactcagatgtccaaactaattttaacaaacgcattaagaggtttatttgggtacatggcccgcagtggcttttgccccagaaaggggaaaggaacacgcgggtagatgatttctagcaggcaggaagtcctgtgcggtgtcaccatgagcacctccagctgtactagtgccattggaataataaatttgataaggtggtgaaaaaaaaaaaaaaaaaaaaaaaaaaaaaaaaaaaaaaaaaaaacaaacaaaaacaaaaacaaagaaggcggacgcccccacaaaaaagaacccgcgaggaggacgcacaaaagaaagaccacaccagcagcctcttgacgagagacaacgggacaccacaaaagaatgcgccaaataaaaacaaacagcacgcagcgacgaacgaataacaaagacgcgaaacagagaaaaaaacgaacagcgagacacacatgcgggaagagcaaccactcactcagcgaggggagacgcacacaagcgagagacacaacacacaccacagacagactcaacgccacgccagcgacgaacaaaacacacaccgcaagaagcaacaggcgcacaccacacaccacaacacacacacccagcaaaactgaaccgcacgagagcagacagaacaacaaatacgagcggaagctgatacagaagacgaacgagcggagcagcgacgacgaagcagggagcgacgacgcggagaggcgacggaggacaagacgacgagagaccggagacgcggagagcgagcccggccggcgacagccgccgcgaaggaacgacaaccacgcaccgacggagcgcgcggcccacgaggcggcggacagccagagacgcccgaagagagagagcagatagcggccggagcagggagggcggaggaaagggacgagaagcacagacagccaacgcacgagagggaagcaagcaagac

SEQ ID NO: 445447 - DNA, 2808 bp, Homo sapiens
ggacgcgtgggtcgaccacgcgtcaacaatcttgatgatgggccgctacgtggagcccatcgaggatgtgccttgtgggaacattgtgggcctcgtgggcgtggaccagttcctggtgaagacgggcaccatcaccaccttcgagcacgcgcacaacatgcgggtgatgaagttcagcgtcagccctgttgtcagagtggccgtggaggccaagaacccggctgacctgcccaagctggtggaggggctgaagcggctggccaagtccgaccccatggtgcagtgcatcatcgaggagtcgggagagcacatcatcgcgggcgccggcgagctgcacctggagatctgcctgaaggacctggaggaggaccacgcctgcatccccatcaagaaatctgacccggtcgtctcgtaccgcgagacggtcagtgaagagtcgaacgtgctctgcctctccaagtcccccaacaagcacaaccggctgtacatgaaggcgcggcccttccccgacggcctggccgaggacatcgataaaggcgaggtgtccgcccgtcaggagctcaagcagcgggcgcgctacctggccgagaagtacgagtgggacgtggctgaggcccgcaagatctggtgctttgggcccgacggcaccggccccaacatcctcaccgacatcaccaagggtgtgcagtacctcaacgagatcaaggacagtgtggtggccggcttccagtgggccaccaaggagggcgcactgtgtgaggagaacatgcggggtgtgcgcttcgacgtccacgacgtcaccctgcacgccgacgccatccaccgcggagggggccagatcatccccacagcacggcgctgcctctacgccagtgtgctgaccgcccagccacgcctcatggagcccatctaccttgtggagatccagtgtccagagcaggtggtcggtggcatctacggggttttgaacaggaagcggggccacgtgttcgaggagtcccaggtggccggcacccccatgtttgtggtcaaggcctatctgcccgtcaacgagtcctttggcttcaccgctgacctgaggtccaacacgggcggccaggcgttcccccagtgtgtgtttgaccactggcagatcctgcccggagaccccttcgacaacagcagccgccccagccaggtggtggcggagacccgcaagcgcaagggcctgaaagaaggcatccctgccctggacaacttcctggacaaattgtaggcggcccttcctgcagcgcctgccgccccggggactcgcagcacccacagcaccacgtcctcgaattctcagacgacacctggagactgtcccgacacagcgacgctcccctgagaggtttctggggcccgctgcgtgccatcactcaaccataacacttgatgccgtttctttcaatatttatttccagagtccggaggcagcagacacgccctcttagtagggacttaatgggccggtcggggagggggaggcgggatgggacacccaacactttttccatttcttcagagggaaactcagatgtccaaactaattttaacaaacgcattaagaggtttatttgggtacatggcccgcagtggcttttgccccagaaaggggaaaggaacacgcgggtagatgatttctagcaggcaggaagtcctgtgcggtgtcaccatgagcacctccagctgtactagtgccattggaataataaatttgataaggtggtgaaaaaaaaaaaaaaaaaaaaaaaaaaaaaaaaaaaaaaaaaaaacaagtgtgtgtgggggcggcgcgcgcgcggcccccggagagaaagttttttaaaccccgtggggggggcgcgcgcggggcccccagagtggcgtaaggaaacacggtgggcacacagcgggtgtcccaggagagaaaacccggggccaaaaaagggggcgggagttccccccaattaaaacaccgcccggggggaacaccaggagggtgttctacgagaacaaacccccagaggggggagctccgaggggcgacaacagcgggggagactatcacaccagggggggcgtcaccagggagggcgcggagatataaaaaataacgcccggggagtggtggcgcggccacacccaccacagcgaggcacacacactgtactcatgcacaaaagtgaatagaggactgaaataaacgcaaagccgacaaccaagcgtcagcggagagtcaaacaataagagcaaaaggagctgcgtcaggctgaaacgaagaacaaccgagaaagcaacaaaataagacaagcgaaaagcatggaacaacagacacataaaaaacagtcgatcagaaaaaaaagagaccagacgagaggacacaactaagacagaagacgaagaacaagcaagacacagaatgagagacacgaagcaaggaaaatggtcgcatcagacagagaaccgtaaggcaaacaatacaacagagacgacaaccgagatagaaaaaagacacgagatagtagaaaggacatcagggaaaaaggaaacgaagagacgcactcgaagcaaagaagagcagacaaagacaagataaaaccgaagcgcggcagacgacggagacgagtgacacaaagcagcgacagagaacatgagacacgaagacaaacaaacaagtaagagcagcgcagaaaccaagatcaagaaaacaagcagaaagaaagagctacgactcagcagcaccgagaagagaggcggatatcaacacaaatcacataacaaacaacgcgcacaagctcacacacc

SEQ ID NO: 445448 - DNA, 2454 bp, Homo sapiens
  misc_feature (1819)..(1819): n is a, c, g, or t
ggacgcgtgggtcgaccacgcgtcaacaatcttgatgatgggccgctacgtggagcccatcgaggatgtgccttgtgggaacattgtgggcctcgtgggcgtggaccagttcctggtgaagacgggcaccatcaccaccttcgagcacgcgcacaacatgcgggtgatgaagttcagcgtcagccctgttgtcagagtggccgtggaggccaagaacccggctgacctgcccaagctggtggaggggctgaagcggctggccaagtccgaccccatggtgcagtgcatcatcgaggagtcgggagagcacatcatcgcgggcgccggcgagctgcacctggagatctgcctgaaggacctggaggaggaccacgcctgcatccccatcaagaaatctgacccggtcgtctcgtaccgcgagacggtcagtgaagagtcgaacgtgctctgcctctccaagtcccccaacaagcacaaccggctgtacatgaaggcgcggcccttccccgacggcctggccgaggacatcgataaaggcgaggtgtccgcccgtcaggagctcaagcagcgggcgcgctacctggccgagaagtacgagtgggacgtggctgaggcccgcaagatctggtgctttgggcccgacggcaccggccccaacatcctcaccgacatcaccaagggtgtgcagtacctcaacgagatcaaggacagtgtggtggccggcttccagtgggccaccaaggagggcgcactgtgtgaggagaacatgcggggtgtgcgcttcgacgtccacgacgtcaccctgcacgccgacgccatccaccgcggagggggccagatcatccccacagcacggcgctgcctctacgccagtgtgctgaccgcccagccacgcctcatggagcccatctaccttgtggagatccagtgtccagagcaggtggtcggtggcatctacggggttttgaacaggaagcggggccacgtgttcgaggagtcccaggtggccggcacccccatgtttgtggtcaaggcctatctgcccgtcaacgagtcctttggcttcaccgctgacctgaggtccaacacgggcggccaggcgttcccccagtgtgtgtttgaccactggcagatcctgcccggagaccccttcgacaacagcagccgccccagccaggtggtggcggagacccgcaagcgcaagggcctgaaagaaggcatccctgccctggacaacttcctggacaaattgtaggcggcccttcctgcagcgcctgccgccccggggactcgcagcacccacagcaccacgtcctcgaattctcagacgacacctggagactgtcccgacacagcgacgctcccctgagaggtttctggggcccgctgcgtgccatcactcaaccataacacttgatgccgtttctttcaatatttatttccagagtccggaggcagcagacacgccctcttagtagggacttaatgggccggtcggggagggggaggcgggatgggacacccaacactttttccatttcttcagagggaaactcagatgtccaaactaattttaacaaacgcattaagaggtttatttgggtacatggcccgcagtggcttttgccccagaaaggggaaaggaacacgcgggtagatgatttctagcaggcaggaagtcctgtgcggtgtcaccatgagcacctccagctgtactagtgccattggaataataaatttgataaggtggtgaaaaaaaaaaaaaaaaaaacaaaaaaaaaaaacatcaacacaaacaaaacaaaaacacaaaaaaaanaaaaaaaaaaaaacaaaaaaaacaaaagaaaacaaagaagaaaaataaaaacaaaatctaatgaaaaaagttacacatagtacccttagaaaaccagagccatcgtacccatagaggccccacacaaccggcagagcaaggctaaggccctacagctacttgtcatccgggaccaaatagctactcttagctgcaattctttgaacacctaacgttaaactttggaaaggcactgaattaaccaaattgaatgtgttgccgacttcaggcgcccatgcggcagaggatttcacggatatgccacgccctcatgattcgtttatgctaggatccttgtgttctcacttgagtgaacctgtggcttcagttgtatcaactacactaatctttcacagctcgcttggataacccttgctatggtgtctaagttacctcgaagcaatgttgcaatcgccatttatcaatttgctggtcctccttgaaacaatctctcaaggtttctagggctattggtaaatgtgccttccactctcctcaaagtgtttttcctccattatgtcagctttaaattgctaaccgtcacaagccccagtgaacactggcaactcggtcaaaccttgcactgcttggaaccc

SEQ ID NO: 445449 - DNA, 1783 bp, Homo sapiens
ggacgcgtgggtcgaccacgcgtcaacaatcttgatgatgggccgctacgtggagcccatcgaggatgtgccttgtgggaacattgtgggcctcgtgggcgtggaccagttcctggtgaagacgggcaccatcaccaccttcgagcacgcgcacaacatgcgggtgatgaagttcagcgtcagccctgttgtcagagtggccgtggaggccaagaacccggctgacctgcccaagctggtggaggggctgaagcggctggccaagtccgaccccatggtgcagtgcatcatcgaggagtcgggagagcacatcatcgcgggcgccggcgagctgcacctggagatctgcctgaaggacctggaggaggaccacgcctgcatccccatcaagaaatctgacccggtcgtctcgtaccgcgagacggtcagtgaagagtcgaacgtgctctgcctctccaagtcccccaacaagcacaaccggctgtacatgaaggcgcggcccttccccgacggcctggccgaggacatcgataaaggcgaggtgtccgcccgtcaggagctcaagcagcgggcgcgctacctggccgagaagtacgagtgggacgtggctgaggcccgcaagatctggtgctttgggcccgacggcaccggccccaacatcctcaccgacatcaccaagggtgtgcagtacctcaacgagatcaaggacagtgtggtggccggcttccagtgggccaccaaggagggcgcactgtgtgaggagaacatgcggggtgtgcgcttcgacgtccacgacgtcaccctgcacgccgacgccatccaccgcggagggggccagatcatccccacagcacggcgctgcctctacgccagtgtgctgaccgcccagccacgcctcatggagcccatctaccttgtggagatccagtgtccagagcaggtggtcggtggcatctacggggttttgaacaggaagcggggccacgtgttcgaggagtcccaggtggccggcacccccatgtttgtggtcaaggcctatctgcccgtcaacgagtcctttggcttcaccgctgacctgaggtccaacacgggcggccaggcgttcccccagtgtgtgtttgaccactggcagatcctgcccggagaccccttcgacaacagcagccgccccagccaggtggtggcggagacccgcaagcgcaagggcctgaaagaaggcatccctgccctggacaacttcctggacaaattgtaggcggcccttcctgcagcgcctgccgccccggggactcgcagcacccacagcaccacgtcctcgaattctcagacgacacctggagactgtcccgacacagcgacgctcccctgagaggtttctggggcccgctgcgtgccatcactcaaccataacacttgatgccgtttctttcaatatttatttccagagtccggaggcagcagacacgccctcttagtagggacttaatgggccggtcggggagggggaggcgggatgggacacccaacactttttccatttcttcagagggaaactcagatgtccaaactaattttaacaaacgcattaagaggtttatttgggtacatggcccgcagtggcttttgccccagaaaggggaaaggaacacgcgggtagatgatttctagcaggcaggaagtcctgtgcggtgtcaccatgagcacctccagctgtactagtgccattggaataataaatttgataaggtggtgattggggataaatagggtacggagctcgaat

SEQ ID NO: 445450 - DNA, 2547 bp, Homo sapiens
  misc_feature (1766)..(1766): n is a, c, g, or t
ggacgcgtgggtcgaccacgcgtcaacaatcttgatgatgggccgctacgtggagcccatcgaggatgtgccttgtgggaacattgtgggcctcgtgggcgtggaccagttcctggtgaagacgggcaccatcaccaccttcgagcacgcgcacaacatgcgggtgatgaagttcagcgtcagccctgttgtcagagtggccgtggaggccaagaacccggctgacctgcccaagctggtggaggggctgaagcggctggccaagtccgaccccatggtgcagtgcatcatcgaggagtcgggagagcacatcatcgcgggcgccggcgagctgcacctggagatctgcctgaaggacctggaggaggaccacgcctgcatccccatcaagaaatctgacccggtcgtctcgtaccgcgagacggtcagtgaagagtcgaacgtgctctgcctctccaagtcccccaacaagcacaaccggctgtacatgaaggcgcggcccttccccgacggcctggccgaggacatcgataaaggcgaggtgtccgcccgtcaggagctcaagcagcgggcgcgctacctggccgagaagtacgagtgggacgtggctgaggcccgcaagatctggtgctttgggcccgacggcaccggccccaacatcctcaccgacatcaccaagggtgtgcagtacctcaacgagatcaaggacagtgtggtggccggcttccagtgggccaccaaggagggcgcactgtgtgaggagaacatgcggggtgtgcgcttcgacgtccacgacgtcaccctgcacgccgacgccatccaccgcggagggggccagatcatccccacagcacggcgctgcctctacgccagtgtgctgaccgcccagccacgcctcatggagcccatctaccttgtggagatccagtgtccagagcaggtggtcggtggcatctacggggttttgaacaggaagcggggccacgtgttcgaggagtcccaggtggccggcacccccatgtttgtggtcaaggcctatctgcccgtcaacgagtcctttggcttcaccgctgacctgaggtccaacacgggcggccaggcgttcccccagtgtgtgtttgaccactggcagatcctgcccggagaccccttcgacaacagcagccgccccagccaggtggtggcggagacccgcaagcgcaagggcctgaaagaaggcatccctgccctggacaacttcctggacaaattgtaggcggcccttcctgcagcgcctgccgccccggggactcgcagcacccacagcaccacgtcctcgaattctcagacgacacctggagactgtcccgacacagcgacgctcccctgagaggtttctggggcccgctgcgtgccatcactcaaccataacacttgatgccgtttctttcaatatttatttccagagtccggaggcagcagacacgccctcttagtagggacttaatgggccggtcggggagggggaggcgggatgggacacccaacactttttccatttcttcagagggaaactcagatgtccaaactaattttaacaaacgcattaagaggtttatttgggtacatggcccgcagtggcttttgccccagaaaggggaaaggaacacgcgggtagatgatttctagcaggcaggaagtcctgtgcggtgtcaccatgagcacctccagctgtactagtgccattggaataataaatttgataaggtggtgaaaaaaaaaaaaanaaaaaaaaaaaaaaaaaaaaaaaaaaaaaaaaaaaaaaaaaaaaaaaaaaaaaaaaaaaaaaaaaaaaaaaaacaaacaaaaacaaaaacaaagaaggcggacgcccccacaaaaaagaacccgcgaggaggacgcacaaaagaaagaccacaccagcagcctcttgacgagagacaacgggacaccacaaaagaatgcgccaaataaaaacaaacagcacgcagcgacgaacgaataacaaagacgcgaaacagagaaaaaaacgaacagcgagacacacatgcgggaagagcaaccactcactcagcgaggggagacgcacacaagcgagagacacaacacacaccacagacagactcaacgccacgccagcgacgaacaaaacacacaccgcaagaagcaacaggcgcacaccacacaccacaacacacacacccagcaaaactgaaccgcacgagagcagacagaacaacaaatacgagcggaagctgatacagaagacgaacgagcggagcagcgacgacgaagcagggagcgacgacgcggagaggcgacggaggacaagacgacgagagaccggagacgcggagagcgagcccggccggcgacagccgccgcgaaggaacgacaaccacgcaccgacggagcgcgcggcccacgaggcggcggacagccagagacgcccgaagagagagagcagatagcggccggagcagggagggcggaggaaagggacgagaagcacagacagccaacgcacgagagggaagcaagcaagac

SEQ ID NO: 445451 - DNA, 1691 bp, Homo sapiens
ggacgcgtgggtcgaccacgcgtcaacaatcttgatgatgggccgctacgtggagcccatcgaggatgtgccttgtgggaacattgtgggcctcgtgggcgtggaccagttcctggtgaagacgggcaccatcaccaccttcgagcacgcgcacaacatgcgggtgatgaagttcagcgtcagccctgttgtcagagtggccgtggaggccaagaacccggctgacctgcccaagctggtggaggggctgaagcggctggccaagtccgaccccatggtgcagtgcatcatcgaggagtcgggagagcacatcatcgcgggcgccggcgagctgcacctggagatctgcctgaaggacctggaggaggaccacgcctgcatccccatcaagatcactcaaccataacacttgatgccgtttctttcaatatttatttccagagtccgacggcctggccgaggacatcgataaaggcgaggtgtccgcccgtcaggagctcaagcagcgggcgcgctacctggccgagaagtacgagtgggacgtggctgaggcccgcaagatctggtgctttgggcccgacggcaccggccccaacatcctcaccgacatcaccaagggtgtgcagtacctcaacgagatcaaggacagtgtggtggccggcttccagtgggccaccaaggagggcgcactgtgtgaggagaacatgcggggtgtgcgcttcgacgtccacgacgtcaccctgcacgccgacgccatccaccgcggagggggccagatcatccccacagcacggcgctgcctctacgccagtgtgctgaccgcccagccacgcctcatggagcccatctaccttgtggagatccagtgtccagagcaggtggtcggtggcatctacggggttttgaacaggaagcggggccacgtgttcgaggagtcccaggtggccggcacccccatgtttgtggtcaaggcctatctgcccgtcaacgagtcctttggcttcaccgctgacctgaggtccaacacgggcggccaggcgttcccccagtgtgtgtttgaccactggcagatcctgcccggagaccccttcgacaacagcagccgccccagccaggtggtggcggagacccgcaagcgcaagggcctgaaagaaggcatccctgccctggacaacttcctggacaaattgtaggcggcccttcctgcagcgcctgccgccccggggactcgcagcacccacagcaccacgtcctcgaattctcagacgacacctggagactgtcccgacacagcgacgctcccctgagaggtttctggggcccgctgcgtgccatcactcaaccataacacttgatgccgtttctttcaatatttatttccagagtccggaggcagcagacacgccctcttagtagggacttaatgggccggtcggggagggggaggcgggatgggacacccaacactttttccatttcttcagagggaaactcagatgtccaaactaattttaacaaacgcattaagaggtttatttgggtacatggcccgcagtggcttttgccccagaaaggggaaaggaacacgcgggtagatgatttctagcaggcaggaagtcctgtgcggtgtcaccatgagcacctccagctgtactagtgccattggaataataaatttgataaggtggtga

SEQ ID NO: 445452 - DNA, 2416 bp, Homo sapiens
  misc_feature (1849)..(1849): n is a, c, g, or t
  misc_feature (2181)..(2181): n is a, c, g, or t
ggacgcgtgggtcgaccacgcgtcaacaatcttgatgatgggccgctacgtggagcccatcgaggatgtgccttgtgggaacattgtgggcctcgtgggcgtggaccagttcctggtgaagacgggcaccatcaccaccttcgagcacgcgcacaacatgcgggtgatgaagttcagcgtcagccctgttgtcagagtggccgtggaggccaagaacccggctgacctgcccaagctggtggaggggctgaagcggctggccaagtccgaccccatggtgcagtgcatcatcgaggagtcgggagagcacatcatcgcgggcgccggcgagctgcacctggagatctgcctgaaggacctggaggaggaccacgcctgcatccccatcaagaaatctgacccggtcgtctcgtaccgcgagacggtcagtgaagagtcgaacgtgctctgcctctccaagtcccccaacaagcacaaccggctgtacatgaaggcgcggcccttccccgacggcctggccgaggacatcgataaaggcgaggtgtccgcccgtcaggagctcaagcagcgggcgcgctacctggccgagaagtacgagtgggacgtggctgaggcccgcaagatctggtgctttgggcccgacggcaccggccccaacatcctcaccgacatcaccaagggtgtgcagtacctcaacgagatcaaggacagtgtggtggccggcttccagtgggccaccaaggagggcgcactgtgtgaggagaacatgcggggtgtgcgcttcgacgtccacgacgtcaccctgcacgccgacgccatccaccgcggagggggccagatcatccccacagcacggcgctgcctctacgccagtgtgctgaccgcccagccacgcctcatggagcccatctaccttgtggagatccagtgtccagagcaggtggtcggtggcatctacggggttttgaacaggaagcggggccacgtgttcgaggagtcccaggtggccggcacccccatgtttgtggtcaaggcctatctgcccgtcaacgagtcctttggcttcaccgctgacctgaggtccaacacgggcggccaggcgttcccccagtgtgtgtttgaccactggcagatcctgcccggagaccccttcgacaacagcagccgccccagccaggtggtggcggagacccgcaagcgcaagggcctgaaagaaggcatccctgccctggacaacttcctggacaaattgtaggcggcccttcctgcagcgcctgccgccccggggactcgcagcacccacagcaccacgtcctcgaattctcagacgacacctggagactgtcccgacacagcgacgctcccctgagaggtttctggggcccgctgcgtgccatcactcaaccataacacttgatgccgtttctttcaatatttatttccagagtccggaggcagcagacacgccccctgtgacggcccagaagtaccgctgcgagctcctgtacgaggggcccccggacgacgaggctgccatgggcattaaaagctgtgaccccaaaggccctcttatgatgtatatttccaaaatggtgccaacctccgacaaaggtcggttctacgcctttggacgagtcttctcggggctggtctccactggcctgaaggtcaggatcatggggcccaactatacccctgggaagaaggaggacctctacctgaagccaatccagagaacaatcttgatgatgggccgctacgtggagcccatcgaggatgtgccttgtgggaacattgtgggcctcgtgggcgtggaccagttcctggtgaagacgggcaccatcaccanccttcgagcacgcgcacaacatgcgggtgatgaagttcagcgtcagccctgttgtcagagtggccgtggaggccaagaacccggctgacctgcccaagctggtggaggggctgaagcggctggccaagtccgaccccatggttgcagtgcatcatcgaggagtcgggagagcacatcatcgcggcgccggcgagctgcacctggagatctgcctgaaggacctggaggaggaccacgcctgcatccccatcaagaaatctgacccggtcgtctcgtaccgcgagacggtcagtgaagagtcgaacgtgctctgcctctccaagtcccccaanaagcacaaccggctgtacatgaggcgcggccttccccgacggcctggccgaggacatcgataaaggcgaggtgtccgcccgtcaggagctcaagcagcgggcgcgctacctggccgagaagtacgagtgggacgtggctgaggcccgcaagatctggtgctttgggcccgacggcaccggcccaacatcctcaccgacatcaccaagggatgtactgacgatgtaccagcatgat

SEQ ID NO: 445453 - DNA, 1671 bp, Homo sapiens
ggacgcgtgggtcgaccacgcgtcaacaatcttgatgatgggccgctacgtggagcccatcgaggatgtgccttgtgggaacattgtgggcctcgtgggcgtggaccagttcctggtgaagacgggcaccatcaccaccttcgagcacgcgcacaacatgcgggtgatgaagttcagcgtcagccctgttgtcagagtggccgtggaggccaagaacccggctgacctgcccaagctggtggaggggctgaagcggctggccaagtccgaccccatggtgcagtgcatcatcgaggagtcgggagagcacatcatcgcgggcgccggcgagctgcacctggagatctgcctgaaggacctggaggaggaccacgcctgcatccccatcaagaaatctgacccggtcgtctcgtaccgcgagacggtcagtgaagagtcgaacgtgctctgcctctccaagtcccccaacaagcacaaccggctgtacatgaaggcgcggcccttccccgacggcctggccgaggacatcgataaaggcgaggtgtccgcccgtcaggagctcaagcagcgggcgcgctacctggccgagaagtacgagtgggacgtggctgaggcccgcaagatctggtgctttgggcccgacggcaccggccccaacatcctcaccgacatcaccaagggtgtgcagtacctcaacgagatcaaggacagtgtggtggccggcttccagtgggccaccaaggagggcgcactgtgtgaggagaacatgcggggtgtgcgcttcgacgtccacgacgtcaccctgcacgccgacgccatccaccgcggagggggccagatcatccccacagcacggcgctgcctctacgccagtgtgctgaccgcccagccacgcctcatggagcccatctaccttgtggagatccagtgtccagagcaggtggtcggtggcatctacggggttttgaacaggaagcggggccacgtgttcgaggagtcccaggtggccggcacccccatgtttgtggtcaaggcctatctgcccgtcaacgagtcctttggcttcaccgctgacctgaggtccaacacgggcggccaggcgttcccccagtgtgtgtttgaccactggcagatcctgcccggagaccccttaacttcctggacaaattgtaggcggcccttcctgcagcgcctgccgccccggggactcgcagcacccacagcaccacgtcctcgaattctcagacgacacctggagactgtcccgacacagcgacgctcccctgagaggtttctggggcccgctgcgtgccatcactcaaccataacacttgatgccgtttctttcaatatttatttccagagtccggaggcagcagacacgccctcttagtagggacttaatgggccggtcggggagggggaggcgggatgggacacccaacactttttccatttcttcagagggaaactcagatgtccaaactaattttaacaaacgcattaagaggtttatttgggtacatggcccgcagtggcttttgccccagaaaggggaaaggaacacgcgggtagatgatttctagcaggcaggaagtcctgtgcggtgtcaccatgagcacctccagctgtactagtgccattggaataataaatttgataaggtggtga

SEQ ID NO: 445454 - DNA, 1593 bp, Homo sapiens
ggacgcgtgggtcgaccacgcgtcaacaatcttgatgatgggccgctacgtggagcccatcgaggatgtgccttgtgggaacattgtgggcctcgtgggcgtggaccagttcctggtgaagacgggcaccatcaccaccttcgagcacgcgcacaacatgcgggtgatgaagttcagcgtcagccctgttgtcagagtggccgtggaggccaagaacccggctgacctgcccaagctggtggaggggctgaagcggctggccaagtccgaccccatggtgcagtgcatcatcgaggagtcgggagagcacatcatcgcgggcgccggcgagctgcacctggagatctgcctgaaggacctggaggaggaccacgcctgcatccccatcaagaaatctgacccggtcgtctcgtaccgcgagacggtcagtgaagagtcgaacgtgctctgcctctccaagtcccccaacaagcacaaccggctgtacatgaaggcgcggcccttccccgacggcctggccgaggacatcgataaaggcgaggtgtccgcccgtcaggagctcaagcagcgggcgcgctacctggccgagaagtacgagtgggacgtggctgaggcccgcaagatctggtgctttgggcccgacggcaccggccccaacatcctcaccgacatcaccaagggtgtgcagtacctcaacgagatcaaggacagtgtggtggccggcttccagtgggccaccaaggagggcgcactgtgtgaggagaacatgcggggtgtgcgcttcgacgtccacgacgtcaccctgcacgccgacgccatccaccgcggagggggccagatcatccccacagcacggcgctgcctctacgccagtgtgctgaccgcccagccacgcctcatggagcccatctaccttgtggagatccagtgtccagagcaggtggtcggtggcatctacggggttttgaacaggaagcggggccacgtgttcgaggagtcccaggtggccggcacccccatgtttgtggtcaaggcctatctgcccgtcaacgagtcctttggcttcaccgctgacctgaggtccaacacgggcggccaggcgttcccccagtgtgtgtttgaccactggcagatcctgcccggagaccccttcgacaacagcagccgccccagccaggtggtggcggagacccgcaagcgcaagggcctgaaagaaggcatccctgccctggacaacttcctggacaaattgtaggcggcccttcctgcagcgcctgccgccccggggactcgcagcacccacagcaccacgtcctcgaattctcagacgacacctggagactgtcccgacacagcgacgctcccctgagaggtttctggggcccgctgcgaactcagatgtccaaactaattttaacaaacgcattaagaggtttatttgggtacatggcccgcagtggcttttgccccagaaaggggaaaggaacacgcgggtagatgatttctagcaggcaggaagtcctgtgcggtgtcaccatgagcacctccagctgtactagtgccattggaataataaatttgataaggtggtga

SEQ ID NO: 445455 - DNA, 1552 bp, Homo sapiens
ggacgcgtgggtcgaccacgcgtcaacaatcttgatgatgggccgctacgtggagcccatcgaggatgtgccttgtgggaacattgtgggcctcgtgggcgtggaccagttcctggtgaagacgggcaccatcaccaccttcgagcacgcgcacaacatgcgggtgatgaagttcagcgtcagccctgttgtcagagtggccgtggaggccaagaacccggctgacctgcccaagctggtggaggggctgaagcggctggccaagtccgaccccatggtgcagtgcatcatcgaggagtcgggagagcacatcatcgcgggcgccggcgagctgcacctggagatctgcctgaaggacctggaggaggaccacgcctgcatccccatcaagaaatctgacccggtcgtctcgtaccgcgagacggtcagtgaagagtcgaacgtgctctgcctctccaagtcccccaacaagcacaaccggctgtacatgaaggcgcggcccttccccgacggcctggccgaggacatcgataaaggcgaggtgtccgcccgtcaggagctcaagcagcgggcgcgctacctggccgagaagtacgagtgggacgtggctgaggcccgcaagatctggtgctttgggcccgacggcaccggccccaacatcctcaccgacatcaccaagggtgtgcagtacctcaacgagatcaaggacagtgtggtggccggcttccagtgggccaccaaggagggcgcactgtgtgaggagaacatgcggggtgtgcgcttcgacgtccacgacgtcaccctgcacgccgacgccatccaccgcggagggggccagatcatccccacagcacggcgctgcctctacgccagtgtgctgaccgcccagccacgcctcatggagcccatctaccttgtggagatccagtgtccagagcaggtggtcggtggcatctacggggttttgaacaggaagcggggccacgtgttcgaggagtcccaggtggccggcacccccatgtttgtggtcaaggcctatctgcccgtcaacgagtcctttggcttcaccgctgacctgaggtccaacacgggcggccaggcgttcccccagtgtgtgtttgaccactggcagatcctgcccggagaccccttcgacaacagcagccgccccagccaggtggtggcggagacccgcaagcgcaagggcctgaaagaaggcatccctgccctggacaacttcctggacaaattgtaggcggcccttcctgcagcgcctgccgccccggggactcgcagcacccacagcaccacgtcctcgaattctcagacgacacctggagactgtcccgacacagcgacgctcccctgagaggtttctggggcccgctgcggtttatttgggtacatggcccgcagtggcttttgccccagaaaggggaaaggaacacgcgggtagatgatttctagcaggcaggaagtcctgtgcggtgtcaccatgagcacctccagctgtactagtgccattggaataataaatttgataaggtggtga

SEQ ID NO: 445456 - DNA, 1423 bp, Homo sapiens
ggacgcgtgggtcgaccacgcgtcaacaatcttgatgatgggccgctacgtggagcccatcgaggatgtgccttgtgggaacattgtgggcctcgtgggcgtggaccagttcctggtgaagacgggcaccatcaccaccttcgagcacgcgcacaacatgcgggtgatgaagttcagcgtcagccctgttgtcagagtggccgtggaggccaagaacccggctgacctgcccaagctggtggaggggctgaagcggctggccaagtccgaccccatggtgcagtgcatcatcgaggagtcgggagagcacatcatcgcgggcgccggcgagctgcacctggagatctgcctgaaggacctggaggaggaccacgcctgcatccccatcaagaaatctgacccggtcgtctcgtaccgcgagacggtcagtgaagagtcgaacgtgctctgcctctccaagtcccccaacaagcacaaccggctgtacatgaaggcgcggcccttccccgacggcctggccgaggacatcgataaaggcgaggtgtccgcccgtcaggagctcaagcagcgggcgcgctacctggccgagaagtacgagtgggacgtggctgaggcccgcaagatctggtgctttgggcccgacggcaccggccccaacatcctcaccgacatcaccaagggtgtgcagtacctcaacgagatcaaggacagtgtggtggccggcttccagtgggccaccaaggagggcgcactgtgtgaggagaacatgcggggtgtgcgcttcgacgtccacgacgtcaccctgcacgccgacgccatccaccgcggagggggccagatcatccccacagcacggcgctgcctctacgccagtgtgctgaccgcccagccacgcctcatggagcccatctaccttgtggagatccagtgtccagagcaggtggtcggtggcatctacggggttttgaacaggaagcggggccacgtgttcgaggagtcccaggtggccggcacccccatgtttgtggtcaaggcctatctgcccgtcaacgagtcctttggcttcaccgctgacctgaggtccaacacgggcggccaggcgttcccccagtgtgtgtttgaccactggcagatcctgcccggagaccccttcgacaacagcagccgccccagccaggtggtggcggagacccgcaagcgcaagggcctgaaagaaggcatccctgccctggacaacttcctggacaaattgtaggcggcccttcctgcagcgcctgccgccccggggactcgcagcacccacagcaccacgtcctcgaattctcagacgacacctggagactgtcccgacacagcgacgctcccctgagaggtttctggggcccgctgcgagtccgctgcattggtaccgagctgattgtat

SEQ ID NO: 445457 - DNA, 2324 bp, Homo sapiens
  misc_feature (1543)..(1543): n is a, c, g, or t
ggacgcgtgggtcgaccacgcgtcaacaatcttgatgatgggccgctacgtggagcccatcgaggatgtgccttgtgggaacattgtgggcctcgtgggcgtggaccagttcctggtgaagacgggcaccatcaccaccttcgagcacgcgcacaacatgcgggtgatgaagttcagcgtcagccctgttgtcagagtggccgtggaggccaagaacccggctgacctgcccaagctggtggaggggctgaagcggctggccaagtccgaccccatggtgcagtgcatcatcgaggagtcgggagagcacatcatcgcgggcgccggcgagctgcacctggagatctgcctgaaggacctggaggaggaccacgcctgcatccccatcaagaaatctgacccggtcgtctcgtaccgcgagacggtcagtgaagagtcgaacgtgctctgcctctccaagtcccccaacaagcacaaccggctgtacatgaaggcgcggcccttccccgacggcctggccgaggacatcgataaaggcgaggtgtccgcccgtcaggagctcaagcagcgggcgcgctacctggccgagaagtacgagtgggacgtggctgaggcccgcaagatctggtgctttgggcccgacggcaccggccccaacatcctcaccgacatcaccaagggtgtgcagtacctcaacgagatcaaggacagtgtggtggccggcttccagtgggccaccaaggagggcgcactgtgtgaggagaacatgcggggtgtgcgcttcgacgtccacgacgtcaccctgcacgccgacgccatccaccgcggagggggccagatcatccccacagcacggcgctgcctctacgccagtgtgctgaccgcccagccacgcctcatggagcccatctaccttgtggagatccagtgtccagagcaggtggtcggtggcatctacggggttttgaacaggaagcggggccacgtgttcgaggagtcccaggtggccggcacccccatgtttgtggtcaaggcctatctgcccgtcaacgagtcctttggcttcaccgctgacctgaggtccaacacgggcggccaggcgttcccccagtgtgtgtttgaccactggcagatcctgcccggagaccccttcgacaacagcagccgccccagccaggtggtggcggagacccgcaagcgcaagggcctgaaagaaggcatccctgccctggacaacttcctggacaaattgtaggcggcccttcctgcagcgcctgccgccccggggactcgcagcacccacagcaccacgtcctcgaattctcagacgacacctggagactgtcccgacacagcgacgctcccctgagaggtttctggggcccgctgcgcagtggcttttgccccagaaaggggaaaggaacacgcgggtagatgatttctagcaggcaggaagtcctgtgcggtgtcaccatgagcacctccagctgtactagtgccattggaataataaatttgataaggtggtgaaaaaaaaaaaaanaaaaaaaaaaaaaaaaaaaaaaaaaaaaaaaaaaaaaaaaaaaaaaaaaaaaaaaaaaaaaaaaaaaaaaaaacaaacaaaaacaaaaacaaagaaggcggacgcccccacaaaaaagaacccgcgaggaggacgcacaaaagaaagaccacaccagcagcctcttgacgagagacaacgggacaccacaaaagaatgcgccaaataaaaacaaacagcacgcagcgacgaacgaataacaaagacgcgaaacagagaaaaaaacgaacagcgagacacacatgcgggaagagcaaccactcactcagcgaggggagacgcacacaagcgagagacacaacacacaccacagacagactcaacgccacgccagcgacgaacaaaacacacaccgcaagaagcaacaggcgcacaccacacaccacaacacacacacccagcaaaactgaaccgcacgagagcagacagaacaacaaatacgagcggaagctgatacagaagacgaacgagcggagcagcgacgacgaagcagggagcgacgacgcggagaggcgacggaggacaagacgacgagagaccggagacgcggagagcgagcccggccggcgacagccgccgcgaaggaacgacaaccacgcaccgacggagcgcgcggcccacgaggcggcggacagccagagacgcccgaagagagagagcagatagcggccggagcagggagggcggaggaaagggacgagaagcacagacagccaacgcacgagagggaagcaagcaagac

SEQ ID NO: 445458 - DNA, 1616 bp, Homo sapiens
ggacgcgtgggtcgaccacgcgtcaacaatcttgatgatgggccgctacgtggagcccatcgaggatgtgccttgtgggaacattgtgggcctcgtgggcgtggaccagttcctggtgaagacgggcaccatcaccaccttcgagcacgcgcacaacatgcgggtgatgaagttcagcgtcagccctgttgtcagagtggccgtggaggccaagaacccggctgacctgcccaagctggtggaggggctgaagcggctggccaagtccgaccccatggtgcagtgcatcatcgaggagtcgggagagcacatcatcgcgggcgccggcgagctgcacctggagatctgcctgaaggacctggaggaggaccacgcctgcatccccatcaagaaatctgacccggtcgtctcgtaccgcgagacggtcagtgaagagtcgaacgtgctctgcctctccaagtcccccaacaagcacaaccggctgtacatgaaggcgcggcccttccccgacggcctggccgaggacatcgataaaggcgaggtgtccgcccgtcaggagctcaagcagcgggcgcgctacctggccgagaagtacgagtgggacgtggctgaggcccgcaagatctggtgctttgggcccgacggcaccggccccaacatcctcaccgacatcaccaagggtgtgcagtacctcaacgagatcaaggacagtgtggtggccggcttccagtgggccaccaaggagggcgcactgtgtgaggagaacatgcggggtgtgcgcttcgacgtccacgacgtcaccctgcacgccgacgccatccaccgcggagggggccagatcatccccacagcacggcgctgcctctacgccagtgtgctgaccgcccagccacgcctcatggagcccatctaccttgtggagatccagtgtccagagcaggtggtcggtggcatctacggggttttgaacaggaagcggggccacgtgttcgaggagtcccaggtggccggcacccccatgtttgtggtcaaggcctatctgcccgtcaacgagtcctttggcttcaccgctgacctgaggtccaacacgggcggccaggcgttcccccagtgtgtgtttgaccactggcagatcctgcccggagaccccttctcgcagcacccacagcaccacgtcctcgaattctcagacgacacctggagactgtcccgacacagcgacgctcccctgagaggtttctggggcccgctgcgtgccatcactcaaccataacacttgatgccgtttctttcaatatttatttccagagtccggaggcagcagacacgccctcttagtagggacttaatgggccggtcggggagggggaggcgggatgggacacccaacactttttccatttcttcagagggaaactcagatgtccaaactaattttaacaaacgcattaagaggtttatttgggtacatggcccgcagtggcttttgccccagaaaggggaaaggaacacgcgggtagatgatttctagcaggcaggaagtcctgtgcggtgtcaccatgagcacctccagctgtactagtgccattggaataataaatttgataaggtggtga

SEQ ID NO: 445459 - DNA, 2557 bp, Homo sapiens
  misc_feature (1290)..(1290): n is a, c, g, or t
  misc_feature (1464)..(1465): n is a, c, g, or t
  misc_feature (1468)..(1468): n is a, c, g, or t
  misc_feature (1471)..(1472): n is a, c, g, or t
  misc_feature (1485)..(1485): n is a, c, g, or t
  misc_feature (1526)..(1526): n is a, c, g, or t
  misc_feature (1536)..(1536): n is a, c, g, or t
  misc_feature (1964)..(1964): n is a, c, g, or t
  misc_feature (2296)..(2296): n is a, c, g, or t
ggacgcgtgggtcgaccacgcgtcaacaatcttgatgatgggccgctacgtggagcccatcgaggatgtgccttgtgggaacattgtgggcctcgtgggcgtggaccagttcctggtgaagacgggcaccatcaccaccttcgagcacgcgcacaacatgcgggtgatgaagttcagcgtcagccctgttgtcagagtggccgtggaggccaagaacccggctgacctgcccaagctggtggaggggctgaagcggctggccaagtccgaccccatggtgcagtgcatcatcgaggagtcgggagagcacatcatcgcgggcgccggcgagctgcacctggagatctgcctgaaggacctggaggaggaccacgcctgcatccccatcaagaaatctgacccggtcgtctcgtaccgcgagacggtcagtgaagagtcgaacgtgctctgcctctccaagtcccccaacaagcacaaccggctgtacatgaaggcgcggcccttccccgacggcctggccgaggacatcgataaaggcgaggtgtccgcccgtcaggagctcaagcagcgggcgcgctacctggccgagaagtacgagtgggacgtggctgaggcccgcaagatctggtgctttgggcccgacggcaccggccccaacatcctcaccgacatcaccaagggtgtgcagtacctcaacgagatcaaggacagtgtggtggccggcttccagtgggccaccaaggagggcgcactgtgtgaggagaacatgcggggtgtgcgcttcgacgtccacgacgtcaccctgcacgccgacgccatccaccgcggagggggccagatcatccccacagcacggcgctgcctctacgccagtgtgctgaccgcccagccacgcctcatggagcccatctaccttgtggagatccagtgtccagagcaggtggtcggtggcatctacggggttttgaacaggaagcggggccacgtgttcgaggagtcccaggtggccggcacccccatgtttgtggtcaaggcctatctgcccgtcaacgagtcctttggcttcaccgctgacctgaggtccaacacgggcggccaggcgttcccccagtgtgtgtttgaccactggcagatcctgcccggagaccccttcgacaacagcagccgccccagccaggtggtggcggagacccgcaagcgcaagggcctgaaagaaggcatccctgccctggacaacttcctggacaaattgtaggcggcccttcctgcagcgcctgccgccccggggantggggtgacaggtactttgacccacccaacggcaagttcagcaagtcagccaccagccccgaagggaagaagctgccacgcaccttctgccagctgatcctggaccccatcttcaaggtgtttgatgcgatcatgaatttcaagaaagaggagacagcaaactgatagagaatnnacntcnnactgacagcgagncaaggacaaagaaggcaacccctgctgaagtctgtgatgcnccgctggctncctgccggagacgccttgttgcagatgatcaccatccacctgccctcccctgtgacggcccagaagtaccgctgcgagctcctgtacgaggggcccccggacgacgaggctgccatgggcattaaaagctgtgaccccaaaggccctcttatgatgtatatttccaaaatggtgccaacctccgacaaaggtcggttctacgcctttggacgagtcttctcggggctggtctccactggcctgaaggtcaggatcatggggcccaactatacccctgggaagaaggaggacctctacctgaagccaatccagagaacaatcttgatgatgggccgctacgtggagcccatcgaggatgtgccttgtgggaacattgtgggcctcgtgggcgtggaccagttcctggtgaagacgggcaccatcaccanccttcgagcacgcgcacaacatgcgggtgatgaagttcagcgtcagccctgttgtcagagtggccgtggaggccaagaacccggctgacctgcccaagctggtggaggggctgaagcggctggccaagtccgaccccatggttgcagtgcatcatcgaggagtcgggagagcacatcatcgcggcgccggcgagctgcacctggagatctgcctgaaggacctggaggaggaccacgcctgcatccccatcaagaaatctgacccggtcgtctcgtaccgcgagacggtcagtgaagagtcgaacgtgctctgcctctccaagtcccccaanaagcacaaccggctgtacatgaggggacacccaacactttttccatttcttcagagggaaactcagatgtccaaactaattttaacaaacgcattaagaggtttatttgggtacatggcccgcagtggcttttgccccagaaaggggaaaggaacacgcgggtagatgatttctagcaggcaggaagtcctgtgcggtgtcaccatgagcacctccagctgtactagtgccattggaataataaatttgataaggtggtga

SEQ ID NO: 445460 - DNA, 878 bp, Homo sapiens
ccgaggatcacgatgtccgtatgagtaaaaattatatagttccctcttcctacatcccacccccagagctgcatttctcactgaaagagaagagaaaatgcagctctgacgtgttcgaggagtcccaggtggccggcacccccatgtttgtggtcaaggcctatctgcccgtcaacgagtcctttggcttcaccgctgacctgaggtccaacacgggcggccaggcgttcccccagtgtgtgtttgaccactggcagatcctgcccggagaccccttcgacaacagcagccgccccagccaggtggtggcggagacccgcaagcgcaagggcctgaaagaaggcatccctgccctggacaacttcctggacaaattgtaggcggcccttcctgcagcgcctgccgccccggggactcgcagcacccacagcaccacgtcctcgaattctcagacgacacctggagactgtcccgacacagcgacgctcccctgagaggtttctggggcccgctgcgtgccatcactcaaccataacacttgatgccgtttctttcaatatttatttccagagtccggaggcagcagacacgccctcttagtagggacttaatgggccggtcggggagggggaggcgggatgggacacccaacactttttccatttcttcagagggaaactcagatgtccaaactaattttaacaaacgcattaagaggtttatttgggtacatggcccgcagtggcttttgccccagaaaggggaaaggaacacgcgggtagatgatttctagcaggcaggaagtcctgtgcggtgtcaccatgagcacctccagctgtactagtgccattggaataataaatttgataaggtggtga

SEQ ID NO: 445461 - DNA, 1166 bp, Homo sapiens
ggacgcgtgggtcgaccacgcgtcaacaatcttgatgatgggccgctacgtggagcccatcgaggatgtgccttgtgggaacattgtgggcctcgtgggcgtggaccagttcctggtgaagacgggcaccatcaccaccttcgagcacgcgcacaacatgcgggtgatgaagttcagcgtcagccctgttgtcagagtggccgtggaggccaagaacccggctgacctgcccaagctggtggaggggctgaagcggctggccaagtccgaccccatggtgcagtgcatcatcgaggagtcgggagagcacatcatcgcgggcgccggcgagctgcacctggagatctgcctgaaggacctggaggaggaccacgcctgcatccccatcaagaaatctgacccggtcgtctcgtaccgcgagacggtcagtgaagagtcgaacgtgctctgcctctccaagtcccccaacaagcacaaccggctgtacatgaaggcgcggcccttccccgacggcctggccgaggacatcgataaaggcgaggtgtccgcccgtcaggagctcaagcagcgggcgcgctacctggccgagaagtacgagtgggacgtggctgaggcccgcaagatctggtgctttgggcccgacggcaccggccccaacatcctcaccgacatcaccaagggtgtgcagtacctcaacgagatcaaggacagtgtggtggccggcttccagtgggccaccaaggagggcgcactgtgtgaggagaacatgcggggtgtgcgcttcgacgtccacgacgtcaccctgcacgccgacgccatccaccgcggagggggccagatcatccccacagcacggcgctgcctctacgccagtgtgctgaccgcccagccacgcctcatggagcccatctaccttgtggagatccaggggacacccaacactttttccatttcttcagagggaaactcagatgtccaaactaattttaacaaacgcattaagaggtttatttgggtacatggcccgcagtggcttttgccccagaaaggggaaaggaacacgcgggtagatgatttctagcaggcaggaagtcctgtgcggtgtcaccatgagcacctccagctgtactagtgccattggaataataaatttgataaggtggtga

SEQ ID NO: 445462 - DNA, 1345 bp, Homo sapiens
  misc_feature (1108)..(1108): n is a, c, g, or t
ggacgcgtgggtcgaccacgcgtcaacaatcttgatgatgggccgctacgtggagcccatcgaggatgtgccttgtgggaacattgtgggcctcgtgggcgtggaccagttcctggtgaagacgggcaccatcaccaccttcgagcacgcgcacaacatgcgggtgatgaagttcagcgtcagccctgttgtcagagtggccgtggaggccaagaacccggctgacctgcccaagctggtggaggggctgaagcggctggccaagtccgaccccatggtgcagtgcatcatcgaggagtcgggagagcacatcatcgcgggcgccggcgagctgcacctggagatctgcctgaaggacctggaggaggaccacgcctgcatccccatcaagaaatctgacccggtcgtctcgtaccgcgagacggtcagtgaagagtcgaacgtgctctgcctctccaagtcccccaacaagcacaaccggctgtacatgaaggcgcggcccttccccgacggcctggccgaggacatcgataaaggcgaggtgtccgcccgtcaggagctcaagcagcgggcgcgctacctggccgagaagtacgagtgggacgtggctgaggcccgcaagatctggtgctttgggcccgacggcaccggccccaacatcctcaccgacatcaccaagggtgtgcagtacctcaacgagatcaaggacagtgtggtggccggcttccagtgggccaccaaggagggcgcactgtgtgaggagaacatgcggggtgtgcgcttcgacgtccacgacgtcaccctgcacgccgacgccatccaccgcggagggggccagatcatccccacagcacggcgctgcctctacgccagtgtgctgaccgcccagccacgcctcatggagcccatctaccttgtggagatccagtgtccagagcaggtggtcggtggcatctacggggttttgaacaggaagcggggccacgtgttcgaggagtcccaggtggccggcacccccatgtttgtggtcaagttcgccgccaagggggagggccagttggggcctgccgagcgggccaagaaagtagaggacatgatgaagaagctntggggtgacaggtactttgacccacccaacggcaagttcagcaagtcagccaccagccccgaagggaagaagctgccacgcaccttctgccagctgatcctggaccccattttatacttcacttttctctacagtgttgttttgttgttgttggtttttattttttatactttggccataccacagagctagattcccaggtctgggctgaataaaacaaggtttttctaaaaaaaa

SEQ ID NO: 445463 - DNA, 1810 bp, Homo sapiens
  misc_feature (415)..(415): n is a, c, g, or t
  misc_feature (717)..(718): n is a, c, g, or t
  misc_feature (721)..(721): n is a, c, g, or t
  misc_feature (724)..(725): n is a, c, g, or t
  misc_feature (738)..(738): n is a, c, g, or t
  misc_feature (779)..(779): n is a, c, g, or t
  misc_feature (789)..(789): n is a, c, g, or t
  misc_feature (1217)..(1217): n is a, c, g, or t
  misc_feature (1549)..(1549): n is a, c, g, or t
ggacgcgtgggtcgaccacgcgtcaacaatcttgatgatgggccgctacgtggagcccatcgaggatgtgccttgtgggaacattgtgggcctcgtgggcgtggaccagttcctggtgaagacgggcaccatcaccaccttcgagcacgcgcacaacatgcgggtgatgaagttcagcgtcagccctgttgtcagagtggccgtggaggccaagaacccggctgacctgcccaagctggtggaggggctgaagcggctggccaagtccgaccccatggtgcagtgcatcatcgaggagtcgggagagcacatcatcgcgggcgccggcgagctgcacctggagatctgcctgaaggacctggaggaggaccacgcctgcatccccatcaagttcgactcttcactgaccgtctcncggtacgagacgaccgggtcagatttcttatgggaatccaggcatggtcctcctccaggtacttcaggcagatctccaggtgcagctttccggcgcccgcgatgatgtgctctcccgactcctcgatgatgcactgcaccatggggtcggacttggccagccgcttcagcaagtcagccaccagccccgaagggaagaagctgccacgcaccttctgccagctgatcctggaccccatcttcaaggtgtttgatgcgatcatgaatttcaagaaagaggagacagcaaactgatagagaatnnacntcnnactgacagcgagncaaggacaaagaaggcaacccctgctgaagtctgtgatgcnccgctggctncctgccggagacgccttgttgcagatgatcaccatccacctgccctcccctgtgacggcccagaagtaccgctgcgagctcctgtacgaggggcccccggacgacgaggctgccatgggcattaaaagctgtgaccccaaaggccctcttatgatgtatatttccaaaatggtgccaacctccgacaaaggtcggttctacgcctttggacgagtcttctcggggctggtctccactggcctgaaggtcaggatcatggggcccaactatacccctgggaagaaggaggacctctacctgaagccaatccagagaacaatcttgatgatgggccgctacgtggagcccatcgaggatgtgccttgtgggaacattgtgggcctcgtgggcgtggaccagttcctggtgaagacgggcaccatcaccanccttcgagcacgcgcacaacatgcgggtgatgaagttcagcgtcagccctgttgtcagagtggccgtggaggccaagaacccggctgacctgcccaagctggtggaggggctgaagcggctggccaagtccgaccccatggttgcagtgcatcatcgaggagtcgggagagcacatcatcgcggcgccggcgagctgcacctggagatctgcctgaaggacctggaggaggaccacgcctgcatccccatcaagaaatctgacccggtcgtctcgtaccgcgagacggtcagtgaagagtcgaacgtgctctgcctctccaagtcccccaanaagcacaaccggctgtacatgaggggacacccaacactttttccatttcttcagagggaaactcagatgtccaaactaattttaacaaacgcattaagaggtttatttgggtacatggcccgcagtggcttttgccccagaaaggggaaaggaacacgcgggtagatgatttctagcaggcaggaagtcctgtgcggtgtcaccatgagcacctccagctgtactagtgccattggaataataaatttgataaggtggtga

SEQ ID NO: 445464 - DNA, 410 bp, Homo sapiens
cggtggggcaggatgtctggtcaggagggctctgaggatctggctatggggctggtaccaggagttccctgtcatgggggtggcatgtctcggacagaggcaaaggacaagggtgggttggctcttgtgggagcctctccagggatgagtcatggagggaggagcagcctggcttctgacagcatcccagactccctgggccaggtgtgtggctcctgtccccctgacgagtccctccctccatcagtgccatctccctcttctacgagctctcggagaatgacttgaacttcatcaagcagagcaaggacggtgccggcttcctcatcaacctcattgactcccccgggcatgtcgacttctcctcggaggtgactgctgccctccgagtcaccgatggcgcattggtg

SEQ ID NO: 445465 - DNA, 3038 bp, Homo sapiens
cgtttgaaacaacaaacactatctcacagtttctgtgggtcaggagtccagacatggcttattgggtaaccgcctcaaagtcttactaggctgtaatacagttattggctagagctgctgtttcatctgaaggttcaattgagagaggatccacttctaagctcactcacatggttgctggcacaattcaattcctctcaggctattggattaagggtctcagttccctactgactgttggtcagtgaactttcctcagttctttgccatatggggatccatagaacagctcactacatggcaactggcttctatcaaagtgagcaataaggaagtaagcaagagaggtttgcaagacaaaagctactatctctttataatctaatctcagaagtagcatcatatcccttctgccatattctgttcattagaagtaaatctctgggtctagccatactctattgcagagatcacacaagggtgtgaatacagacacagggattgttggggctcatcttagaggtcgtctcccatagagttagctgccaatctgaggggtcacagggacccatgcatctgggccagaacactgggatttcatcccttaagcaggacaacattcattcagaaacatatatatatgtttatatgtttctcactaatcaaagagagaagcaaggcctgtccctgacgagctccctttctcagatccgccctgaactgcctaagttaaatccatgtaccttgactaggtgaaccatagagtccaagcctagagttgggtcctgggtttaatcctggttctgtcttagccctatgaccttaggccacttctcttcggcttggttttctttgcatcaggaagtgtcggattagatcccaacaatggttctcaaattggagtgcctgtgaaaatcacctggggtcatttgaaaaattcctgatgcctagcacacccctgacaaattaaatcagaagatctgagggtgagattcaggcaagaggacttcttaacagctccccaagtgatttcattgttcagccaaggttgataactactcatttagaagattggtaatcctaactctggtacatgggaactatctgaggagctttaaaaacaaatacagaagccagaatcttaggacaattaaaatagaaatccctgggggttggtcccagacatggtgtctttcaaagctccccagatgattctaatgtgtagccagatttgtggaccctcaggtttaatgatcttcaagaatcctctatctaaggttctaagcttgtccgaatggacttgtagagctataagcacgtgtaccaccttctcaggaaggtggccgctccaatgctctctgactctaaagaatgaaatgattattcccacccgaacatccatcttctctgggtttaccgtcccctacttacagtccgtaaaaaggtcaccctagacttgacctcagtctcattgtgacacacacagcacgccagcgttcttaacctttttggttacagagacccttttagaaacttcatgaaaattgtaagtcatctcataaggaggatcttacatgcacatcaaattgagcatacaattttcatggatccctaaactcttgatacaaagttaattctatctcactataatataaaagtcaaaaacttacataacccagaaaagcagaatttgcaacatagtagaaatagaccagagtgaaagttctaatcctggttccacaactcaccagtcaacatttaggagtcactgaatcacttgatgcctcagtttactcatatgcccaattaagaattataaaatcatgcaccacataatgtcttggtcaagtacagatcacatatgacgatggtttcataagataatactgtgtttttactgtacctttgtcactgtgtttagatacacaaatacttacattatgttactattgcctatggtattgagtatagtaacctgctgtacagatctatagcctaggagcaataggctataccatacagcataggtgtgtcacaggctctcccaccttggtttgtgtaagtacactctgtgatgtttgcacacaacgaaatcgcctgatgacacaatgctcagaatgtgtctccatcattaagagatacatgactacctaccccatcaatcttgcctattccagaaacaaagtgaaattaataatataaaattggtttgatcaatttatgaattacattgtcattgaaagtaggagaactagaccaggaggcactggtgtgaccctggagtagatggaactgtttgtgcatgtgtctttcttaccttccattctcataaagaattagcacattccccacatacaccctggccagactgtgtctttgggactgcagcactaaggtgtgtttttgtttgttaacttattcccagtgcctgtgttgaccaggaggctttgggaataaaggtacataaaggtcttggagcctgggatgagcctgtggtcaagagatgggcaggcagtgtccttgaatttggaatgtgactcacactctgcctgtaggggaaagaaaagagagatcagactgttactgtgtctatgtagaaagggaagacagaagagactgcattttgaaaaagacctgcactttaaacaattgctttgctgagatgttgttaatttgtagctttgccccagccactttgccccagccactttgacccaacctggagctcacaaaaacatgtgttgtatgaaatcaaggtttaaggaatctagggctgtgcaggacgtgccttgttaacaaaatgtttacaagtagtatacttggtaaaagtcatcgccattctctagtctcaataaaccaggggaacaatgcactgtggaaagccgcagggacctctgcccttgaaagcgggatattgtccaaggtttctccccatgtcatagcctgaaatatgggctcctgggatgagaaagacctgaccgtcccccagcctgacacccttaaagggtctgtgctgaggtggattagtaaaagaggaa

SEQ ID NO: 445466 - DNA, 2984 bp, Homo sapiens
cgtttgaaacaacaaacactatctcacagtttctgtgggtcaggagtccagacatggcttattgggtaaccgcctcaaagtcttactaggctgtaatacagttattggctagagctgctgtttcatctgaaggttcaattgagagaggatccacttctaagctcactcacatggttgctggcacaattcaattcctctcaggctattggattaagggtctcagttccctactgactgttggtcagtgaactttcctcagttctttgccatatggggatccatagaacagctcactacatggcaactggcttctatcaaagtgagcaataaggaagtaagcaagagaggtttgcaagacaaaagctactatctctttataatctaatctcagaagtagcatcatatcccttctgccatattctgttcattagaagtaaatctctgggtctagccatactctattgcagagatcacacaagggtgtgaatacagacacagggattgttggggctcatcttagaggtcgtctcccatagagttagctgccaatctgaggggtcacagggacccatgcatctgggccagaacactgggatttcatcccttaagcaggacaacattcattcagaaacatatatatatgtttatatgtttctcactaatcaaagagagaagcaaggcctgtccctgacgagctccctttctcagatccgccctgaactgcctaagttaaatccatgtaccttgactaggtgaaccatagagtccaagcctagagttgggtcctgggtttaatcctggttctgtcttagccctatgaccttaggccacttctcttcggcttggttttctttgcatcaggaagtgtcggattagatcccaacaatggttctcaaattggagtgcctgtgaaaatcacctggggtcatttgaaaaattcctgatgcctagcacacccctgacaaattaaatcagaagatctgagggtgagattcaggcaagaggacttcttaacagctccccaagtgatttcattgttcagccaaggttgataactactcatttagaagattggtaatcctaactctggtacatgggaactatctgaggagctttaaaaacaaatacagaagccagaatcttaggacaattaaaatagaaatccctgggggttggtcccagacatggtgtctttcaaagctccccagatgattctaatgtgtagccagatttgtggaccctcaggtttaatgatcttcaagaatcctctatctaaggttctaagcttgtccgaatggacttgtagagctataagcacgtgtaccaccttctcaggaaggtggccgctccaatgctctctgactctaaagaatgaaatgattattcccacccgaacatccatcttctctgggtttaccgtcccctacttacagtccgtaaaaaggtcaccctagacttgacctcagtctcattgtgacacacacagcacgccagcgttcttaacctttttggttacagagacccttttagaaacttcatgaaaattgtaagtcatctcataaggaggatcttacatgcacatcaaattgagcatacaattttcatggatccctaaactcttgatacaaagttaattctatctcactataatataaaagtcaaaaacttacataacccagaaaagcagaatttgcaacatagtagaaatagaccagagtgaaagttctaatcctggttccacaactcaccagtcaacatttaggagtcactgaatcacttgatgcctcagtttactcatatgcccaattaagaattataaaatcatgcaccacataatgtcttggtcaagtacagatcacatatgacgatggtttcataagataatactgtgtttttactgtacctttgtcactgtgtttagatacacaaatacttacattatgttactattgcctatggtattgagtatagtaacctgctgtacagatctatagcctaggagcaataggctataccatacagcataggtgtgtcacaggctctcccaccttggtttgtgtaagtacactctgtgatgtttgcacacaacgaaatcgcctgatgacacaatgctcagaatgtgtctccatcattaagagatacatgactacctaccccatcaatcttgcctattccagaaacaaagtgaaattaataatatgaccaggaggcactggtgtgaccctggagtagatggaactgtttgtgcatgtgtctttcttaccttccattctcataaagaattagcacattccccacatacaccctggccagactgtgtctttgggactgcagcactaaggtgtgtttttgtttgttaacttattcccagtgcctgtgttgaccaggaggctttgggaataaaggtacataaaggtcttggagcctgggatgagcctgtggtcaagagatgggcaggcagtgtccttgaatttggaatgtgactcacactctgcctgtaggggaaagaaaagagagatcagactgttactgtgtctatgtagaaagggaagacagaagagactgcattttgaaaaagacctgcactttaaacaattgctttgctgagatgttgttaatttgtagctttgccccagccactttgccccagccactttgacccaacctggagctcacaaaaacatgtgttgtatgaaatcaaggtttaaggaatctagggctgtgcaggacgtgccttgttaacaaaatgtttacaagtagtatacttggtaaaagtcatcgccattctctagtctcaataaaccaggggaacaatgcactgtggaaagccgcagggacctctgcccttgaaagcgggatattgtccaaggtttctccccatgtcatagcctgaaatatgggctcctgggatgagaaagacctgaccgtcccccagcctgacacccttaaagggtctgtgctgaggtggattagtaaaagaggaa

SEQ ID NO: 445467 - DNA, 270 bp, Homo sapiens
  misc_feature (14)..(14): n is a, c, g, or t
  misc_feature (27)..(27): n is a, c, g, or t
  misc_feature (29)..(29): n is a, c, g, or t
gcggcccctactantactaaattcgcngncgctcgactatgagggcagcacctgcctctgaatgggaaatcatgcaactactcagaatgtgtcctcctcatctaatgctcatctgtttaatggtgatgcctcgcgtacaggatctggttacctgtgcagttgtgaatacccagaggttgggcagatcagtgtctctagtcctacccagttttaaagttcatggtaagatttgacctcatctcccgcaaataaatgtattggtgatttgga

SEQ ID NO: 445468 - DNA, 248 bp, Homo sapiens
  misc_feature (25)..(25): n is a, c, g, or t
  misc_feature (51)..(51): n is a, c, g, or t
actccccacctcgcctcaccttccntaggtctgccgggtgacccaatccantgggtgcagccccacccccgctcaacccctaatgctcatctgtttaatggtgatgcctcgcgtacaggatctggttacctgtgcagttgtgaatacccagaggttgggcagatcagtgtctctagtcctacccagttttaaagttcatggtaagatttgacctcatctcccgcaaataaatgtattggtgatttgga

SEQ ID NO: 445469 - DNA, 212 bp, Homo sapiens
actctaggctcccgggtgacgcacgccaagtacatcgtgcaagtggatggtaagatagggctgttccgaggcctgagtccccggctgatgtccaacgccctctctactgtgactcggggtagcatgaagaaggtttctttttcctagtagctgtttttcgtggtggctgacatctgagttaaccagcatctgagtacgtggcgtctgtccga

SEQ ID NO: 445470 - DNA, 1918 bp, Homo sapiens
gatgagccgatgccccccaccctcgccgccgggcgccatgggagcttcggacccggaagtggcgccctgggctcgcggcggtgccgcggggatggcgggagccggagctggagccggagctcgcggcggagcggcggcgggggtcgaggctcgagctcgcgatccaccgcccgcgcaccgcgcacatcctcgccaccctcggcctgcggctcagccctcggcccgcaggatggatggcgggtcagggggcctggggtctggggacaacgccccgaccactgaggctcttttcgtggcactgggcgcgggcgtgacggcgctcagccatcccctgctctacgtgaagctgctcatccaggtgggtcatgagccgatgccccccacccttgggaccaatgtgctggggaggaaggtcctctatctgccgagcttcttcacctacgccaagtacatcgtgcaagtggatggtaagatagggctgttccgaggcctgagtccccggctgatgtccaacgccctctctactgtgactcggggtagcatgaagaaggttttccctccagatgagattgagcaggtttccaacaaggatgatatgaagacttccctgaagaaagttgtgaaggagacctcctacgagatgatgatgcagtgtgtgtcccgcatgttggcccaccccctgcatgtcatctcaatgcgctgcatggtccagtttgtgggacgggaggccaagtacagtggtgtgctgagctccattgggaagattttcaaagaggaagggctgctgggattcttcgttggattaatccctcacctcctgggcgatgtggttttcttgtggggctgtaacctgctggcccacttcatcaatgcctacctggtggatgacagcttcagccaggccctggccatccggagctataccaagttcgtgatggggattgcagtgagcatgctgacctaccccttcctgctagttggcgacctcatggctgtgaacaactgcgggctgcaagctgggctccccccttactccccagtgttcaaatcctggattcactgctggaagtacctgagtgtgcagggccagctcttccgaggctccagcctgcttttccgccgggtgtcatcaggatcatgctttgccctggagtaacctgaatcatctaaaaaacacggtctcaacctggccaccgtgggtgaggcctgaccaccttgggacacctgcaagacgactccaacccaacaacaaccagatgtgctccagcccagccgggcttcagttccatatttgccatgtgtctgtccagatgtggggttgagcgggggtggggctgcacccagtggattgggtcacccggcagacctagggaaggtgaggcgaggtggggagttggcagaatccccatacctcgcagatttgctgagtctgtcttgtgcagagggccagagaatggcttatgggggcccaggttggatggggaaaggctaatggggtcagaccccaccccgtctacccctccagtcagcccagcgcccatcctgcagctcagctgggagcatcattctcctgctttgtacatagggtgtggtcccctggcacgtggccaccatcatgtctaggcctatgctaggaggcaaatggccaggctctgcctgtgtttttctcaacactacttttctgatatgagggcagcacctgcctctgaatgggaaatcatgcaactactcagaatgtgtcctcctcatctaatgctcatctgtttaatggtgatgcctcgcgtacaggatctggttacctgtgcagttgtgaatacccagaggttgggcagatcagtgtctctagtcctacccagttttaaagttcatggtaagatttgacctcatctcccgcaaataaatgtattggtgatttgga

SEQ ID NO: 445471 - DNA, 2293 bp, Homo sapiens
  misc_feature (1942)..(1943): n is a, c, g, or t
  misc_feature (1951)..(1951): n is a, c, g, or t
gggggcgtggcccggtcgcgtgacggggagtgacctcgccgccgggcgccatgggagcttcggacccggaagtggcgccctgggctcgcggcggtgccgcggggatggcgggagccggagctggagccggagctcgcggcggagcggcggcgggggtcgaggctcgagctcgcgatccaccgcccgcgcaccgcgcacatcctcgccaccctcggcctgcggctcagccctcggcccgcaggatggatggcgggtcagggggcctggggtctggggacaacgccccgaccactgaggctcttttcgtggcactgggcgcgggcgtgacggcgctcagccatcccctgctctacgtgaagctgctcatccaggtgggtcatgagccgatgccccccacccttgggaccaatgtgctggggaggaaggtcctctatctgccgagcttcttcacctacgccaagtacatcgtgcaagtggatggtaagatagggctgttccgaggcctgagtccccggctgatgtccaacgccctctctactgtgactcggggtagcatgaagaaggttttccctccagatgagattgagcaggtttccaacaaggatgatatgaagacttccctgaagaaagttgtgaaggagacctcctacgagatgatgatgcagtgtgtgtcccgcatgttggcccaccccctgcatgtcatctcaatgcgctgcatggtccagtttgtgggacgggaggccaagtacagtggtgtgctgagctccattgggaagattttcaaagaggaagggctgctgggattcttcgttggattaatccctcacctcctgggcgatgtggttttcttgtggggctgtaacctgctggcccacttcatcaatgcctacctggtggatgacagcttcagccaggccctggccatccggagctataccaagttcgtgatggggattgcagtgagcatgctgacctaccccttcctgctagttggcgacctcatggctgtgaacaactgcgggctgcaagctgggctccccccttactccccagtgttcaaatcctggattcactgctggaagtacctgagtgtgcagggccagctcttccgaggctccagcctgcttttccgccgggtgtcatcaggatcatgctttgccctggagtaacctgaatcatctaaaaaacacggtctcaacctggccaccgtgggtgaggcctgaccaccttgggacacctgcaagacgactccaacccaacaacaaccagatgtgctccagcccagccgggcttcagttccatatttgccatgtgtctgtccagatgtggggttgagcgggggtggggctgcacccagtggattgggtcacccggcagacctagggaaggtgaggcgaggtggggagttggcagaatccccatacctcgcagatttgctgagtctgtcttgtgcagagggccagagaatggcttatgggggcccaggttggatggggaaaggctaatggggtcagaccccaccccgtctacccctccagtcagcccagcgcccatcctgcagctcagctgggagcatcattctcctgctttgtacatagggtgtggtcccctggcacgtggccaccatcatgtctaggcctatgctaggaggcaaatggccaggctctgcctgtgtttttctcaacactacttttctgatatgagggcagcacctgcctctgaatgggaaatcatgcaactactcagaatgtgtcctcctcatctaatgctcatctgtttaatggtgatgcctcgcgtacaggatctggttacctgtgcagttgtgaatacccagaggttgggcagatcagtgtctctagtcctacccagttttaaagttcatggtaagatttgacctcatctcccgcaaataaatgtattggtgatttggaaaaaaaaacanncaacaaanaaacaatacaaaaaaacaaaaaaaaaaaaaaaacagcacacacaaacaaaatcaatagaattggggggcgcgctcgctaacaaggtcatctcccctgtggagggcccacggacgtaattgaggcgcgacccgcgcgtttgtcctgtcagaagaggacggtgcccaaatggtcggtgcggcttattacaatgaggaggcacgagtgcgggaccgtgtagtctaaccacgtcgcctgagcagtggtgaaacacgtcgctgacggagggggacgaattttggggggacgcgcacccacattgtgcgttgcgtggcccaccatgtgttgccgagccatactcagca

SEQ ID NO: 445472 - DNA, 1869 bp, Homo sapiens
  misc_feature (16)..(16): n is a, c, g, or t
  misc_feature (19)..(19): n is a, c, g, or t
  misc_feature (21)..(21): n is a, c, g, or t
  misc_feature (25)..(26): n is a, c, g, or t
atgcaggctggtacgnccngnagtnntggaggtgccgcggggatggcgggagccggagctggagccggagctcgcggcggagcggcggcgggggtcgaggctcgagctcgcgatccaccgcccgcgcaccgcgcacatcctcgccaccctcggcctgcggctcagccctcggcccgcaggatggatggcgggtcagggggcctggggtctggggacaacgccccgaccactgaggctcttttcgtggcactgggcgcgggcgtgacggcgctcagccatcccctgctctacgtgaagctgctcatccaggtgggtcatgagccgatgccccccacccttgggaccaatgtgctggggaggaaggtcctctatctgccgagcttcttcacctacgccaagtacatcgtgcaagtggatggtaagatagggctgttccgaggcctgagtccccggctgatgtccaacgccctctctactgtgactcggggtagcatgaagaaggttttccctccagatgagattgagcaggtttccaacaaggatgatatgaagacttccctgaagaaagttgtgaaggagacctcctacgagatgatgatgcagtgtgtgtcccgcatgttggcccaccccctgcatgtcatctcaatgcgctgcatggtccagtttgtgggacgggaggccaagtacagtggtgtgctgagctccattgggaagattttcaaagaggaagggctgctgggattcttcgttggattaatccctcacctcctgggcgatgtggttttcttgtggggctgtaacctgctggcccacttcatcaatgcctacctggtggatgacagcttcagccaggccctggccatccggagctataccaagttcgtgatggggattgcagtgagcatgctgacctaccccttcctgctagttggcgacctcatggctgtgaacaactgcgggctgcaagctgggctccccccttactccccagtgttcaaatcctggattcactgctggaagtacctgagtgtgcagggccagctcttccgaggctccagcctgcttttccgccgggtgtcatcaggatcatgctttgccctggagtaacctgaatcatctaaaaaacacggtctcaacctggccaccgtgggtgaggcctgaccaccttgggacacctgcaagacgactccaacccaacaacaaccagatgtgctccagcccagccgggcttcagttccatatttgccatgtgtctgtccagatgtggggttgagcgggggtggggctgcacccagtggattgggtcacccggcagacctagggaaggtgaggcgaggtggggagttggcagaatccccatacctcgcagatttgctgagtctgtcttgtgcagagggccagagaatggcttatgggggcccaggttggatggggaaaggctaatggggtcagaccccaccccgtctacccctccagtcagcccagcgcccatcctgcagctcagctgggagcatcattctcctgctttgtacatagggtgtggtcccctggcacgtggccaccatcatgtctaggcctatgctaggaggcaaatggccaggctctgcctgtgtttttctcaacactacttttctgatatgagggcagcacctgcctctgaatgggaaatcatgcaactactcagaatgtgtcctcctcatctaatgctcatctgtttaatggtgatgcctcgcgtacaggatctggttacctgtgcagttgtgaatacccagaggttgggcagatcagtgtctctagtcctacccagttttaaagttcatggtaagatttgacctcatctcccgcaaataaatgtattggtgatttgga
